United States Patent Application Publication US 2020/0109395 A1 - sequence listing, part 6

SEQ ID NO: 28195 - DNA, 5943 bp, Salmonella enterica
  subsp. enterica serovar Norwich str. CFSAN001077
atgaataacccactggaaacatttgaatcgataagagatttttatatttcgtatcttgaaacggccttccgtattgattcatcagatatacagtctgaacggcgagcgttactggaacagcaagggacattatgcgccgatctatttcttgagccgatgccccgatatcagcactatggcttaactatcagtgaattacgaaatgatgctcatggtcagacatggttgcctgggtttaatgcgcaacaaagggcggcattcatcgacctctgtttaggtgggcttctgccctgcaataaaacagatccggctaagggacgttttaatctttatacccatcaactggacatgctgaaaagaggggtacagccagggaagccgggcatcgtcacctccggaaccggctccggtaaaacagaatcatttttgctgccggttttggcgcagatcgcaaaagaagccacaggctggccgcaaagtccggcgttgaagcactggcaaccgtggtggcagaaggtagcggataaacagcccacctttatgcgcgagcatgaggccgtcgcacgtccgaaagcggtacgcgcgctgattctctacccgatgaatgccctggtagaagatcaactggtacgtatgcgacgggcactggattccagcgaagctcatgatgtcatggatgcacattttggcggtaaccgaatcttttttggccgttataccagcgcaactaaagtaactggctggctcaaacatccccgactcagtgaagaaaaaaatgagaaaaagcgcgtggctaaaaaaatcactgagctacgtgagtatatgcaattaacggaagagacccatcaggaggctgtacgacaagcacagcagggtaaagataaagaattatcgtttaacttccccagaactgttggtggagaggttctcagccgctgggaaatgcaaaagacaccacccgatattctgatcaccaacaccagcatgctctcaacgatgctggttcgtgaggtggacgatcctatttttgaacaaacccgacagtggattgagcgtgaccctgatgcctatttttatcttatccttgacgaacttcatctacagcgaggaaccgccggtaccgaagtcagctacttgcttaagcatttgatcagtcggctggggctggatcaggaaaaacaccgacacaaattgcgtattctggcctccagcgcctctttacccgttgaaggtcctgaaggcgaacaaagcgtcgaatatttatggggaatgtttggtcagcggggactaccttcaggtgctacgtctagcgactggagggaatgtattatcaaaggcgacacccttcccccgggcaacatgtctcttttccatggggacctggaggcgttttatcacgcagtgcttcagttacagcaagcaccacttacatcattacaacactggcaaaatgtcgcccgcagcatgggaatgacaaccagtgaagtttctacagagcaattggcgcaacgtgtcgtcttacaggctgccaacttgcttgaaagtggctgctatacggacgatctctctccgagagccacgtcaattaaaatgctcagttcacgcctgtttaacgcccaaccccatagtgaaaaagcgctccgggcattaatctggttgcgctcgactgagggagactggtcgcaatggttttcacatgattttcctgatgatatcggcgcgccgcgtttccgcgcgcatgcttttttacgcgcactggaagggttatatgccgcgccattgcccgcctccagcgccgcatctacgcaagaaatcaatcaccgctattttggcgatcttaccgtagagtccggcttacgttacggcaaagataaaacatcgcggcgtgtcgagttgctctattgtgaatgttgcggcaatctctttttgggcggtaaaccttcagtcttttctggttcagaaagtcgaattgaacttttacccaacgacccggatacggaacagctaccggaacacgcaaaatcagtcatgatagaacgccgatctgctgaagaatacgcgctatttatgcccgtcgttgaacgtttctggccgaaaggcaacgaaacgttaaatggtgatgatgctttcggtacatggggcaaagccagttacgatccatttaccgccaccattcaacacccagtatcgctcttaaaaccgctacctgaaaaccatatcgcgggctggttctattacgtcaaacccggtgaatttgcctccccggaaagaggccagtcatccagccagtcaccgggaacggcgctaccttttcagtgtccggcatgtggtacatcctacaaatacggcaaaggtaagctctccccaatccgtagctttcgcgtcggtttttcgaaaacgacacagctactggccagctcgctaatggcggaactacagcgctcgggtaaccgtgagcaactggtaacgttttcagacagtcgtcaggatgccgccagggcggcgctcgatctggaatcgggtcatcatgacgacgtcagacgagaaattgttgtccattcgctacagtctattgcggctgataaaccgtcccataaccaactaaaaatacgccaggcagagatagaggaccggaacaaaacactgattaacctcaacgtaaggtcagatgaggaagaggatgagatggatcgactcgctgatgaacggaagaaaatcagagggttattatcaaaacctgaaactgacagcatacctctgcgtgaaatcctcgaacctgaatcaccggatgcaggccaaccgcttggcttgctgttaagggcgcaggtagatgccggtattcacccttccgatcgtactggcatcgcgcctgttcccgatcctgaaaaacatgaagaaggtacgctgacctttgcatggcaacaactctttgaaaagaatgcgcagggggtgtggtgctggaaggcgcttccatcctatgaagataacctgctggtagcacgacaggagatttcacgcgatctgaaacggctggtgggggaaagcgtattcagtaaaacctacttcgcgttggaagagtccggctggggttatccctgccttccgattaccggaaacgactcacgggaacatctcgcgatttatgacgcaatgtttcgcgtgttggcggacgcgtaccgggttactccttcacaatatacaaagccagaaaccccatggagttcagcgagcgatgtcaaatctagaaaccgcctgtaccgctttactcaggcaatatgccagcgctcgggaggcgagcctttatctttaattgatagttttctccggcgactggagctggcgggtcatcagggcggcattattgatattggcaaaatgcactttaagctggcggaacctgccgatcgcgtctggcgttgctcccgttgcgggcgtatacacatgcacaccggcgcgggaatctgtactcgctgctactctcctttaccagaaacgccatgtagcgacgcaaaaacgctccagatgcaacactatctcggcaaacgcctctcacattcttctggtattcaccggatgcgctcagaggaactgactggaatgaccgaaaacccggcggcaaggctacgccggtttaaaggtattctgattgctgacgatgatgatattttgccggaaggaatgaaagattttgcgcccgatcgagatcttgaccgggcagctcgcgtggtagatgttctttccgtaaccacaaccatggaagtgggagtggatattggtgatttacgtgcggtctttcaggccaacatgccgccacagcgctttaattatcaacagcgtgtcggacgagccggacgacgtggacaggcgttttcattcgtattaaccgcgtgtcgcagcaagagtcacgatctgttttacttccgccatccggaaaaaattaccggcgatctccctccgccaccgtttttgaccacaaagctggaaatgatctgccagagactggtacgaaaaatttggctggtgtcggcattcaaatggttaaggcagcaaacggaaaaagccgatcacccatggccggttgacgactacgcgcatgcccctgataaccacggtgagttttttccggtgcactggctgaaagaaaaccaaacggactggctgccaaaaatccggcaggccatcgaagcagccatcctggcacgcgatgaatttgcccggacttgcacgcagcaagaccatcatttgttccagagagttattcagcctttgacgccggaacaactgattcaggatattaacgccgtactaaacgacagtgcaatggaggcgaaaggactggcagaagcgctggcggaacacggtaaattcccaatgtatggcatgccgacccgctctcgccttttgctgacaaggcccgtcagcacaggcgaaaaagaaatcgaatttgccagcatggatcgcgatctggatattgcgatacaggaatttgcccccggaaaaattctggttcaagacaaacgacgctactttacggcaggttatagtggaatgcttaaacagagcagaaaaaatccacgatcattttattcaaatgcccccgaaccgggtgaactcagaacaatgaccgcctgtccggtatgcaacatctgggctccggcaaactctctggccaccgaatgtactatctgtggtgccgttatggataaggcggaacgctatcaatgctatgttccttacggatttatcaccacgctggaaccaaaatcggccaaagaggattttgatcaaatcctgaccacggccagtcgtgtatcaattgcagaagcctacactttttctgcaatgccagagcctgacgttaatgtggcgatacagctccagccacagacatgtctgcaccgcctgaatcggggaatttacactgataaaacatggcgtggtttcagcgcaacacaggggagcctatcggtccctttcagaaagcaggggacttaccagccgctttgggcgaaccgggtttggatggataatcaaattattgaggccgacctgttagttaaaaaccgctttaccgatcggggagaaacccgaaacacattttaccttgccgcgcctaaagtgactgatctacttgcgctgatggttgcccaaaccccgccgggtctccggctacagtattccactctaacgccggcattcagagctgctgcgctctcggcgtcttttatcattgtcaactatgcatcaaaagagctactggatattgatcctgaagaaatcgaaattctggaaccccgcgttcaaatgctgaaaaacggtaagtcggtaccggttctgcaaatggccgatcgtctggttaatggttcagggttatgtgaacggctacagcagaagggcgcatccggttctctcattatccttgaggtcatgaagaatattttaaataacaaaacggcctacccgctggctgagttcctgcaatccgatcatcgcgaacgatgctttcaagggtgttatcactgcctgcaccgatacggaaaccagccgtatcacggattgctggactggcgtctgggactggatgttattcaacttcttctggatcaaacctataacgccgggctgaacagtgattttacatctccgggcgtgtctgactggccggaaaatgccctacgattagccaaagaggccgcttcgctatacagcgacagtgacgtaaaagtgatagggaatatacccgtgattcgcaccggggacgggcgctgggccgccgtactacatccattctgggatcccgatgctgtatttgctgcaaaccccgaacttgaggcattttcatatgaggtggacgtagacgcgacgaatacttttgcattgtcccgccgcatggggactgaaatggcgaaattacggactcaggcgttctcatctcaggagtga

SEQ ID NO: 28196 - DNA, 1086 bp, Salmonella enterica; identical to SEQ ID NO: 28117
  subsp. enterica serovar Norwich str. CFSAN001077

SEQ ID NO: 28197 - DNA, 2766 bp, Salmonella enterica
  subsp. enterica serovar Norwich str. CFSAN001077
atggatgattctttcccggttactttagagcaatggaatgctgaactagtaaatatcgtcttttttgagtcttcgcatacgggctcgactttaagccgaattgatgccacggggcgcgtttttgagcaacttgcaggttcacgtagcaaagaggatgctaagcgaagttttctggattcgtttggaaaaaaggcgtctaaaatccaggatgcactcagggatgagtcgcggttagatattttagcgcaaagaaaaggataccctacttattttgccattttatatttaacattacttgctgccagtgctgatgatgagacgcatgacgaaggggattttcgggttcgattttctgtactgctcggttttgataaaaataaaaaatttgtttttactgaattacccaatttatgggaaagattagaacgatggagtagtagaaaacaaaactgtacccgtttagtcctcccagaaccatcaaaacatgaaagattgattgggtattctaagagaattgcttttccctgctataaggatgaggtttttttacgggatatactcgtcaataatgaattagatagccattcaacttttgagtcagttaataagctagtacatcaatatctatcttattttggcgagatttttaatcaggagtttattgagttcagaacattactttcaaaggttgccatgcggcaggcttatgactctcctttttggggcgcggttcgtgatattactgtacatactgagagagaacaactcaaagagaatggtaagtattgtattcacatggagcttaatgattcaggtcatccagagatttatcttcttatggatgacgctgctgttactgcctcagaaattaagcattattactccttgtctaatgaaatagagaactataataatatatattacgaacgagacataggtactacattaaattccctggatttattattaaaaagacggaagggttatttctataaatcacgagcgggggctgcactgcggtctgggtgtttgccgctttttcgtgatgatttttttcatattagttcagaaggagattattatgataattctccactctatttaattcttcaccataaatatgcagacagtattttcatagccttgaagaatgctggtgaaagagcacaacgtcgggatattaaatctaccaagtggtcggtagtttcttccgataacgttggcaggcaaacgctggataagatagctcatttgttaccagaggaagcccgtcgttttctaatacagggatggcgccctgcccggcctcgtatgtcaggcgcagctcggtttggacaggctatactgcttaaccctgccagtacgcctattattcatatgcctgaagtattaagaggatgctatgtcattagaaataaaaacggagaagaattaacccatggctcgctatcgcagggggctgaaggattattcattccaccagaggaactgatggaaatatctggtcaggcattttgtcgctatgaacttacgttggcgtattcagatatcccagtaaattttgatgtacacgtgttagatcatgcgccttacgccacttattgtaaaattacagagccacatgattggttgactgatggaccatcgggagtattaatggcgttaggggatacggcagtgctccccccactgaaacgcgaagaaataacgccattgagtggtgctcagatgttatggcagtatgaaaattgccttcctgtaacatgtcaatataccgaattacataatatacccgcagcatttgactggatcgctgaggcgctggccttgcgttttcagcgccgtagcacattgccttttggtgaattaaaacaacacattgaaccagtatcacaggtaacaaggatacccgaatggcaattgcgtcgcatgctctttgccgctggctggctttgtgtagtacaacgacgttattcgccatattcgttagtctcattggctgaaagaaccatttccgttgatgtcactgaacagggaattattgcccgaattatgggaatgtttacaagaagtgaacgtaatcttctacaagaagcacttaatgacggtgagcgaatagggcgccggttagttgaggataacggctgttcaatggggtgtattgaattgcatctgtcagccagagaacgtgtccatactttcattgagcagtttgggttacgtttgattaattacgacgatttacccgtcaatgctttgagtggagtattgttaccgtcgtctcaaatgcagtttatcccgactttacccccggatctccatgtatcgctttggcaagctgaaaaataccaatggtcagaagaacaacggctaactcaaacggctaataacctattgttacgatgtcaggaaaaacagcgttatcgttattttattcggcagaatgccggatactggcaaaccgatagcttctcctgggccttaatggctcagatgatatgttcaggagtaacgtttggtgtgcgtaaaggcgatagtgactggtcctggtcaacgaagttcattgcgttaccgccctccgttttacagtggtggatccacgttgctcatggctgtttgtcgataacagataatggtagctacttatttgcaggcggcaaagtaccactctgggacaatgtaatgaccttcccttcctgccaacgagcgttggcacgacggagcagagcgctgacaatacgcaagctgcgcagaaccttacagtaa

SEQ ID NO: 28198 - DNA, 2781 bp, Salmonella enterica
  subsp. enterica serovar Norwich str. CFSAN001077
atggctaaaaagaaaagtattatcagcgaccggctgggccaaatgtactacttcggtacagaatctcatgaattgagcagatgcttgcaagagtgcaaacaacgactcaccagaaatggcgctaaagcggataatttaccgaaaggaccagagaaaaggttacattttctccgtacgttaccacttaaggccaaacctgttgtgtctgattggcttcgtgaaaatttaacgtttcctgaacaaaatgacccacaaatcgttcttagggatctgttagaagcagaaagtaatgcggaagatattgaactctgtaaaccgttatggcgcactattcttggattctatatttcttctgactgtcctgaaattataacgagattcctgaatggtgaaaaaattgatttaccccaacaaggtgtttctgactccttgacaattaatgtcactgatgaagacattgaacaatgtgctttaattagccagggtaaagaaattcctataccggagcgtactattccactgtttattggaggattggttgacgtactcaagggaacgcatacagctgataatcgatggcggacaaagctatcagaacattctttaccgctggcacgaaaactgggtgaacttatcgatcagtttgaagctagtaacgacattaaagcgatggatagtaccagtattatacaggctccccccgttgtatccaaagaaatcgacggtacgatggatgaggttatgttcattggtaaagtgttagcgctaactgcgtccggtgctttttttgttacaccgattagtctgttaattgatggcaacctacgagacctccctgaggcactggtaaaagatctttaccctcatagcggtgaagccattggttttgagaaccatttcagcaaaaaatttgctcggggtgaaatggcaatatggaaagcccgatatcagccgtctgataaacctgcgcagtatgtcattactgactacctgtcgcgcgtttatcctgtagtcgcgctaccccatgcctccgatgagcctgacgctgtcagggagtggctactcaccaactaccagccgcaaaacgatacgccggtcatttttcagctaagtgatggcgtatccctgagattaccgggtgacttgcttgatcctaaaaaatatgactttgatatgccgctggagagttatcgtcaggttcctcagacactacttaattctcatgccctaacggtgatcactgaacttcctcaggtgagtgaaaaatatgattgcgctgaagccagcacgtggatcaaacgcctgcttaaacgaactgattcagcaaaatatttccctcaatttagtaaagggcagctacaaaatttaactcattttattgctgaacatgagtctgataacgaggcgtcctatcttcgcgcagtatctcatctggaacagatagcagatatgagatcctttcttaatgatacgactcaacagttactggctttacctgaggttgagacgcaaattaatattgagaaacaggaaatattggctcgttacgaagacgaacagcaccagattaaacaatcaataacggtattatctgaaaagaaaatacagcttgaaaatgaaatagccgatcagaagaaaaagttgaaaaaagaaactgatcgcattaataaagcgctacgtcagcaagaaaatgaactggaacaacggataaaaaagaccttcgaagccgcatctcaagcgggagtggaaacgctggcccagacagcgctactgcgggcaataatcaaaaatgaaacagcacaggagcaacctgtccaacaacgaataacctcagaacctgtagccgaatcagcaaattctaatttcccattagcagagacgaatgctctgactcgcaagcatcaactgatatcggctatcgaaaaacaggcactggcgacgggactaagtgaatctttattatccagcctgattgctactgcgagtattacacccgcggtcggattgatgggaaaacagacaaaacaggctatcgcctcattagcgaaccttttagctggtaatgtttggggggaagtgtcggtacatagcgatcattttagcttcagtgatttaatgaactcccccacactgatccgcttatctggcgatgctcttaccatgacgctgggtgattttttgacccaacaacaagaggcagggctggcgagcatcgttgaattgcgtggttttaaccgcactccgccagaaactctactccctgaactccatgagtgtttattcagaactccctatcctgccgcatgcagttggacggatcggcggcaggctctacgacatttacccattcggcacccgatgctttttttactcacattcaccaccgggaaaagcacgtttccattgcaggctcctcttgctcaccagttacccctgtttctggcagagaatatatggtcggatgaacgaccatttgcgcaaaatactgacatcacgccttctcgtattactccagaactatggcagacaatgtatgtgggcaaccaccagccagagcatcaggcttgtgctccatgggaagcgctaaaagcagcgctactctctttacttcctgatgaacaagcgcaagccgttgcccgtctggcttacggtctcggtcgtagtacaacacaagatattgcgaccacgattgacgctcttgccccagaattagggccatatgttcaggaaatgactaccggcgaatcggcaagcgtacttgagcaccttttccagttataa

SEQ ID NO: 28199 - DNA, 5943 bp, Salmonella enterica; identical to SEQ ID NO: 28116
  subsp. enterica serovar Virchow str. ATCC 51955

SEQ ID NO: 28200 - DNA, 1086 bp, Salmonella enterica; identical to SEQ ID NO: 28117
  subsp. enterica serovar Virchow str. ATCC 51955

SEQ ID NO: 28201 - DNA, 2766 bp, Salmonella enterica; identical to SEQ ID NO: 28118
  subsp. enterica serovar Virchow str. ATCC 51955

SEQ ID NO: 28202 - DNA, 2781 bp, Salmonella enterica; identical to SEQ ID NO: 28119
  subsp. enterica serovar Virchow str. ATCC 51955

SEQ ID NO: 28203 - DNA, 5943 bp, Salmonella enterica subsp. enterica serovar Virchow str. SL491; identical to SEQ ID NO: 28116

SEQ ID NO: 28204 - DNA, 1086 bp, Salmonella enterica subsp. enterica serovar Virchow str. SL491; identical to SEQ ID NO: 28117

SEQ ID NO: 28205 - DNA, 2781 bp, Salmonella enterica subsp. enterica serovar Virchow str. SL491; identical to SEQ ID NO: 28119

SEQ ID NO: 28206 - DNA, 5943 bp, Salmonella enterica subsp. enterica serovar Virchow str. SVQ1; identical to SEQ ID NO: 28116

SEQ ID NO: 28207 - DNA, 1086 bp, Salmonella enterica subsp. enterica serovar Virchow str. SVQ1; identical to SEQ ID NO: 28117

SEQ ID NO: 28208 - DNA, 2766 bp, Salmonella enterica subsp. enterica serovar Virchow str. SVQ1; identical to SEQ ID NO: 28118

SEQ ID NO: 28209 - DNA, 2781 bp, Salmonella enterica subsp. enterica serovar Virchow str. SVQ1; identical to SEQ ID NO: 28119

SEQ ID NO: 28210 - DNA, 5949 bp, Salmonella enterica subsp. enterica serovar Weltevreden
atgaataacccactggaaacatttgaatcaataagagatttttatatttcatatcttgaaacggccttccgtattgattcatcagacatacagtctggacggcgagcgttactggaacagcaagggacattatgcgcagatctatttcttgaaccgatgccccgatatcataactatggcttaactatcagtgaattacgaaatgatgctcatggtcagatatggttgccagggtttaatgcgcagcaaaggaatgcattcatcgatctctgtttaggtggacttctgccctgcaataaaacagatccgactaagggacgttttaatctttatacccatcaactggacatgctgaaaagaggggtacagccagggaagccgggcatcgtcacctccggaactggctccggtaaaacagaatcatttttgctgccggttctggcgcagatcgcaaaagaagccactggttggccgaaaagctcggcgttgaagcactggcaaccgtggtggcataaggtagcggataaacagcctagcttcatgcgcgagcatgaagccgctgcacgtcctaaagcggtacgcgcgctgatcctctacccgatgaatgccctggtagaagatcaactggtacgtatgcgacgggcactggattctagggaagctcatgatgtcatggatgcgcattttggtggcaaccgaatcttttttggccgttataccagcgcaactaaagtaactggctggctcaaacatccccgactcaatgaagaaaaaaatgagaaaaagcgcgtggctaaaaaaatcactgagctgcgtgagtatatgcaattaatggaagagacccatcaggaggcggtacgacaagcgcagcaggacaaggataacgaattatcgtttaatttccccagaaccgctggcggagaggttctcagtcgctgggaaatgcaaaagacaccgcccgatattctgatcaccaacaccagcatgctctcaacgatgctggttcgtgaggtggacgatcctatttttgaacaaacccgacagtggattgagcgtgaccctgatgcctatttttatcttatccttgacgaacttcatctacagcgaggaaccgccggtaccgaagtcagctacttacttaaacatttgatcaaccggctggggctggatcaggagaaacaccgacacaaattgcgtattctggcctccagcgcctctttacccgttgaagggtctgaaggtgatcaaagcgtcgagtatttgtgggggatgttcggtcagcggggattacccgcaggtgcctcttccagcgactggagagaatgtattattaaaggtgacacccttcccccgggcaatatgtctcttttcctgggggagctggaggcgttttatcacgcagtgcttcagttacagcaagcaccatttacctcattacaacactggcagaatgtcgcccgcagcatgggaatgacagccagtgaagcctctacagaacaactagcgcaacgtgtcgttttacaggcgggcaacctgcttgaaagtggctgctatacggacgatcattctccgagagctacgtcaatcaaaatgcttagttcacgcctttttaacgcccaaccccatagtgacaaagcgctccaggcattaatctggttacgttcgactgagggagactggccgcaatggttttcacatgcctttcctgatgatatcggtgcgccacgtttccgcgctcatgcttttttgcgcgctcttgaggggttatatgtcgcgccattgcccgtccctagcgctgcatctgcgcaagaaattaatcacagatattttggcgatcttaccgtggagtccggcttacgttacggcaaagataaaaaatcgcggcgtgtcgaattactctattgtgaatgttgcggtaatctctttttggggggtaaaccttcggtcttttccggttcagaaagtcgaattgaacttttacccaacgacccggatacggaacaactgcccgaacacgcaaaatcagtcatggtagaacgccgatctgctgaagaatacgcgctatttatgcccgtcgtcgaacgtttctggccgaaaggagatgaggagctaaacagcgataatgacaatacttttggtacttgggtaaaagccagctacgatccatttaccgccactattcaacacccagtatcgctcttaaaaccgctaccggaaaaccatatcgcgggctggttctattacgtcaaacccggtgaatttgcctcctcggaaagaggccagtcatccagccagtcaccgggaacggcgctaccttttcagtgtccggcatgtggtacatcctacaaatacggcaaaggtaagctctccccaatccgtagctttcgcgtcggtttttcgaaaactacacagctactggccagctcgctaatggcggaactacagcgatcgggtaaccgtgagcaactggtaacgttttcagacagtcgtcaggatgccgccagggcggcgctcgatctggaatcgggtcatcatgacgacgtcagacgagaaattgttgtccattcgctacagtccattgcggctgataaaccgtcccataaccaactaaaaatacgccaggcagagatagaggaacggaacaaaacactgattaacctcaacgtaaggtcagatgaggaagaggatgagatggatcgactcgctgatgaacggaagaaaatcagagggttattatcaaaacctgaaactgacagcatacctctgcgtggaatcctcgaacctgaatcaccggatgcaggccaaccgcttggcttgctgttaagggcgcaggtagatgcaggcattcacccttccgatcgtactggtattgccccggttcccgatcctgaaaaatatggagaaggcacgctgacctttgcatggcaacaactctttgaaaagaacgcgcagggggagtggtgctggaaggcgcttccatcctatgaagacaacctgcttgtggcaagacaggagatttcacgcgatctgaaacggctggtgggggaaagcgtattcagtaaaacctacttcgcgctggaagagtccggttggggttatccctgccttcccattaccggaaacgactcacgggaacatctcgcgatttatgacgcaatgtttcgtgtgttggcggacgcgtaccgggttactccttcacaatatacaaagccagaaaccccatggagttcagcgcacgatgtcaatcgtagaaatcgcctgtaccgctttacgcaggcgatatgccagcgttcaggaggcgagcctttatctttaattgatagttttctccgacgactggagctggcgggtcatcagggcggtattattgatattggtaaaatgcactttcgcctggcggaacctaccgatcgcgtctggcgctgctcccgttgtgggcgtatacacatgcacatcggcgcgggaatctgtacccgctgctactctcctttaccagaaacgccgggcagcgaggcaaaaacgctccagatgcaacactatctcggcaaacgtctctcacattcttctggtattcaccggatgcgctcagaggagctgactggaatgaccgaaaacccggcggcaaggctacgccggtttaaaggtattctgattgccgacgatgatgatattttgccggaaggaatgaaagattttgcgcccgatcgagatcttgaccgggcagctcgcgtggtagatgtgctttccgtaaccacaaccatggaagtgggtgtagatattggtgatttacgtgcggtctttcaggccaacatgccgccacagcgctttaattatcaacagcgtgtcggtcgtgccggacgacgtggacaagcgttttcattcgtattaactgcgtgtcgtagcaagagtcacgatctgttttacttccgccatccggaaaaaattaccggcgatctccctccgccaccgtttctgaccacaaagctggaaatgatctgccagagactggtacgaaaaatctggctggtgtcggcattcaaatggttaaggcagcaaacggaaaaagccgatcaccaatggccggttgacgactacgcgcacgcccctgataaccacggtgagttttttccggtgcactggctgaaagaaaaccaaacggactggctgccaaaaatccggcaggccatcgaagcaaccatcctggcgcgcgatgaatttgcccggacttgcacgcagcaagaccatcatttgttccagagagttattcagcctttgacaccggaacaactgattcaggatattaacgtcgtactgaacgacagtgcaatggaggcgaaaggactggcagaagcgctggcggaacacggtaaattcccaatgtatggcatgccgacccgatcacgccttttgctgacaaggcccgtcagcacaggcgaaaaagaaatcgaatttgccagcatggatcgcgatctggatattgcgatacaggaatttgcccccgggaaaattctggttcaggataaaagacgttattttactgctggttatagtggaatgcttaaacagagcagaaaaaatccacgatcattttattcaaatgcccccgaaccgggtgaactcagaacaatgaccgcctgtccggtgtgcaacatctgggctccggcaaactctctgaccaccgaatgtactatctgcggtgccgttatggataaggcggaacgctatcaatgctatgtcccttatggatttatcaccacgctggaaccaaaatcggccaaagaggattttgatcaaatcctgaccacggccagtcgtgtatcaattgcagaagcctacactttttctgcaatgccagagcctgacgttaatgtagcgatacagctccagccacagacatgcctgcaccgcctgaatcggggaatttacaccgataaaacatggcgtggtttcagcgcaacacaggggagcctatcggtccctttcagaaagcaggggacttaccagccgctttgggcgaaccgggtttggatggatagtcaaattattgagaccgacctgttagttaaaaaccgctttaccgatcgaggagaaacccgaaacacattttatcttgccgcgcctaaagtgactgatctacttgcgctgatggttgcccaaatcccgcctgggctccggctacagtattccgcgctaactccggcattcagagctgctgcgctctcggcgtcttttatcattgttaactatgcatcaaaagagctactggatattgatcctgaagaaatcgaaattctggaaccccgcgttcaaatgctgaaaaacggtaagtcggtaccggttctgcaaatggccgatcgtctggttaatggttcagggttatgtgaacggctacagcagaagggcgcatccggttctctcatcatccttgaggtcatgaagaatattttaaataataaaacggcctacccgctggttgagttcctgcaacccgatcatcgcgaacgatgctttcaggggtgttatcactgcctgcatcgatacggaaaccagccatatcacggattgctggactggcgtctgggactggatgttatccaacttcttctggatccaacctataacgccgggctgaacggtgattttacatctccgggcgtgtctgactggccggaaaatgccctacaattagccgaagaggccgcttcgctatacagcgacagtgctgcagaaatgatggggaatatacccgtgattcgcacaggggctgggcgctgggctgccgtactacatccattctgggatcccgatgctgcatttgctgcaaatcccgaacttgaggcattttcatatgaggtggatgtagacgcgacgaatacttttgctttgtcccgccgcatggggactgaaatggcgaaattacggactcaggcgtcctcatctcaggagtga

SEQ ID NO: 28211 - DNA, 1086 bp, Salmonella enterica subsp. enterica serovar Weltevreden
atgagcagtgttttcgagagagagaacgataatattcgggtactttcactattctccggttgtggtggtatggattttggaattacctcagctggtggagacatcgtctttgccaacgatgttgtagagaatgcctgcaaaacattagggaactatttccccgatactgatatcaggcatggtgatatctctcaaattcagtcttttccagatgttgatattgttgttggtggctatccctgccagtcattttcaatggcaggtaacagaaaaccaaacaatgacgacagaacaaatctttataaacactttctgcgggtattagagactattcatcctaagtattttgttgctgaaaatgtttctggcttgaaacatttaggggcaggtagttttctggaacaacagctcacggcatataaagctgccgggtaccaggtcagctatcatatggtaaatgcaagggcttacggcgtgcctcagtcgcgcaagcgtttgtttattattggcgtcagaaacgatctggggcaatcctttgaatttcctgctgaaacacatggcaaagcgacaaaaaagaaccctcatttaaaaccctatgtttcacatggtgaagctattagggatttaccactatggcctgaaggtgagttttacgaacgaccacatgatcctgaagggcatttctcatggtatttcatgtcccgaaatcgtaaagctctatgggacagccctgcttacaccgtcgtagctaactggcgccatgtgacattacatcctgccagcccggtgatgaagttaacatggtcaaacctggaagatggctggaagcagcgctgggacttttctgatgaatatgagcatctaattgttgatacttctcgccccaaactggaacaggcaaggcggttatcatggcgggaatgtgcacgaatacaaacttttccacagggttttgagcctgtaggagatgtcgagtcaaaatttacccaaattggtaatgctgttcctccactactggctgaggtactttttcggcatttattttctggtgctggtttgaaaaagatgacagcgaacggtaattag

SEQ ID NO: 28212 - DNA, 2766 bp, Salmonella enterica subsp. enterica serovar Weltevreden
atggatgattctttcccggttactttagaagaatggaatgctgaactagtaaagatcgtcttttttgagtcttcgcatacgggttcgactttaagccggattgatgccacggggcgcgtttttgagcagcttgcaggtccacgtagcaaagaggatgctaagcgaagttttctggcttcgtttggaaaaaaagcgtctaaaatccaggatgctctcagggatgagtcgcggttagacattttagcgcaaataaaaggataccctacttattttgccattttatatttaacattacttgctgccagtgctgatgatgagacgcatgacgaagggaattttcgggttcgattttctgtactgcttggttttgataaaaagaaagagtttgtttttactgaattacccgatttatggaaaagattagaacggtggagtagtagaaaacaaaactgcacccgtttagtccttccagaaccatcaaaacatgaaagattgattgggtattctaagagaattgcttttccctcctataaggatgaggtttttttacgggatatactcgtcaataatgaattagatagccattcaacttttgagtcagttaataagttagtgcatcaatatatatcttattttagtgaggtttttaaccaggaatttattgaattcagaacattactttcaaaggctgccatacggcaggcttatgactctcctttttggggcgcggttcgtgatatcactatacatactgagagagaacaactcaaagagaatggtaagtattgtattcacatggagtttaatgattcaggtaatccagagatttatcttcttatggatgacgctgctgttactgcctcagaaattaagcgttattactccttgtctaatgaaatagatagctataataatatatattatgaacgagacataggtaccacattaaattctctggattttttattaaaaaaacggaagggttatttctataaatcacgagcgggggctgcactgcggtctgggtgtttgccgctttttcgtgatgatttttgtcatattagttcagaaggggattattatgataattctccactctatttgattcttcaccataaatatgcagacggtattttcatagccttgaataatgctggtgaaagaatacaacgtcgggatattaaatctaccaaatggtcgatagtttcttccgataaagttggcaggcaaatgctggataagatagcccgtttgttaccagaagaagcccgtcgttttctaatacagggatggcagcctgcccgacctcgtatgtcaggcgcagcgcggtttggacaggctatactgcttaatcctgctagtacaccgattattcatatgcctgaagtactaggaggatgctatgtcattagcaataaagacggagaagaattaactcatggatcgctatctcaggggactgaaggattattcattccaccagaggagttgatgaaaatatctggtcaggcattttgtcgctatgaacttacgttagcgcattcagatatcccagtaaattttgatgtacacgtgttagatcatgcgccttacgccacttattgtaaaattacagagccacatgattggcttactgatggaccatcaggagtattaatggcgttaggggatacggcagagatcccctcactgaaacgcgaagaaataacgccattgggtagtgctcaaatgttatggcagtatgaaaatggccttcctgtaacatgtcaatataccgaattacataatatacccgcagcatttgactggatcgctgaggcgctggccttgcgttttcaacgccgtagcacattgccttttggtgaattaaaacaacatattgaacccgtatcacaggtaacgaggatacccgaatggcaattgcgtcgcgtgctctttgctgctggctggctttgtgtagtacaacgacgtcatgcgccatattcgttagtctcattggctgaaagaaccatttccgttgatgttactgaacagagaattattgcccgaattatgggaatgtttacaagaagtgaacgtaatcttctacaagaaacacttaatgacgatgagcgaatagggcgtcggttagttgaggataacggctgttcaatagggtgtattgaattacatctgtcagccagagatcgtgttcatgctttcattgagcagtttgggctacgtttggttaatcacgacgatttacccgtcaatgctttgagtggattattgctaccgttgtctcaaatgcagtttatcccgactttacctccggatcttcatgtgtcgctttggcaagctgaaaaatatcaatggtcagaagaacagcggctaactcaaacggttaataacctattgatacgatgtcaggaaaaacagcgttatcgttattttattcggcagaacgccgggtactggcaaaccgatagcttctcctgggccttaatggctcagatgatatgttcaggagtcatgttcggtgtgcaaaaaggcgatagtgactggtgctggtcaacgaaaatcattgcattaccaccctccattttacagtggtggatccacgttgctcacggatgtttgtcgataacagataatggtagctacctatttgcaggcggcaaagtaccactctggaataatgtaatgaccttcccctcctgccaacgagcgttggcacgacggaacagagcgctgacaatacgcaagctgcgcagaaccttacaataa

SEQ ID NO: 28213 - DNA, 2040 bp, Salmonella enterica subsp. enterica serovar Weltevreden
atgttcattggaaaagtgttagcgttaaccgcgtccggcgctttttttgttacgccggttagtctgttaattgatggcaacttacgagacctcccagaggcattgggaaaagatctttaccctcatggcggtgaagccattggttttgagaaccatttcagcaaaaaatttgttcggggtgaaatggcaatatggaaagcccgatatcagccgtctgataaatctgcgcagtatgtcattactgactacctgtcgcgcgtttatcctgtagtcgcgttaccccatgcctccgatgagcctgatgctgtcagggagtggttactcaccaactaccagccgcaaaacgatacgccggtcatttttcagctaagtgatggcgtatccctgagattaccgggtgacttgccggatcctagaaaatatgattttgatatgccgctggagagttatcgtcaggttcctcagacactacttgactctcatgccctcacggtgatcactgaactccctaaggtaagtgaaaaatatgattgcgcggaagccagcacgtggattaaacgcctgcttaaacgaactgattcagcaaaatatttccctcaattcagtaaagggcagctacaaaatttaactcattttattgctgaacatgagtctgataacgaggcatcttatcttcgcgcagtatctcatctggaacagatagcagatatgagatcctttcttaatgatacgactcaacagttactggctttacctgaggttgagacgcaaattaatattgagaaacaggaaatattggctcgttacgaagacgaacagcaccagattaaacaatcgataacggtattatctgaaaagaaaatacagcttgaaaatgaaatagccgatcagaagaaaaaattgaagaaagaaactgatcgcattaataaaactctacgtcagcaagaaaatgaactggaacaacggataaaaaagaccttcgaagccgcatctcaagcgggaatggaaacgctggcccaggcagcgttactgcgggcaataatcaaaaatgaaacagcacaggagcaacctgcccaacaacgaataacctcagaacctgtagccgaatcagcaaattctaatttcccattagcagagacaaatgctctgactcgcaagcatcaactgatatcggctatcgaaaaagaggcactggcgacgggactaagtgaatctttattatccagtctgattgccactgcgagtattacacctgcggtcggattgatgggaaaacagacaaaacaggctatcgcctcattagcgaatcttttagctggtaatgtttggggggaagtgtcggtacatagcgatcattttagcttcagtgatttaatgaactcccccacactgatccgcttatctggcgacactcttaccatgacgttgggtgattttttgacccaacaacaagaggctgggctggcgagcatcgttgaattgcgtggttttaaccgcactccgccagaaactctgctccctgagctccacgagtgtttattcagaactccccatcctgccgcatgcagttggacggatcggcgggaggctctacgacatttacccattcggcacccgatactttttgtactcacattcaccaccgggaaaagcacgtttccattacaggctcctcttgcttaccagttacccctgtttctggcagagaatatatggtcggatgaacggccatttgagcaaaatactgacatcacgccttctcgtattactccagaactatggcagacaatctttgtggacaaccaccggccagagtaccaggcttgtgcgccatgggaagtgctaaaagcagcgctactctctttacttcctgatgaacaagcgcaagccgttgcccgtctggcttacggtctcggccgtagtacaacacaagatattgcgaccacgattgacgttcttgccccagaattagggccatatgctcaggaaatgactatcggcgaatcggcaagcgtacttgagcaccttttccagttataa

SEQ ID NO: 28214 - DNA, 5949 bp, Salmonella enterica subsp. enterica serovar Weltevreden; identical to SEQ ID NO: 28210

SEQ ID NO: 28215 - DNA, 1086 bp, Salmonella enterica subsp. enterica serovar Weltevreden; identical to SEQ ID NO: 28211

SEQ ID NO: 28216 - DNA, 2766 bp, Salmonella enterica subsp. enterica serovar Weltevreden; identical to SEQ ID NO: 28212

SEQ ID NO: 28217 - DNA, 2781 bp, Salmonella enterica subsp. enterica serovar Weltevreden
atggctaaaaagaaaagtattatcagcgaccggctgggccaaatgtactacttcggtacagaatctcatgaattgagcagatgcttgctagagtgcaaacaaaggctcaccagaaatggcgctaaagcggataatttaccgagagggccagaaaaaaggctacattttctccgtacgttaccacctaaagccaaacctattgtgtctgattggcttcgtgaaaatttgacgttttctgaacaaaatgacccacaaaccgttcttagggatctgttagaagcagaaagtaatgcggaagatattgatctctgtaaaccgctatggcgcacaattctgggattctatatttctcctgactgccctgaaattataacgaaattcctgaatggcgaacaaattgatttatcccaacatggtgtttctgactccctgacaattaatgtcactgatgaagacattgaacaatgtgccttgattagtcagggtaaaaaaattcctatgccagagcgtactattccactatttgttgggggattagttgatgcactccaaggaacgcgcacagccgataatcaatggagaacaaagctatcagaacattctttaccgctggcgcgaaaattgggtgaacttatcgaacaatttgaagccagtaacgaccttcaaacaatggatggtaccagtgtaatacaagctcctcccgttgtgtccaaagaaatcgacggtgcgatggacgaagttatgttcattggaaaagtgttagcgttaaccgcgtccggcgctttttttgttacgccggttagtctgttaattgatggcaacttacgagacctcccagaggcattgggaaaagatctttaccctcatggcggtgaagccattggttttgagaaccatttcagcaaaaaatttgttcggggtgaaatggcaatatggaaagcccgatatcagccgtctgataaatctgcgcagtatgtcattactgactacctgtcgcgcgtttatcctgtagtcgcgttaccccatgcctccgatgagcctgatgctgtcagggagtggttactcaccaactaccagccgcaaaacgatacgccggtcatttttcagctaagtgatggcgtatccctgagattaccgggtgacttgccggatcctagaaaatatgattttgatatgccgctggagagttatcgtcaggttcctcagacactacttgactctcatgccctcacggtgatcactgaactccctaaggtaagtgaaaaatatgattgcgcggaagccagcacgtggattaaacgcctgcttaaacgaactgattcagcaaaatatttccctcaattcagtaaagggcagctacaaaatttaactcattttattgctgaacatgagtctgataacgaggcatcttatcttcgcgcagtatctcatctggaacagatagcagatatgagatcctttcttaatgatacgactcaacagttactggctttacctgaggttgagacgcaaattaatattgagaaacaggaaatattggctcgttacgaagacgaacagcaccagattaaacaatcgataacggtattatctgaaaagaaaatacagcttgaaaatgaaatagccgatcagaagaaaaaattgaagaaagaaactgatcgcattaataaaactctacgtcagcaagaaaatgaactggaacaacggataaaaaagaccttcgaagccgcatctcaagcgggaatggaaacgctggcccaggcagcgttactgcgggcaataatcaaaaatgaaacagcacaggagcaacctgcccaacaacgaataacctcagaacctgtagccgaatcagcaaattctaatttcccattagcagagacaaatgctctgactcgcaagcatcaactgatatcggctatcgaaaaagaggcactggcgacgggactaagtgaatctttattatccagtctgattgccactgcgagtattacacctgcggtcggattgatgggaaaacagacaaaacaggctatcgcctcattagcgaatcttttagctggtaatgtttggggggaagtgtcggtacatagcgatcattttagcttcagtgatttaatgaactcccccacactgatccgcttatctggcgacactcttaccatgacgttgggtgattttttgacccaacaacaagaggctgggctggcgagcatcgttgaattgcgtggttttaaccgcactccgccagaaactctgctccctgagctccacgagtgtttattcagaactccccatcctgccgcatgcagttggacggatcggcgggaggctctacgacatttacccattcggcacccgatactttttgtactcacattcaccaccgggaaaagcacgtttccattacaggctcctcttgcttaccagttacccctgtttctggcagagaatatatggtcggatgaacggccatttgagcaaaatactgacatcacgccttctcgtattactccagaactatggcagacaatctttgtggacaaccaccggccagagtaccaggcttgtgcgccatgggaagtgctaaaagcagcgctactctctttacttcctgatgaacaagcgcaagccgttgcccgtctggcttacggtctcggccgtagtacaacacaagatattgcgaccacgattgacgttcttgccccagaattagggccatatgctcaggaaatgactatcggcgaatcggcaagcgtacttgagcaccttttccagttataa

SEQ ID NO: 28218 - DNA, 5949 bp, Salmonella enterica subsp. enterica serovar Weltevreden; identical to SEQ ID NO: 28210

SEQ ID NO: 28219 - DNA, 1086 bp, Salmonella enterica subsp. enterica serovar Weltevreden; identical to SEQ ID NO: 28211

SEQ ID NO: 28220 - DNA, 2766 bp, Salmonella enterica subsp. enterica serovar Weltevreden; identical to SEQ ID NO: 28212

SEQ ID NO: 28221 - DNA, 2781 bp, Salmonella enterica subsp. enterica serovar Weltevreden; identical to SEQ ID NO: 28217

SEQ ID NO: 28222 - DNA, 5949 bp, Salmonella enterica subsp. enterica serovar Weltevreden; identical to SEQ ID NO: 28210

SEQ ID NO: 28223 - DNA, 1086 bp, Salmonella enterica subsp. enterica serovar Weltevreden; identical to SEQ ID NO: 28211

SEQ ID NO: 28224 - DNA, 2766 bp, Salmonella enterica subsp. enterica serovar Weltevreden; identical to SEQ ID NO: 28212

SEQ ID NO: 28225 - DNA, 2040 bp, Salmonella enterica subsp. enterica serovar Weltevreden; identical to SEQ ID NO: 28213

SEQ ID NO: 28226 - DNA, 5949 bp, Salmonella enterica; identical to SEQ ID NO: 28210
  subsp. enterica serovar Weltevreden str. 2007-60-3289-1

SEQ ID NO: 28227 - DNA, 1086 bp, Salmonella enterica; identical to SEQ ID NO: 28211
  subsp. enterica serovar Weltevreden str. 2007-60-3289-1

SEQ ID NO: 28228 - DNA, 2766 bp, Salmonella enterica; identical to SEQ ID NO: 28212
  subsp. enterica serovar Weltevreden str. 2007-60-3289-1

SEQ ID NO: 28229 - DNA, 2781 bp, Salmonella enterica; identical to SEQ ID NO: 28217
  subsp. enterica serovar Weltevreden str. 2007-60-3289-1

SEQ ID NO: 28230 - DNA, 5949 bp, Salmonella enterica; identical to SEQ ID NO: 28210
  subsp. enterica serovar Weltevreden str. HI_N05-537

SEQ ID NO: 28231 - DNA, 1086 bp, Salmonella enterica; identical to SEQ ID NO: 28211
  subsp. enterica serovar Weltevreden str. HI_N05-537

SEQ ID NO: 28232 - DNA, 2766 bp, Salmonella enterica; identical to SEQ ID NO: 28212
  subsp. enterica serovar Weltevreden str. HI_N05-537

SEQ ID NO: 28233 - DNA, 1857 bp, Salmonella enterica
  subsp. enterica serovar Weltevreden str. HI_N05-537
atggcaatatggaaagcccgatatcagccgtctgataaatctgcgcagtatgtcattactgactacctgtcgcgcgtttatcctgtagtcgcgttaccccatgcctccgatgagcctgatgctgtcagggagtggttactcaccaactaccagccgcaaaacgatacgccggtcatttttcagctaagtgatggcgtatccctgagattaccgggtgacttgccggatcctagaaaatatgattttgatatgccgctggagagttatcgtcaggttcctcagacactacttgactctcatgccctcacggtgatcactgaactccctaaggtaagtgaaaaatatgattgcgcggaagccagcacgtggattaaacgcctgcttaaacgaactgattcagcaaaatatttccctcaattcagtaaagggcagctacaaaatttaactcattttattgctgaacatgagtctgataacgaggcatcttatcttcgcgcagtatctcatctggaacagatagcagatatgagatcctttcttaatgatacgactcaacagttactggctttacctgaggttgagacgcaaattaatattgagaaacaggaaatattggctcgttacgaagacgaacagcaccagattaaacaatcgataacggtattatctgaaaagaaaatacagcttgaaaatgaaatagccgatcagaagaaaaaattgaagaaagaaactgatcgcattaataaaactctacgtcagcaagaaaatgaactggaacaacggataaaaaagaccttcgaagccgcatctcaagcgggaatggaaacgctggcccaggcagcgttactgcgggcaataatcaaaaatgaaacagcacaggagcaacctgcccaacaacgaataacctcagaacctgtagccgaatcagcaaattctaatttcccattagcagagacaaatgctctgactcgcaagcatcaactgatatcggctatcgaaaaagaggcactggcgacgggactaagtgaatctttattatccagtctgattgccactgcgagtattacacctgcggtcggattgatgggaaaacagacaaaacaggctatcgcctcattagcgaatcttttagctggtaatgtttggggggaagtgtcggtacatagcgatcattttagcttcagtgatttaatgaactcccccacactgatccgcttatctggcgacactcttaccatgacgttgggtgattttttgacccaacaacaagaggctgggctggcgagcatcgttgaattgcgtggttttaaccgcactccgccagaaactctgctccctgagctccacgagtgtttattcagaactccccatcctgccgcatgcagttggacggatcggcgggaggctctacgacatttacccattcggcacccgatactttttgtactcacattcaccaccgggaaaagcacgtttccattacaggctcctcttgcttaccagttacccctgtttctggcagagaatatatggtcggatgaacggccatttgagcaaaatactgacatcacgccttctcgtattactccagaactatggcagacaatctttgtggacaaccaccggccagagtaccaggcttgtgcgccatgggaagtgctaaaagcagcgctactctctttacttcctgatgaacaagcgcaagccgttgcccgtctggcttacggtctcggccgtagtacaacacaagatattgcgaccacgattgacgttcttgccccagaattagggccatatgctcaggaaatgactatcggcgaatcggcaagcgtacttgagcaccttttccagttataa

SEQ ID NO: 28234 - DNA, 5841 bp, Salmonella enterica subsp. houtenae
atgttagatcccattggcggttttcgccgcatccaagacttcttcatttcatacatagaaaccaacttccggattgccgatccttctgtcgcgatttcaagacgcaatcttctgaacagtagcggggaattcgctgcggaaccctttattgaacccgttttacggtatgaatcgtcgggtaaaatgcttgaagatcttgtcgatatcgacggcgggccactgaaaaacctgtctcctgaaggccgaaaggcgttcgtcgaactagcattatccggtctattcgattcgcaacccggcgatggaacctggaagcgtcgttcagtccatgcgccgtatagccaccagactcaaatgctggagcgcggtctgcgtcccggctgtcccggcatagtaacatcggggacaggttcgggaaaaacggaaagttttatgctgcctattctggctgcattatcaaatgaagctgtcaactggtccaagcctgacagcggttatctacaaaatcgatggtggaatggcgcagaaaataactgggtttctcgtcgcgaaggagaaaaacgtccagcggcggtcagggcgctggtgctttatccgatgaacgctctggttgaagatcaaatggcgcgtttgcgtaaaacgctagattccgacgattcgcgagaggttatggagcagcgtttcgccggaaacaagatcttcttcggtcaatataccagcgccacgccggttaccggctacgccagccatcctcgtctttccagcgccagttcagaaaaaagccgtcgtgcccgtaaccttggaaaattgcgcaaggcgttgaaccgaattgatagcgatcagcaagccgcgcgcgcattcgacgaaaaagaaaattcttcggaaaaaacccggtatatattcccttctacggacggcggggagatggtttcgcgctgggatatgcagtgcgccccgcctgacgttctcgtcaccaacgcctcaatgttgggagcaatgctttcgcgcgaagtcgaagacaatatttttggcgctacgcacgattggctgatgaataatgacgatgcgtacttctatctggtattcgatgaattgcatttaatgcgtggttccgccggcacggaaaccgccatgttgattaagtcattgattatccggctcgggctggacgacccgaaacaccgctacaaattgcgtttactggcgtcttcggcatcgctgccgatggatggcgcggatggagagcaatcacgaaaatacctacgcgatctctttgcgcccttcggcacttgctgcgctgccctggatcccggcagcgatcagccggatttctggcataactgcgtcattcagggaaaacctttcatacctttgaagccgtcagggaaaatccccgtgcggccttttgccgcattaatgcgggttgcccttgaggatcagggaaatgtcgttcgcaatctgaacatgacgggcgcgctgagtcaggctttgtctaatgttttcctagctctgggcgtgaaagcgcaaaatgatatgcaaggcattaaacaagcggcggaaacagcggccgcactattgaccaatgcttgtattgaggaaggcggcgagtcgccgcgagcgatgccgcctggacttatcattgataagatttttctgaaggaaggcacggataacccggatgaattggaactggcgttacgcgggttgatgctggtgcgcgcgctgcctgagtccgggattgattgtgagaagccagccaatgttacgccagcctttcgcgtgcatactttcgtcagaaatattgaaggtttcttcgcctccgtatcgccgggagagaaaaaagcaaaattcgccgatttttgcctggatcgaggcttgtcgcacgcgccatcaactccagatggaaaacgcggtcgccgtctgttcgaaatgttatactgcgaagcgtgcggcgaattactgctcggtggccaaaaggggcagaatggcagcaataccatcgaattattaccttcggctactaatctggaaaatcttcctgaacgccctggtgccgaatattacgatgatatgactttggatgagtttgcggttttctggccgatcgatatagccgaacgccccccggcagtctgcgaaaaaggttgggatgtttgggaaaaagcggcgcttaatcctgttacaggcattgtgaccactaagcaggaaacatcgacgacgaatagtagtgctgttcgtggatatctctatttccaaaatccggtcaaacctaaaaaaggcgagcctgcgaagaaaccttctgcgcaacctttttgctgtcctaactgcggtatcgactattccaaccgaccagccagcaatcgttccagaacgcccattcgcgcatttcgtactggtgtaactaaatcatcccaactggtggcaacagagttatttgaattgctgcacgcgatcggcgcggaagcaaagagtattgttttctcggatagccgacaggatgcggcgtcgatggcgctagaaatcgaacgcttgcacttgcgcgatctgcgcagggaaatattggtcgcagccgccagagagatgatcaaagaggctgaaagtgaatacatttcagaagatagtattaatgaaaaaatggatttagccctacaagttaaagacatgaaggagtatgttagattacacgaactcaaacaaaatcaatcaattgtttccgatctttgtaagtatagacggataaaaattgatagattactggaatctgaaggtgattcaattggaagaatcacatcagagttagccggactgggtatatctccctataagtatcgttctaatacagatgaagataatagcgctgggtggcatgctaattttactaaagaaggcgatgtcattaaatacagtgaaaaacttccttctccagagaaaatgaagctaaaaacaaagatattcgaagatcaattcgaattgattgatgatgttatcttcgccaatacttttttcgctctggaagaaactgggttggcatatccgtgcgtctctgataaagatgatatgccgcaacttgatgcgtggttaagggtgtttgccggcgtctatcgcgttaaagaaaataaatatttcgacgctagccgctctcgtgattggcttgtcggcgagaatgtcgacaaagaaaaagttaatcgcatcgccagagttttattcggcgataacagctaccaggagggtctgacgcgtatcttaaaacagttcgctgatctgaaacatactgcgggattatttagtattggcaaattgtttcttaaagtcactaagcctggcgatcattattggcaatgcggcaattgtggacgaatacacttacatttagggtttaagcattgtactcgttgtataaatccactcaatgttgaacccagcggtgttgttgaaaaactatgggaagacaactttcttggcaaacgtattgtgcgcggcgaacgagacggcgttaaacgctttcggttgaacgttgaggaattgacgggacaaacggatgatttctccgatagattacgaaaattcaagggaattttcgtcgataagatgagcgaacttgaaaaactagatgcggaaatcgatatgcttgccgtcactacgacaatggaagtcgggattgatattggttcgcttcagtcagtatatcaggccaacatgccgccccagcgatttaattatcaacagcgcgtcggtcgcgctggacgacgcggtcaggcattttcttttgtgatcacattctgccgcggacgtactcacgatgcttattattttgcccacccgcatgcgattactggagatccgccgccgccgccttttctggccgtcgatcacgacgctattcctaaaaggcttttgcggaaaatatggctcaagagcgcgtttaacgatttgcgcgaagaatgccacaaaaataaaacgacatttccgggcgataaactcgttccgcctgacgttcatggtgaatatatttcaacgcatgattactatcatgatgataaaacggactgggccaaacgattgtattgcgcgttggaagcaaatcagaacatacgagaacgctttattgaagcagcaacatttgaccccgatcagcgccggagcctttattccgaaattaacgccgaaaaaataattgaagaaatcgaaaaactaagatcttccgcgcctgacgacaatacggggcttgcccgctttctggccgaacgaggtctgttgccgatgtatggaatgccgaccagggtacgtaacctttatctgggattgcgcaaaacaaaagggccaaatggccagacggaatacgaatggtcaacgatggatcgcgatcttgatcttgcggtttttgagtatgctcctggttcggtattaattaaggacaaaaaaaagcatcaggtgatcggtttcaccggcaattaccgagaacctcaggtccgcgacaatcgagtttcagatctctcaacggtatgttcatgggaagagtcgagtcattacgttgcaatttgtcaatcatgcggatctgcaaaacttgaacaaaatcaacctgctaaaaatattaattgcgaggattgcgatacacctattagtccagatgaattcgagctttatgtcacgcctgccgctttccgtacggattttgagccaaaagatgacatggatagcttcactcgtatgtcgttaaaaactacggcaaccgtattgcataaaggtgttccggaagattgcggtccttttaaagtacggcgcggcggagtcactattttgcgtcttaacgatgggccgattaacggagagaaggaaggcgaacgatttactgctgatttagcgacggaccaaagggcgccgattccttcaactgcctactactcgccaattaaaggaaaccaagcgattgattcaaactgggctggattacgcaataactttagatggcggtgtactggagagaagcaaaacttcgggctggtatcaagtaaagagactgagtcgctgcacctggaattaatgcacttcgatgctcgtcttaatctgaatatgatcgccagatacggcgaatacatgaatttgcctacgcgcgcggcggctatcagcgcgactcaaatattaacgcataaagctgcgctctacctggatgtatcgccagacgaattcgaaacgcttgaaccccgactccatcatgagaaacctatattgcaaatcgccgacgcgttgatcaacggttcagggttatgcagacgattggccgaacctgaagttgccgatggttctcctttgatagtcacattactgaatgaaattctgggaaataagagcaactggccgatggtcgatttcttgaataaggagcatcccgcccaatgccaaaccgcttgttataagtgcatacaacgttatggcaaccgccggtaccacggcttactggactggcgtttaggcatggcttacttacgcgcgatggtcacacctgactttgcctgcggcttgaacgataatgattggattcatcctgaaatgattggatggcgagacagggcattcgaactggcggaagaggtcgaggcgttacggccaggaaccatcaaattgtcgaaagaatattcattaccgatccttaccgagattcaggatggaaaagaactctggcgcgcagtcgttacacatcccctgtggcaatggagagaacctgagcgaaaaactctgcttaactccctggggctggatgacgagagatcttcactgcggtttattgatacattcgagctggaaagacggccattgcgcgcacttgctaaccttaaacggagttaa

SEQ ID NO: 28235 - DNA, 1236 bp, Salmonella enterica subsp. houtenae
atgagcaaaaaagccgtcacgggcaacaacaaatcaaataaaacgcgcaagacgagtttctgtttctatgagtttttcgcaggcggcggtatggcacgagcaggcctgggaaagcagtggcgatgcctcttcgccaatgacatggatccgataaaagcatcgacctacatcgataactggggcgatgaacatttcgacatacgcgatgtacgagaaatcccctctaatgacctgccgcgccatgctgatttaacctgggcctcattcccctgtcaggatttatcactggctggtaatggtctggggatcggtgacagagattccagagccgacgagattacgcgttctggcgctgtgtggccgtttctcgatttaataagcaaactcagtgaagaaaatcgaaagccgccacttcttgttctggaaaatgtgcttggattgctaacgctggatcaaggccggcatttcgccgcgatatgccatcagctaagtaaaacgagttaccgttatggcgcaataattgttgatgcaaaacactttcttccgcaatccagaccccgcgtttttattgtggcagttagtcgtcatatatctattcccgcaaatctggtttctgaaaaaccgcttcctgaatggcattcgtcatcccttcttcgcgcctgtgatgcgctagcagaagaagttcatgacgactgggtctggtggtcacccggtattatgcccgaagccaaaatgaaggaactggctgacataatagattgtgaagacacaaatgtgctatggcactctgctgatgaaacccagcggcttatccgtatgatggcgcctgcgaatcgggcgcgtttggcgaaggcgcagggatcaggcgagacgatgataggcagcctttatttacgcatgcgtaaagaaaaaggcgtcaatcagcaacgggcggaaattaccttctcgacggttcttggttgcctgagaaccccgaaaggcggagcttcacgtcctcgcattattgttgtcaacggcaaccaggtgaaaacgcgtttgttgtcggtcaaagaagcggcggcgttaatggggttgccggatgattttatcctccctacagcgtatcagtcggcatttaaagtgattggcgacggccttgccgttccttccgttcgttttctggccgaacgtattctggagccactggtgatggccacccgaaacaatatccaccggacggaggatatacgcgaatga

SEQ ID NO: 28236 - DNA, 2559 bp, Salmonella enterica subsp. houtenae
atgaactggacgccgcctgttacgccagatggttgggaaagtaagctagtcgattattttcttcgattcggtgccgacggcgacgcgcaggatattcgctggtttgaagttacgccggcgacgctcgcagcggcattcgtcgacagcggcgttagcgcggatgaagtcgaagaagcatttcgaacctgtatgtcgaaaataccggatctgccgcagcgacttgaaagcggcatgatggaaaagtcgactcgtcgaacgccaggatattttacttatctggtcatgacgttgcttattagcagtcaattcgacgtccaggaagaacgtaatgattttcgcctgaaactacagaactggttgcagactacgcatagttttcagaacttatccggcgtcaacaagatgtgggaggcattagctgaatggcttaagcagcgtattcaggaaggcgaaccctacaggcgtcttatcttaccgccacgggatagctgggtccagatcggtcacactctgcggctggcattcccgaataaagccgatctacgcctgatgagcgaatgtcttgagaactatccgcaagccgccgctaacccacgccagttaatcgaatactttaaaatcgttattcagagacaaagcgtttctcttgcactgaaagaggctttcgccgaattcagagacgcgtggttgttggggcgtcgcgcgttgttcgatatgcctttctggcgcttgcgccaacgagcagtccagatatcgtcctttgtaacgactcatcagactatcattgatatgtacgtcgacttcgacggttcgcggcgctatttcagcgtcgcaggcgagaacaacgaaagcgcttttcatcctacgttatccgaagcccttatcgcccgcgacgccgggaatagcgaaaatctggggaaagcgacgcagatcggcttactatttttttatgagatcggacacggacgctggagagcgatatcgtcccccgacgtagactcgcaaggttttcatatcgctttatacaataaacactctgtacaaacgagcaagcgcctcaacggatatattgcagaagacgagtggattttaacggcgcagccgctgagcagggtttcagcgacggatatattccgctcagtaagatcctcttcgggtattcaggatgatgacgttacacgccctcagctatatggtggaatacgcgtccctggcggatggctgggattaccggcatttttgccttttgttgagtcagatacgcaacgctacaggatatattcatccgggaatgatgaagcagaaaccaatgtttccataatagatggtcgtttgatttcttctgtaccgcttaacggtgaactattcatcgagccagctcttgaggcgggtgaaaaaacgccgccgtggcggcgtcgcgcgcgttttttcacccgagcagtaccgcacccgactttaggcgaaagcgcaagataccggtttgagccgctttgcgactggtcgatgccttcactaaaagcgccgacgtttaatttcgaagaacagtttcagtgggaagatagcgaagcatgttgcgatcatcttctggaggcggtttacgccagtggagccagcggctgggaagaagccgagttattcgcgcttctcagacatgtggacggcatcatcaacgtatggcatttgattcgttgtttacaacatgcgggtctgatcgagccgcgtctgcgcgctgggtggaaaggtcgggcatggacactggttaaaccttcattgcttcatcttcgcaacggagaaaattctctggttgttgtggaaggcgcggtctgcgccagtctgatggatgattttcaaaaagcggtcgccggactgggcggagaaagtttccgccgtcgcggcgtaagcctctggtcgcccccggtatttggggccgtactcgctaatcctgttgcattatcccagcgtctgggatggccgcttatcgaaaccccatcgtcatccgctacaacaccgctttcactggtcacaacggaacgcgccgctgaactacacgagccagctgcgatttggaactggcgttcaggaaaattccagccgcatggccccacggataaagttgcggcattactgtcgcttcacattcatcctggcgggcgggatcatgatatctatcgggtcgtttccgggcgggaaacgaagcattttctctcccgcaccgcagctattatcactgctggcgcgaaaaaccggcaacccgtgttcaaacgcgtcgcccaaaatcatctgctatgtcttatcaatgattgcggcctacccgacgcgctggctgcgggaatacggcgtcacgcgctcagaaacggaggtccgatggactctggctacgcctatcctgtcgatgacgtctctttcctctggctagggtcgctgcttccgggatgtttctattccctctcgccaaacggcgaggatgatataagccgcatagtttccgccagtcgccattccggcggaaaaatacgtccaatatggcgaaacggtcggctagcgctgacgccgggataa

SEQ ID NO: 28237 - DNA, 2088 bp, Salmonella enterica subsp. houtenae
atgagcaaaatcccctggtaccttggtcaatttgatcgcagaaattatcagtcttaccttaaagccatcgcacaggaaacgcctgatggctggcgtacgatcgagaaccctaagaaactgttccctcgcacgggagaagttgaatttaacgaggctgatgctttacagcttcgtaagggcgaatgggccgcttttcatgttggactcggcacacgcaacagagtgcaggcgaaacatgcccgccgtatttatccttattatgatttatcttccggccagtcgctgctggaagcacgtcgacaattgagtttcgatggtataacgacagatggcgaaccaggattatgggctatccgttttgggccggacggtctgattctggcgaatctggctgagtcgaaatcaggttgcctgaacctgtccataagccagaacgtttatgaatatgatttccgcgaaggcgacgtaatttccgtatccggtatatctgtaaacggaaaattgttttatatgcccaatgtcaatgtgtcaccagcccggatccatgactggacgccggataagcagtacatcgaatacatcattcaacttatttcctgcgctgattcgacggccgcgattgcttcatggcttcaggtgcatacaaacgagcaaaacgggaaattaacttccggcgtcgatgcgcttctggctgccgctcaaatgctccggtcaggagagctggctaagaaactggaggaagaggattcgctgactcgccagtttaccgaagctgtgttgaaggaccagcatatcgcccgtcttctcgaccatcagatacaaaacattgcggaagaagagcgagtcgcgttgcgcatcgaacagcataaggggctcgataaagagttttctgctgaacgcctgcgacgtcgtgaagctattgaaagggaaatggccgcttttgataagacaaggaaaagcgagatcgaagaggagatcgcacaattatggcaactcgaagaagaaaaattacagactgattttgcagaaaagaaagcgaatatagaacaaacgcttaaacaggaaaaagcgtatcttgaaagcgaaattagccgtctgaaagacgccaacgttgatttatgcactcagaacgaaaaccagcgtcagatactggcttctctggcctgcgagcatgaggtatttttggcatccttaacggatgccgaagaacgtaccgctcaggcgcaaactgaactcgaaaaaatggacatcgctattgctgaaaaggcgcgtcgcatggcttactcagcgatccccgaagtgcgcctcccggcgcaagcaagagtcatttcctgcgaagaattcggtcataccgtcagagagaacaagttgctgacgtccgacggaaagttactcatggcgcaatttctggcgttgatgttggccggcgagtgtccattgctctatggcccggaaacacaagacttccttgctattgccgcatcgctgatttcttcaggtcgcaccatccggcagatcgccgatccaacgatgattaccggcgaggatctttgggtccgggcgggaaataaaatggcgacgccgctctatcaggggttattgctgagtgaagcttcctgcccacgaacgatcctcgccgtcattgaacgtgtcgaatgttccgccgcgcgtttctggttgcccgcgctgaaagaccgattgtacggtggcgatttaccccggcgttttttgatctgcggcaccattgaaaacgaagattgtgaagaagcggagaaactgaaagaacagcatcttcgtctacggatggaaaacgtcgtcattcaaaatgcgattgcgctgtcacccttacatctttcctctgaaaatcatagcgaactggatcctggcgcagcatcgcaaggttcgctcccggataaactcgctattgcggataaaatttcagccggacgtctggatctgacaaataccctacgggcaatgagaacggcgcatgaagccgtgccgttagataacgaaaacaaaacgcatcagaagcgtttagtcgatttatacgccgatttacagaataacgagctatacgcccaataa

SEQ ID NO: 28238 - DNA, 5841 bp, Salmonella enterica; identical to SEQ ID NO: 28234
  subsp. houtenae serovar 50:g,z51:- str. 01-0133

SEQ ID NO: 28239 - DNA, 1236 bp, Salmonella enterica; identical to SEQ ID NO: 28235
  subsp. houtenae serovar 50:g,z51:- str. 01-0133

SEQ ID NO: 28240 - DNA, 2088 bp, Salmonella enterica; identical to SEQ ID NO: 28237
  subsp. houtenae serovar 50:g,z51:- str. 01-0133

SEQ ID NO: 28241 - DNA, 5844 bp, Serratia marcescens BIDMC 44
atgttagatcccattggcggttttcgccgtattcaggacttcttcatttcatatatagaaaccaacttccgaattgccgatccttccgtcgcggcatcaagacgcaatctgctgaacagcagcggggaatttgccgcagagccatacattgaacctgttttacggtatgaatcttctgataaaacgctagaagttctggccgagatggactgtgggccgctgaatagtttgtctcataaaggccgtaaggcgttcgctgaattagcgttatctggtctgttcgatgcgaaacctggtgatgagatctggccgcgtcgttcagtccatgcgccatatagccaccagattcaaatgctggagcgaggtctttctcctggttgccccggtattgttacatcgggaacaggttcgggaaaaacggaaagttttatgttgcctatactggcagcactatcgaatgaggctgtcaactgggccgcaccttacgacggttatctgcaaagtcgatggtggaacggcgaaaaaacaagctgggtttctcgtcgtgaaggagaaaaacgtcaggctgcagtcagggcgctggtgctttatccaatgaatgctttggttgaagatcaaatggcgcgtttacgtaaaacgttggattcagatgatgcacggcaggtgatggaacatcgcttcgcaggaaatcggatcttcttcgggcaatataccagcgcaacgccggttaccggctacgccagtcatcctcgtatttctggagtcaaatcggaaaaaagtcgccgtgcccgtaatcttgaaaaattacgtaaggcgttgaagcgaattgatagcgatcagcaggctgcgcgtgcattcgacgaagaaaaaggaaacgtttcggaaaagacccgatatatatttccttcgacagacggtggggaaatggtttctcgctgggatatgcaggcagccccgcctgacattctcgtcactaacgcctcaatgctaggggctatgctttcgcgagaagttgaagacgatatttttgatactacgcgtgaatggctgatgaataacaacgacgcgtacttctatctggtattcgatgagctgcatttaatgcgtggttctgctggaaccgaaaccgcaatgttaattaagtcgctgattatcagactcgggcttgatgacccgaaacatcgttacaaactgcgtttgctggcgtcgtctgcatcccttccgatggatggcgcggatggagaacaatcacggaaataccttcgggatctctttgccccctttggcacttgccgcgactctctggatcccggtagcgataagcccgacttctggcgtaattgcgttattcagggaaaaccatatatacctccaaaacctgaaggaaaaatcgccgtgttgcctttcgccgcattgatgcgggttgcccttgaggggcaggaaaacgtcgttcgtaagctgaacatgacggacgcgcttaatcaggctttgtctaatgccttcctggctctgggcttgaaagcgcaaaatggcatgcaaggcattaaacaagcagcggaaaaagcagcggcgctgctgaccaatgcttgcatagaagaaggttgtgagtcgccgcgagcgatgccgccgggggtaatcatcgataagatttttattaaggaagacacgggtaatcaagatgaattggaattagcattgcgcggattaatgctgttacgcgcgctgccggaatctgggatagatttcgagaaacctgccagcgtcactccagcttttcgcgtgcatacattcgtcagaaatattgagggtttcttcgcctccgtatcgccgggagagcaaaaggcgaaattctccgatttttgtctggaacgaggcttgtcgcatgcgccatcaactccaggtgggaaacgtggtcgccgtttgttcgaaatgctgtattgtgaagcgtgcggcgagttactgatcggcggtcagaagggacagaatcacggtaaaaccatcgaattattaccttcggcaaccaatctggaaaatcttccagaacgccccggcgcagaatactacgatgatatgacgttggatgagtttgcggttttctggcctgtcgatatgtcagataaaagtccagcaggctgcgaaaaaggttgggatgtctgggataaggcggcacttaatcctgttactggtatagtgactgttgggcaggatatatcaccgacaaatactagcgtagttcgcgggtatctctatttccagaatccggttaagcctaaaaaaggcgagcctgcgaagagaccttctgcgcagcctttctgctgccctaactgcggcattgactattccaaccggcctgccagcaatcgttccagaacgcccattcgcgcatttcgtactggtgtgacgaaatcatcccaactggtagcaacggagctatttgaattactacatgcaattggcgcggaagcaaagagtattgttttctcagacagtcgacaggatgcggcatcaatggcgctggaaatcgaacggctgcacttgcgtgatctacgcagggaaatattggtctcatcttccagagcgatgattaacgaggctgaaagcaggtacatttcagacgcggatattgaagacaggaaagccaaagctaaacaatctggagattatgatgaatatatcagactgcatgatcttcaaaaaatccaagccggaattactgagctttgtaaatatagacgggtaaaaatcgacaaattactggagtctgaaggcgactcaataggaagaatcacatctgagctcgtcgggctgggaatatcaccctataaatatcgttctaattcagatgagaatgatagcactgtttggcatgctaatttcattaaagaagggacggctattagatttagtgaaaggcttccttctcatgaacgaatgaaaataaaaacgaaaatatctttagatcagtctgaactgatagatgatgttatttttgccaatacatttttcgcgctggaagaaacaggattggcatatccatgcatctcagataaagatgaaatgccggaaattgatgcttggctaagggtgttttccggtgcctatcgtgttaaagagaacaaatattacgatgaaagtcgcactcgtgattggtattttgggaaagacgttgaaaaagaaaagattaagcgaattgccagggttttattcggtgataacaactatcaagatggtttgacacatgtattaaaacagtttgctgatttgaaacatccggcggggttaattagtatcggcaagttgtttcttaaggtcgccaaacctggcgataattactggcaatgcggtaactgtgggcgaattcacttacatttagggtttaaatattgtacccgttgcgtgaatgcactcgatcttaaacccagcgggtttgtcgaagagctatgggaagacaattttcttgggaaacgcattgtacgtggagagcgagacggagttaaacgtttccggctgaacgtcgaagaactgacggggcagacggatgatttctccgatcgtctgcgtaagttcaaggggatttttgttgataaagttagtgaacttgaaaagctagatacagaaattgatatgctagccgttactacgacaatggaagtcggaattgatatcggttcacttcagtcggtttatcaggccaacatgccccctcaacgttttaactaccagcaacgcgttggtcgagctgggcgacgtggccaagctttttcttttgttatcacattttgtcgtgggcgtactcatgatgcatactattttgctcatcctcatgcaatcaccggcgattcgccgccgccgcctttcctggcggtagatcacgacgccattccattaagactcatgcggaaagtatggcttagagctgcatttaatattttacgcgaagaggattataaaaatggaataactttccctggagataaactcgttccgcctgatattcacggtgaatatatttctacgcatgattactatcatagcgatgaaaataattgggctgaacgattgctgggagcgttgaaaacaactcaggatatacatgatcgctttattgaggcagcaacgttcgatccagagcaaaaacggcgtctttattccgcagtaaatgcggagggcataattgatgaaatcgataaactgaacgcttacgtccctgaagacgatatagggcttgcacgttttctggccgagcacggtaaactgccgatgtatggcatgccgactcgggtgcgaaatctttatttgggattgcgtaaaacaaaaggtataaacgctcaagaagaatacgaatggtcgacgatggatcgcgatcttgatctagcagttttcgaatatgctcctggttcggtattgatcaaggataagaaaaagcatgaggtaataggcttcacaggaaattaccaggaaccacagatccagaacaaccgaatatcggatctttcggtggtaggctcatggcaggagtcgtgtagccatgtagcaatttgccctgcatgcggttctgccaagctggagttacataaacctgacaacgacattaattgcgaggattgccgaacgccgatcagtcctgaagaattcaggctttatatcacgccagcagcttttcgcacggatttcaaacccaaagacgatatggatagttttatccgtatgtcgttaaaaaccacggcgacagtgttgcatgagggtgttccaacaaaatgtgactctttcactgtacgacgcggcgaagtgaccattcttcgcctcaatgatggccccattaatggagaaaaggaaggtgagcgatttactgttgacttggcaaatgatctaaaagcaccaatgcccttttctacttattgtccgtcagttaaaggtgagcaggctatcgattcaggttggttggagtctcacaataacccgcgctggcaatgtagcggcaagaaaaaaagttttgggcttgtatcaagcaaagagacagaatcgcttcatattgaattaactaaattcgatgcacgccttaatctggatatggtcgccagatacggcgagtacatgaatttgcctacgcgtgctgctgctattagcgcgacccagatattgacgcataaggcagcactctatctggatgtttcgccagatgaattcgaaatgcttgaaccccgagtgcatcttggtaaacccatcttgcaaatcgccgacgcgttgatcaatggttcaggattatgcagacgacttgccgagcctgccatcgctggcggtccacctttgatcgtcacattattgcatgagattctggaagataagttcgtctggccaatggttgactttctgaagaaggatcatcctgctcaatgtcaaacggcctgttacaagtgtatacagcgctacggtaaccgccggtatcacggtttactggattggcgtttaggaatggcctatttacgggctatggttatgcccgagttcgcatgtggcctgaacatcgccgattggaatcagccagagatggaaggatggctaaaaagagcgtttgagttagcggaagacgtcgaagctctacgaccagcaacgatcaaattgtcaaaagagtattcgttgcctgttcttatcgaaatacaggatgggaaagagctttggagagcggctgtaacgcatcctttatggcaatggggagatggcaaacgtgatgcactgattgactcttttggattggctgacggggagtcgtcgctactattcattgatacgtttgaactggaaagacgaccgctgcgtgcactggtgaatcttaaacagagttag

SEQ ID NO: 28242 - DNA, 1236 bp, Serratia marcescens BIDMC 44
atgagcgttgaaactgtcacggataacaatcatttaacggaaccttgcgaggcggggttcagtttctatgagtttttcgcgggcggcggtatggccagagctgggctgggaaaacagtggcaatgtctgttcgccaacgacatggacccgataaaagcatcgacctacatcgacaactggggagatgaacatttcgacatgcgcgatatacgcgaaattgaccctgatgacctgccacaccatgctgatttaagctgggcctcgttcccttgccaggatttatcgttggccggtaatggactggggatcggcgaaagagactccagcggggatgaaaccacacggtccggcgcggtatggccgttcctcgatttgataagcaggctcggcgaggaaaaccgtaaaccgccgattcttgttcttgaaaatgttcttgggttgttgacgctggatcaggggagccatttcgctgcgatatgccatcagttaagtaaaacgggctaccgatatggcgcaataatcattgatgcaaagcactttcttccacagtccaggccccgtgtatttcttatggctattagtcgccatgtttctattcccgaaattttggtttcagaagaacctttgtcgcaatggcattcaccttcgcttcttcgcgcctgcgatgcactggcggatgatgttcgtaatgactggatctggtggtcgcctggcaatataccagacgccagaacgaaggagttggacgacttaatcgattttgaagacgaaaatgcgcaatggcattctgtcgatgaaacacaacggcttatcagtatgatggcaccggcgaacttggcgcgtctagcgagcgcgcaggcatccggtacgacaaaaactggcagcctttatttacgcatgcgcaaagagaaaggcgtcaacaggcaacggactgaaattacgttctcagccgttcttggttgtcttagaacgccaaaaggcggagcttctcgccctcgtattatcgttgtcaaaggcgaacaggtgaaaacgcgcttgttgtcggtcaaagaagcggcggctttaatggggttgccggacgattttattctcccagtggcgtatcattctgcgtttaaagtgatcggcgatggccttgccgttccttctgttagttttctggccgaacgcattctagagccactcgcgatggcagtccgaattaatacccaacagatggaggatattcgcgaatga

SEQ ID NO: 28243 - DNA, 2559 bp, Serratia marcescens BIDMC 44
atgaactggacgtcgctcgttacgcccgatggttgggaaagtaaactgatcgattattttctccggttcggtgctgacggcgacgcgcaagatattcgctggtttgaagttacgccggtgacgcttgcggcagcgttcgctgacagaggcattaccgcggatgaaattgaagaagcatttcgaacctgtatgtctaaaatacgagatctgccgcagcgccttgaaggcggtatgatggaaaagtcgactcgtcgatcgcccggatattttacgtatcttgtcatgacgttgcttattagtagtcaattcgacgcacaggaagaacgtaatgattttcgtctgaagttacagaactggttgggaaccgggcatagctttcagaacttatctggcgtcaacgcgatgtgggaggcattagccgaatggctgaatcaacgtattcaggaaggcgaaccctacaggcgccttgtcttgccgccgcgggatggctgggttcagatcggtcacaccttgcggttggcattcccgaatagagccgatctgcgcctgatgagtgaatgtcttgaaagccatccgcaagccgccgctagcccacgccagttaatagaatactttcagattgttattcagagacaaagcgtttctcatgcgctgaaggaggctttcgccgaattcagagatgcgtggttgttggggcgtcgcgcactgtttgatatgcctttctggcgcctgcgtcaacgggcggtagggatatcgtcctgtataacgacgcatcagtccatcattgatatgtatgtcgacttcgacggttcgcggtgttatttcagtagcgcggacgagagaggagaaagcgtttttcatcctacgttatccaaagctcttagcgcccactacgctgagaacagcgacaatctggggaaagcgacgcaggtcggattattatttttttatgagatcggaaatgggcgctggagagcgaaatcatctcctgacgtatattcgcaacggtttcatatcgccttatccagtaaacattctgtacagatgagcaaacgcctcaacgggtatattgcagaggatgagtgggttttaacgacccagccgctgaaccaggtttcagcgatggatatattccgctcactaagatcctctttgggtattcaagatgatgacgttacgcgccctcagctatacggtggaatacgcgtacctggcggatggctgggattaccggcgtttttgccttctattgagtcagatacgcgaagctacaaaatatatgcatctggaaatgatggagcgggaaccaatgtttctgtaatagatggtcgtttgatttctactgggtcgcttagtggtgagttctttatcgagccggtgcttgaagtgggggaaaaaatgccgccatggaggcgtcgcgcgcgatttttcactcgcgccgtaccgcacccgactttaggcgaaagcgcaagataccgatttgaaccgctttatgactggtcgacgtctgctctacaggcaccgacgtttaatttcgaagaactgttgcagtgggaagataacgaagtttgttgcgatcatcttttagaggcgatttacgccagcggagctagcggctgggaagaagccgaattatttgctcttctcaggcatgtggcggacaacatcaacgtatggcatttgattcgttgtttacatcatgcgggtctgatccagccacgcctacgccctgggtggaaaggtcgggcatggacgctggttaaaccctcattgcttcatatttgcaacggagaaaattctctggttgttgcggaaggtgctgtctgcgtcagtctgatggatgattttcaaaaagcggtcgccgggctgggcggagaaagtttccgtcgtcgtggcataagcttatggtcgccccctgtatttggagctgtactcgctaatcctgttgcgttatctcagcgtctgggatggccgcttatcgaagccccattgtcatccgatacaacaccactttcacttgtcacgacggaacgcaccgctgaactacacgagccagcggcggtctggaactggcgttcgggaatatttcagcaggatggttccctagagaaagaatcagtgtctctgtcacttcatattcatcctggcgggcgagatcatgatatctatcgggtgatttccgggcgaaaaacgatgcattttctttcccgaactgccgctattatcaccgctggcgcgaaaaaccgggaaccagtgtttgaacgcgtcgccaaaaatcatctgatatgccttattaatgattgcggcctacccgatgcgctggccgcgggaatacggcgtcacacgctcagaaacggaggtccggtggactccggttatgcctatcctgtcgatgacgtctcattccgctggttagaatcgctgcttccgggatgcttcaattccctctttccacatggtgagggtgatataaaccgcttagtttccgccagccgtcattccggcggaaaaatacgtacgatttggcgaaacggtcggctaacgctgacgctgggatga

SEQ ID NO: 28244 - DNA, 2082 bp, Serratia marcescens BIDMC 44
atgagcaaaatccctttgtatcttggtcaatttgatcgcagaaattatcagtcttatctcaaagttatcgtgcaggaaacgcctgttggttggcgcacgatcgaaaaccctaagaaattgttccctcgtacgggagaagttgagtttaacgagactgacgctttgcaacttcgtaaggacgaatgggctgcttttcatgttggacccggcatacgcaacagagctcaggcgaaacatgcccgccgtatttatccttattatgatttatcttccggccagtcgttattggaagtgcgtcgccaattgagtttcaatggcataacgacagatggcgaaccaggattatgggctatccgttttgggccggatggtctgattctggcgaatatggctgagtcgaaatcaggatatttgattctgtccaaaagccagaacgtttatgaatatgatttccatgaaggtagtgtgatttccgtatccggcatatctgaaagtggaaagtcgttttatatgcccgatgtcgatgcatcacctgctcggatccatgactggacgccggataagcagtacatcgaaaacgttattcaacacctttcctgcgctggtttgacagccgaaatcgcttcatggctccgagtgcacacaaatgagcaaaatggaaaattaacttccggtgtcgatgctctgctggctgccgctcaaacgctccgggcaggagagttggctaagaaactggaggaagaagattcgctggctcgtcagtttaccgaatcagtgttgaaggaccagcagattgcctaccttctcgagcatcagatacaaaacattgcggaagaagagcgagtcgcgttgcgcgccgaacagcataaggcgcttgataaagagttttcagctgaacgactgcgacgccgtgaagctattgaaacggaaatggccgttttgaagaagacaaggaaaagcgagatcgaagaagagatcgtacaattacggcagctcgaagaagaaaaattgcagattgatttcgcagaaaaacaagcggatatagaacgaacgctcaaacaggaaaaagtgcatctcgaaagcgaaattagccgtctgaaagacaccagcgctgatttatatgctcagaacgaaaatcagcatcagatactggcttctctgagctgtgagcgtgaagtatgtttggcgtctttaacagataccgaagaacgtactgcccaggcgaaaattgaacttgaaaaaatggatattgctattactgagaaggctcgtcgtatggcttactcagcgattcctgaagtacgcctcccggcgcaagcgagagccgtatcctgcgaagaattcggtcagaccgtcagagagaacaagttgctgacgcccgacggaaagatactcatgacgcaatttctggtgttgatgttggccggcgagtgcccgttgttatatggcccggaaacacaagacttccttgctattgccgaatcgctgatttcttcaggccgctccatccgactggttgctgatccgacgatgatttcctgcgaggatctttgggttcgcgcggggaatcatctggcgacaccgctttaccaggggttattactgagtggagcctcccgtccgcgaacgattctcgctgtcattgagtgtgtcgaatgttccggtgtgcgtttctggttaccggcgctgaaagatcaattacacagcggcgatttaccccgacgctttctgatttgcggcaccattgaaaatgaagattgcgatgaggtggagaaaataaagggaaaacatcttcgcttgcggatggaaaacgtcatcattcgggatgcgattgcgctgtctcctttacatctttctttagaaaatcatagtgagctggatcccggtccggcatcagaagattcgctaacagacaaactcgctatcgcggatgaaatgtcggccgggcgtctggatctggtaaataccctacgggcgatgaaaactgcgcatgaattcgcgccgcttgatgataaaaacaaagccatatatcagaagtacttaatcgatttatacgccgatttacagaataacgagatgtaa

SEQ ID NO: 28245 - DNA, 5844 bp, Serratia marcescens BIDMC 81
atgttagatccgattggcggttttcgccgcattcaggacttcttcatttcatatatagaaaccaacttccgaattgccgatccttccgtcgcggcatcaagacgcaatctgttgaacagtagcggagaatttgccgcagagccatacattgaacctgttttacggtatgaatcttctgataaaacgctagaagttcttgccgaaatggacggtgggccgctgaatagtttgtctcataaaggccgtaaggcgttcgctgaattagcgttatctggtctgttcgatgcgaaacctggtgatgaggtctggccgcgtcgttcagtccatgcgccatatagccaccagattcaaatgctggagcgaggtctttctcctggttgccccggtattgttacatcgggaacaggttcgggaaaaacggaaagttttatgttgcctatactggcagcactatcgaatgaggctgccagctgggccgcaccttacgacggttatctgcaaaatcgatggtggaacggcgaaaaaacaagctgggtttctcgtcgtgaaggagaaaaacgtcaggctgcagtcagggcgctggtgctttacccaatgaacgctctggttgaagatcaaatggcgcgtttacgtaaaacgttggattcagatgacgcacggcaggtgatggagcatcgcttcgcaggaaatcggatcttcttcgggcaatataccagcgcaacaccggttaccggctacgccagtcatcctcgtatttctggagtcaaatcggaaaaaagtcgccgtgcccgtaatcttgaaaaattacgtaaggcgttgaagcgaattgatagcgatcagcaggctgcgcgtgcattcgacgaagaaaaaggaaacgtttcggaaaagacccgatatatatttccttcgacagacggtggggaaatggtttctcgctgggatatgcaggcagccccgcctgacgttctcgtcactaacgcctcaatgctaggggctatgctttcgcgagaagttgaagacggtatttttgatgctacgcgtgaatggctgatgaataacaacgatgcgtacttctatctggtattcgacgagctgcatttaatgcgtggttctgctggaaccgaaaccgcaatgttgattaagtcgctgattatcagactcgggcttgatgacccgaaacatcgttacaaactgcgtttgctggcgtcgtctgcatcccttccgatggatggtgcggatggagaacaatcacggaaataccttcgggatctctttgccccctttggtacttgccgtgactctctggatcccggtagcgataagcctgacttctggcgtaattgcgttattcagggaaaaccatatataccactaaaacctgaaggaaaaatcgccgtgtggcctttcgccgcattgatgcgggttgcccttgaggggcaggaaaacgtcgttcgtaatctgaacatgacggacgcgcttaatcaggctttgtctaatgtcttcttggctctgggcgtgaaagcgcaaaatggcatgcaaggcattaaacaagcagcggaaaaagcagctgcgctgctgaccaatgcttgcatagaagaaggcagcgagtcgccgcgagcgatgccaccggggttaatcattgataagatttttattaaggaagacacgggtaatcaagatgaattggaattagcattgcgcgggttaatgctgttacgcgcgctaccggaatctgggatagattgcgagaaacctgccaacgtcactccagcttttcgcgtgcatacattcgtcagaaatattgagggtttcttcgcctccgtatcgcagggagagcaaaaggcgaaattctccgatttttgtctggaacgaggtttgtcgcatgcgccatcaactccagacggaaaacgtggtcgccgtttgttcgaaatgctgtattgtgaagcgtgcggtgagttactgatcggcggtcagaagggacagaatcacggtaaaaccatcgaattattaccttcggcgaccaatttggaaagtcttcccgaacgccctggtgctgaatattacgatgatatgacgctagaggagtttgcggttttctggcctgtcgatatagccggtcggcctccggtaggttgcgaaaaaggttgggatgtctgggaaaaagcggcgcttaatcctgttacaggcattgtgaccactggggaggaaatatcgacgccgaatactgacacagttcgcgggtatctctatttccagaattcggttaaacctaaaaaaggtgagcctgcgaagaaaccttctgcgcaacctttcagctgtcctaattgcggcattgactattccagtcgacctgccagcaatcgttccagaacgcccattcgtgcattccgtaccggtgtgacgaaatcatcccaactggtagctacggagctatttgaattactgcatgcgatcggtgcggaagcaaagagtattgttttctcagacagccgacaggatgcggcttcgatggcgctggagattgaacgtttgcacttgcgcgatctgcgtagggaaatattggtagcagcagccagagcgatgcttgaagaagctgaaaaaagttacatatcagaagatattattaacgataaaatgaacaaagccatgctggctagtgatgatgatgaatacggtcggctatatgctctcagaaaacatcaaggggcggttgccaatctttgtaagtataaacgcataaaaatagacaggctattagaatctgaaggtgattcaatcggaagaattacatctgaactggttggactgggaatatcaccctacaaatatcgctctagttcagatgagaatgatagcaacgtttggcactctaatttcatcaagaaaggtaaggatattaaatatagcgaaaccctttcttctcatgaaaaaatgaagataaaaacaaaaatctcaggagatcagtttgagctgatagatgatgttatttttgctaatacattcttcgcgctggaagagactggattggcatatccatgtatatccgataaagacgattcgccagaattagatgcatggttaagagtattttcaagtgcttatcgagttacggataataaatattttgaccctgcccgtactcgtgattggtatgaaggaagccatgtcgaaaaagagaaggttaagcgcgtggccagagttttattcggtgatggccgatatcaagatggtttaacgaatatcttgaagcaattctctttgcttgagcataaggcagggcgaataaatatcggtaagttgttcctcaaaataagtaaaccaggtgataattactggcaatgcggaaaatgtggacgaattcacttacatttagggtttaaaaattgtactcgctgtttaactccacttaatatcgaacccagcggagttgttgaaacgttgtgggaggaaaattttcttggaaaacgcattgcacgcggagagcgagacggagttaaacgttttcggctgaatgttgaagagttgaccgggcagacggatgatttctccgatcgtctacgtaagttcaaggggattttcgtcgataagatgagtgaacttgaaaagctagatgcggaaatagatatgcttgccgttaccacgacaatggaagtcggaattgatatcggttcacttcagtcggtttatcaggccaacatgccccctcagcgctttaactaccagcagcgcgtcggtcgagctgggcgacgcggccaagctttttcttttgttatcacattttgtcgtgggcgtactcatgatgcatactattttgctcatcctcatgcaatcaccggcgattcgccgccgccgcctttcctggcggtagatcacgatgccattccattaagactcatgcggaaagtatggcttagagctgcatttaatcttttacgcgaagaggattataaaaatggaacaactttccctggagataaactcgttccgcctgatattcatggtgaatatgtttctacgtatgattactatcatagcgatgaaaagaattgggctgaacgattgcttggagcgttgaaaacaactcagaatatacatgatcgctttattgaggcagcaacgttcgatccagagcaaaaacgaagtctttattccgcattaaatgcggaagacataattgatgaaatcgataaactgaaagcttacgtccctgaagacgatatggggcttgcacgtttcctggccgagcacggtaaactgccgatgtatggaatgccgacgcgggtgcgaaacctttatttgggattacgtaaaacaaaaggtataaacgctcaagaagaatacgaatggtcgacgatggatcgcgatcttgacctcgcagttttcgagtatgctcctggttctgtcttgatcaaggataagaaaaagcatgaggtaataggcttcacaggaaattaccaggaaccacagatccagaacaacagaatatcggatctttcggtggtaggctcatggcaggagtcgtgcagccatgtagcaatttgccctgcatgcggttccgccaaactggagctacataaacctgacaacgacattaattgcgaggattgccgaacgccgatcagtcctgaagaattcaggctttatatcacgccagcagcttttcgcacggatttcaaacccaaagacgatatggatagttttatccgtatgtcgttgaaaaccacggcgacagttttgcatgagggtgttccaacaaaatgcgactctttcactgtacgacgcggcgaagtgaccattcttcgcctcaatgatggccacattaatggagaaaaggaaggtgaacgatttactattgacctggtaaatgatctaaaagcaccaatgcccttttctacttattgtccgtcagttaaaggtgaacaggctatcgattcaggttggttggagtcgcacaataacccgcgctggcaatgtagcggcaagaaaaaaagttttgggcttgtatcaagcaaagagacagaatcgcttcatatcgaattaactaaattcgatgcgcgccttaatctggacatggtcgccagatacggcgagtacatgaatttgcctacgcgtgctgctgctattagcgcgacccagatattgacgcataaggcagcgctctatctggatgtttcgccagatgaattcgaaatgcttgaaccccgactgcatcttggtaaacccatcttgcaaatcgccgacgcgttgatcaatggttcagggttatgcagacgacttgccgagccagccatcgctggcggtccgcctttgatcgtcacattattgcatgagattctggaagataagtgcgtctggccaatggttgactttctgaagaaggctcatcctgctcaatgtcaaacggcctgttacaagtgcatacagcgctatggcaaccgtcggtatcacggcttgctggactggcgtttaggtatggcctatttacgggcgatggttatgcccgaattcgcatgtggtctgaacgccgccgactggagtcagccagagatgaaaggatggcgaaaaagagcgtttgagttagcggaagacgtcgaggcgctacgaccagcaacgatcaaattgtcaaaagagtattcgttacctgttcttatcgaaatacaggatgggaaagaactttggagagcggccgtaacgcatcctttatggcaatggagagatgccgaacgtgatgctctgattgactcttttggattagctggcggggagtcgccactactattcattgatacgtttgaactggaaagacgaccgctgcgtgcgctggtgaaccttaagcagagttaa

SEQ ID NO: 28246 - DNA, 1236 bp, Serratia marcescens BIDMC 81
atgagcgttgaaactgtcacggataacaatcatttaacggaaccttgcgaggcggggttcagtttctatgagtttttcgcgggcggcggtatggccagagctgggctgggaaaacagtggcaatgtctgttcgccaacgacatggacccgataaaagcatcgacctacatcgacaactggggagatgaacatttcgacatgcgcgatatacgtgaaattgaccctgatgacctgccacaccatgctgatttaagctgggcctcattcccttgccaggatttatcgttggccggtaatggactggggatcggcgaaagagactccagcggcgatgaaaccacgcggtccggcgcggtatggccgttcctcgatttgataagcaggctcggcgaggaaaaccgtaaaccgccgattcttgttcttgaaaatgttcttgggttgttgacgctggatcaggggagccatttcgctgcgatatgccatcagttaagtaaaacgggctaccgatatggcgcaataatcattgatgcaaagcactttcttccacagtccaggccccgtgtatttcttatggctattagtcgccatgtttctattcccgaaattttggtttcagaagaacctttgtcgcaatggcattcaccttcgcttcttcgcgcctgcgatgcactggcggatgatgttcgtaatgactggatctggtggtcgcctggcaatataccagacgccagaacgaaggagttggacgacttaatcgattttgaagacgaaaatgcgcaatggcattctgtcgatgaaacacaacggcttatcagtatgatggcaccggcgaacttggcgcgtctagcgagcgcgcaggcatccggtacggcaaaaactggcagcctttatttacgcatgcgcaaagaaaaaggcgtcaacaggcaacggactgaaattacgttctcagccgttcttggttgtcttagaacgccaaaaggcggagcttctcgtcctcgtattatcgttgtcaaaggcgatcaggtgaaaacgcgcttgttgtcggtcaaagaagcggcggcgttaatggggttgccggacgattttatcctcccagtggcgtatcattctgcgtttaaagtgatcggcgatggccttgccgttccttctgttagttttctgaccgaacgcattctggagccactcgcgatggcagtccgaattaatacccaccagatggaggatattcgcgaatga

SEQ ID NO: 28247 - DNA, 2559 bp, Serratia marcescens BIDMC 81
atgaactggacgtcgctcgttacgcccgatggttgggaaagtaaactgatcgattattttctccggttcggtgctgacggcgacgcgcaagatattcgctggtttgaagttacgccggtgacgcttgcggcagcgttcgctgacagaggcattaccgcggatgaaattgaagaagcatttcgaacctgtatgtctaaaatacgagatctgccgcaacgccttgaaggcggtatgatggaaaagtcgactcgtcgatcgcccggatattttacgtatcttgtcatgacgttgcttattagtagtcaattcgacgcacaggaagaacgtaatgattttcgtctgaagttacagaactggttgggaaccgggcatagctttcagaacttatctggcgtcaacgcgatgtgggaggcattagccgaatggctgaatcaacgtattcaggaaggcgaaccctacaggcgccttgtcttgccaccgcgggatggctgggttcagatcggtcacaccttgcggttggcattcccgaatagagccgatctgcgcctgatgagtgaatgtcttgaaagccatccgcaagccaccgctagcccacgccagttaatagaatactttcagattgttattcagagacaaagcgtttctcatgcgctgaaggaggctttcgccgaattcagagatgcgtggttgttggggcgtcgcgcactgtttgatatgcctttctggcgcctgcgtcaacgggcggtcgggatatcgtcctgtataacgatgtatcagtccatcattgatatgtatgtcgacttcgacggttcgcggtgttatttcagtagcgcggacgagagaggagaaagcatttttcatcctacgttatccaaagcccttagcgcccactacgctgagaatagcgaaaatttggggaaagcgacgcaggccggattattatttttttatgagatcggaaatgggcgatggagagcgaaatcgtctcctgacgtatactcgcaacagtttcatatcgccttatccagtaaacattctgtacagatgagcaaacgcctcaacgggtatattgcagaggatgagtgggttttaacgacccagccgctgaaccaggtttcagcgatggatatattccgctcactgagatcctctttgggtattcaagatgatgatgttacgcgccctcagctatacggtggaatacgcgtacctggcggatggctgggattaccggcgtttttgccttctgttgagtcagatacgcgaagctacaaaatatattcatctggaaatgatggagcgggaaccaatgtttctgtaatagatggtcgtttgatttcttctgggtcgcttagtggtgagttctttatcgagcccgtgcttgaagtgggggaaaaaatgccgccgtggaggcgtcgtgcgcgctttttcacccgcgccgtaccgcacccgactttgggcgaaagcgcaagataccgatttgaaccgctttatgactggtcgacgtctgctctacaggcaccgacgtttaatttcgaagaactgttgcagtgggaagataacgaagtatgctgcgatcatcttctagaggcgatttacgccagcggagctagcggctgggaagaagccgaattatttgctcttctcaggcatgtggccgacaacatcaacgtgtggcatttgattcgttgtttacatcatgcgggtctgatccagccacgcctacgtcctgggtggaaaggtcgggcatggacgctggttaaaccctcgttgcttcatatttgcaacggagaaaattctctggttgttgtggaaggtgctgtctgcgccagtctgatggatgattttcaaaaagcggttgccgggctgggcggagaaagtttccgtcgtcgtggcataagcttctggtcgccccctgtatttggagccgtactcgctaatcctgttgcgttatctcagcgtctgggatggccgcttatcgaagccccatcgtcatccaatacaacaccgctttcacttgtcacgacggaacgcaccgctgaactacacgagccagcggcggtctggaattggcgttcgggaatatttcagcaggatggctccctagagaaagaatcagtgtctctgtcacttcatattcatcctggcgggcgagatcatgatatctatcgggtgatttccgggcgaaaaacgatgcattatctttcccgaactgccgctattatcaccgctggcgcgaaaaaccgggaacccgtgtttgaacgcgtcgccaaaaatcatctgatatgccttattaatgattgcggcctacccgatgcgctggccgcgggaatacggcgtcacacgctcagaaacggaggtccggtggactccggttatgcttatcctgtcgatgacgcctcattccgctggttagaatcgctgcttccgggatgcttcaattccctctttccacatggtgagggtgatattaaccgcttagtttccgccagccgtcattccggcggaaaaatacgtacgatttggcgaaacggtcggctaacgctgacgctgggatga

SEQ ID NO: 28248 - DNA, 2091 bp, Serratia marcescens BIDMC 81
atgagcaaaatccctttgtatcttggtcaatttgatcgcagaaattatcagtcttatctcaaagttatcgtgcaggaaacgcctgttggttggcgcacgatcgaaaaccctaagaaattgttccctcgtacgggagaagttgagtttaacgagactgacgctttgcaacttcgtaaggatgaatgggctgcttttcatgttggacccggcatacgcaacagagctcaggcgaaacatgcccgccgtatttatccttattatgatttatcttccggccagtcgttattggaagtgcgtcgccaattgagtttcaatggcataacgacagatggcgaaccaggattatgggctatccgttttgggccggatggtctgattctggcgaatatggctgagtcgaaatcaggatatttgattctttccaaaagccagaacgtttatgaatatgatttccatgaaggtagtgtgatttccgtatccggcatatctggaagtggaaagtcattttatatgcccgatgtcgatgcatcacctgctcggatccatgattggacgccggataagcagtacatcgaaaacgttattcaacatctttcctgcgctggtttgacagccgaaatcgcttcatggctccgagtgcacacaaatgagcaaaatggaaaattaacttccggcgtcgatgctctgctggctgccgctcaaacgctccgggcaggagagttggctaagaaactggaggaagaggattcgctggctcgtcagtttaccgaatcagtgttgaaggaccagcagattgcctaccttctcgagcatcagatacaaaacattgcggaagaagagcgagtcgcgttgcgcgccgaacagcataaggcgcttgataaagagttttcagctgaacgactgcgacgtcgtgaagctattgaaacggaaatggccgttttgaagaagacaaggaaaagcgagatcgaagaagagatcgtacaattacgccagctcgaagaagaaaaattgcagattgatttcgcagaaaaacaagcggatatagaacgaacgctcaaacaggaaaaagcacatctcgaaagcgaaattagccgtctgaaagacaccagcgctgatttacatgctcagaacgaaaatcagcatcagatactggcctccctgacctgcgaacgtgaagtgtgtttggcgtctttaacagatgtcgaaggtcgtactgcccaggcgaaaaatgaactcgagaaaatggatatcgctattgttgagaaggctcgtcgtatggcttactcagcaatccccgaagtacgcctcccggcgcaagcgagagtcgtatcctgcgaagaattcggtcataccgttagaaagaacaagttgctgaagcccgatggaaagatactgatgacgcaatttttggcgttgatgttggctggcgagtgtccgttgctatatggaccggaaacacaagacttccttgctattgccgaatcgctgatttcttcgggccgctccatccggctggttgccgatccgacgataatttcctgcgaagatctttgggttcgtgcgggaaataatatggctacgccgctttatcagggtttattgttgagcgaggcttctcactcccgaacgatcctcgccgtcattgaacgtgtggaatgttccgctgcgcgtttctggttgccagcgctgaaagatcgattagacggcggcgatttgccccgacgctttctgatttgcggtaccattgaaaacgaagattgtgaagaagcggtgaaaataaaggaaaaacatcttcgcctgcggatggaaaacgtcgtcattcgggatgcgattgcgctgtctcctttacatctttctttagaaaatcatagcgagctggatcctggccctgcatcagaaggttcgctcccagacaaactcgctatcgcggatgaaatgtcagctggacgtctggatctggcaaataccctacgggcgatgagaactgcgcatgaattcgcgcctcttgatgataaaaacaaagccttatatcagaagtatttaatcgatttatatgccgatttacagaataacgatatgtacgccaaataa

SEQ ID NO: 28249 - DNA, 5499 bp, Sinorhizobium meliloti 1021
atgaaggcgatcatagacgaagccaatccggctagcgtcatcgagtacattcgcgacgcatacctgcgttactacgatagtgccttctggatgcgcgatcaggccgtcatggacgagcgtcgagagatcctgctcgccgatggggtcatggcaagggagccgttgctagaggccgtgccccaatatccctcgacagacccgatcagcgacgcgtgcacgcaagccaagcttgatcccttcgtggcgcagcacctggcgaatgtcatcttcggtgcaagcaatgttcggctaagaaagcatcaggcacagtcactagttacagcgacggctggcaatgccgaagggcaccgaaatgtcgtcgtcacctcagggacgggctccgggaagaccgagagcttcctgttgccattgattgcaacgctgatgcaagaacgtgtccgtgggccgggagcgggtgaaattcatcgatggtggagatccgacctcgccaacgacgccagggaatggttccattcccggtcgggcttcgacggcgcggtccagccagcaatgagggcgcttgtcctttatcccaccaacgctctggtcgaggatcaagtttcgcgtcttcgccaggccgccagccgggctcttggcctttttggttcgcctcttttttactttggcagatataccggggccactctcggtgggacgttcatccctcccgcgtccttgcggtctggtgatcgctcaaggatcaacgagattgggagagaggtcctcaagatcgaatccgaggtcgcggcaatacgcaagcacatgggatccgaggggaaggatgagaaagagatcatcgaaacttgcagccagtttcaggatccgtccatcggcgagatgctgacgcgctgggacatgatcgccgcccctccggacatcctcatcacgaacaccagcatgctgaacatcatgctcatgcgagcggaagagggaccgctatttgcgaatactcgcgaatggctggaatcggatgaacgcaacactttcaccctcgtcgtggacgaacttcattcctaccgtggtacgcaagggacggaggtcgcgctcgtcgtccgcaacctgcttgatcgactgggacttgacccaaattcaaggcaactgcggtgcatcgcaaccagtgcgtccctggatggagaagcgggaaaggaatatctcgaacagttcttcggcgtggatcgacggagcttctccatatatcccggcgagccaagggagttttctgtcccgctgccaatcgaccgccagcttgcctctacgctagccgaggacttgcgcgcaggcggggaccgcgcaaaagcagcgcagggagaaatttccaaggctttttccccaagggaagccattgcgactgcctgtgccgttgcgggccgttccctcgtcaccgatccgaccacaggcgagcgaagaaacgtcgttcgtccgtccgccctgcctgccttgtctgaggtgctctttggggacagcaatgcacggaacgagctgaccgccctcctggtagcagcgaagctggaagatcgtggaaccttcgagataccccgaccggccttccgctctcatatgttcctcaggcaagtccaaggcatgtgggcttgttcgaaccccgaatgcacacaaatcgagggacggttcaagtcgagcaggcgaaggtttggtaggttattcaagtcaccagcgatgaagtgtggttgcggcggtcaggtccttgagctcctttattgctatgactgcggcgaggccttcctgggtggatacatcgttccaacgacggatccgttgctagccgggttcacatttgttgaagcaacgcgcgctggcgaaggcaatgacaaggccagccaagtcaacgagcgtacgatcgacgaatatcgctggtattggccagggggagagcttccgccccgatcctcgtgggagcaccaatctccatctggcaaagctgtccggatgcagttccagcgcggaaccctcaaccacttctctggagagcttggcaatgataccaatccgggcagtggcttgattttttgccgtcctgctacaggcctggaagccagcgagacgattgctgccctgccggaagtgtgcccatgttgcctctctagcaagatatccatcaatgggcaggaggagaacaggcgcgccttcttctccggcatggtcaagagtcctatcagaggtcttaggacgggcctaaacgtcaccacgcagctcgtggccgaccgggcgatgtttgccaccggtgacggcgatcagtcggaaaaaatgattgcatttaccgacagcagggacgatgcagcggacttggcagcagggatagagctcaatcactatcgtgacctgattcgacagctcgtgcattccagcctcgcgccaagaaaaattcctgccagcaccgaactgcttgcgtacgtcggtagcgatccttcggatgaccccatcttgagggagctcgtcgacgccgccgagcggcaaacgccaggcatattcactgccgtgaagctggacaaattcggagtagcggacaaggcccagaaagccctcattgcgagacacgacgcaggagtctcaagccctcgggttgggtggccctctttgcttgagatgatgtcgaccagacttgtcacattgggccaaaaccctgcgggcccccgtgcgagccgcgccaccgacaacggggaggaggatggcacgccgtggtggaggttcttcgacccgccaacgccgggtgattgggcgaccgttgcccccgatgtagcccgagcccgacgccgtgattacatggagctcttcgcgaccgaagttgcagtctccctctttgatagggccggacgagacatggaatcaatggccgtcgcctcaatcgaggtcgatggcaagcacggaaaccgcctattcatggacgatgaggtggcgaatggcgtgctggccaatatcgttcgcatcctcggtcatgctcggtacatggctggcgagaagtctcgaggcagcacgtccatcccgaggacagccaagagctacatagagaaagtcgctcgacacttgaacctcgatgccttggcacttggatcgacaatttcagaataccttcaggagcggggcgtgataaatgccaattggctcctgcaaataaccaatcattcgacgcttcccctcgcgatcgtgccgcgaggtgagcgcaagctgcaccgttgcgaaaaatgctcgcgccgcaccatgctgcttccagtgaaggcatgcaccacgccgcattgtaattcgagcagcttcctggtcgtagaaaatcccggtcaggactactacagctgggtgtcccgggagccggtgcatcgtcttgcggcagccgagctcaccgggcagaccaagccaatgtcgaagcaacgcaacaggcaacgcctgttcaagggaactgcctaccttgacggggagtcgccgctcgtccagggcatcgacgcactttccgtcacgaccaccatggaagttggcgtagatattggctcgctgaagttggtcatgatggccaacatgcctccgcagcgcttcaactaccagcagcgggttggtcgcgctggtcgagcaggacaggcattctcttatgcggtgacgatatcgcgcggggcggcccacgacgactactacttcaacaaccctgagcgaatgacgggcgatcttccaccgcagccaaagctagacctctcgcggccggaaatagtgcgacgggttgtcgcgtcggaatgccttcgccgtgcgtttgcaagcctcaatcccgggcccgacaggaacgttgacagtatccatggaaccttcgggcgaaaggcagagtggaacccgacctatcgcgcgccgatcgcagtctggctttcgagctcgccggaggtcgacgaggtcgtcggccgcctgcttgtccacacgccaatcaaggaccgagctaacgacctggccagctatgcacgatccgggctcgtgcttgcgatagacgacgcggtcgccaacacccgcttcattcaagaagagctcagccatctcctagcggtcgcgggtattctgccgatgtttggatttccaacacaagtgcgaagcctattccacgacaaggtcagaccttcgaggctggaagaggttgtcattagcgatcggccgctcgatcacgccgtatgggcattctgcccgggatccgaaatccccaaggacaagcaactaagcaccgcatgcggcttcgtgctcaggaaggatggcccgaaaggtgtgcacaacgacgaacaaccactcggacgtccgacgatgtacacgcgttgcgaggatgctacctgcagcacgatatcggcaggcgagcatacgcagtgcgcaacatgtggtgggctttcggttccatttcccctgtatcagccaaaaggtttcttggccgcacgccggaggcgtgactatgacggcgagcgacagcgcggtccgtcattgccgccgccggtgcgcgcattcgagcaaggctacggaaatgaggggtgcgggccggtgaagattgccttccggccaggtcctgtcgccattgtgaacgataataggggtcgactgttcgagttcttccaggaaccgtacgagcgcgtatcggtcagggatccaaacttatatcgagatcattccccctggggcgatggcaacgccgcgccgttcttggacaggggggcgatcggtgccgtctttacgacagaggtgctcagcttctttatagacggtgcaccgggaattggccgtttaggaatgctcgacatccgaaagcagccagcggctcgtgcagcgctcgcttcctttgccgagctggtcaagctagccttggcgaccacgctcgatatcgacccatcggaattcaggggcgggcgccaagcattccggaaggatgactgcgagacggaacaggttttcattgccgattccctggaaaatggcgcgggctacgcgcgttgggcgtccgacccagtaaatctggagcgtgccgtcaggggatatcacgaggtggtatcaagcaagtggcaggcgcacagccatgcacatgattgcgaccgatcttgcccagattgtctccgcaactatggcaaccggttcagccacgggatactcgattggcggcttgccctagacctcgcagacttgatgctcggcaatccgcttccactaaccagatggatcgaggacacggagatggattcggtccgggcctttgtcaagttctgcagcgacgcggggatgccggtcaacgctggatatgcaggtgggctctctaccgtctcgcgtgggaggaaggcgttggtcctaggccatccactttggcacaccgatgccgggcacctgcaaccccagcagatccaagcacgagacgagcttaggcttgacggaaccgaggctgagttcgtcgatgcgagggacttttcgactcgaatggcaaattactacctgaggctacagtcgtga

SEQ ID NO: 28250 - DNA, 1323 bp, Sinorhizobium meliloti 1021
atgaaaaaatatagcttcgctgatttgttctctggatgcggtggtctttccctcggcctcacgcaggctggtttgaagggacaattcgctatcgagcgggacgcaatggccttccggactttcgcgaccaacttcatcgacgcgcggggcgcctccgaccgattcgagtggcctgcctggctcgagaggagggcgtggggcatagaggaattgctagaataccacggcaaggagctgttgggcttgcgcggtacaatcgacgtgctcgccggagggccgccctgccagggctttagttttgccggccgccggaacgaggacgacccgcgcaaccttctcttcaagaagtacgtcgaaatggttgaagccctccagccgcaggcgctggttatcgagaacgtcccgggtatgcgcgtcgcgcatgcccggcgcaacgtggtagagctccaggcagcagatccgggtggccgaaagatctcgttctacgacaagcttgttgagagcctgtccgccgctggctacgacgtcgacgcgatgctcgttgactcggcttccttcggcgtgccgcaaaagcgttcgcgcttgatcgcgatcggcgtgagcaaggatctttgcaagtggttggatggcggcatcctgcgcgccttcaagctcctggaagaggcaagggtcgagcagctagccgaactcggcttgccgcccttggttacggcgtccgacgcgatctcggacctcgagattactggtcggcccttagttgagtgtgttgatccggagtcgccgaagcgtttcatggaggcgagctacggtggcccgcgaactccgtaccagacgctcatgcatcacgctcatgtcggttcgatggacagcatgagactcgcgcggcacaccgacgaggtaaaagatcgttttgcgaagatccttgcggaatgtcgcaagggcgtccgaatggacgacgctagccggcggacttacgggttgaagaagcaccggatctatcccatggccgaacgcgagcctgcgccaacggtaacgaccttgcccgacgacatcttgcattacagggagccgcgcatcctgaccgtgcgcgagtgcgcaaggctgcagtcgttccccgacaggttcatcttcaagggaaaatacaccactggtggggagcgccggaccaaggagtgcccgcgctacacgcaggtcggcaatgccgtgccccctcttctagcccgtgcaatcggcaacgccctcacccgcctacttgacgaagtctcggtggcgcagcttgactccgacaacgcggctacccaacttgcgctgacaatggcctga

SEQ ID NO: 28251 - DNA, 2994 bp, Sinorhizobium meliloti 1021
atggtgccgccggtctcatacaaagattgcaactctgcgctgaacaaggtgttttttgatgggcggttcgccgggcagccggtgtacctcaccctcgacaacgacatgcgcgaggaagtgggcaagcatcttcgtgtcgaacccgacctcgtagaggctgccatttgccaacgagtaggccaatggctcgatcggcgtggaaatccctacgagacgaccgtcgacgccgtggaactctggcggcgcgtcggcatgaagtcccagccccttttcacggcgatcttgttctgcctatcccacgcggcctcgatcatggcggcagaagaggacttcgcggcgaacaactattatctccgtctggcgcaggtaactggcatcgagcgacagcgactatcgcaacatggcaagtcaacggatatgctgtggagtgcccttcgcgactggctcgtgctgaacaactatggctttggcaagcccacggcggtcgccgctacgacatggaaatacgtcgggaaggcaatgtcgcaagcggccgtccgtgctggcgatcgtgaactattccatgaccttttcgggcgatacggtttctcgggcagcgaaatcatctcgctgaaggagatggaattctacctttcgtattggattataggcggcagggctaactcaaggctcaagaatgtatggtcgaagccagagctgagggaacgtgtcgcggaagctgcgctggcagaactttccaagtggagcagcagcgggcctggaacgatgggttcgcggccgtcgacggggagctcacggctctctatgctggcgaacttcgtgcagaggtttcccaggcagctgctggaacttcatctcggtcggattgccagtgaggaagccagtgggcctttcaagacggagggaggaagccaggagttctctttgtcgagcgatcgcttcgggggctactcgacgctcgctccttcacctcttgtcgccagcatcggacatcgttgccacctggttccggcctcgccgggcttgcgacccttggactggcagcctcggctggtcattccgctggccaagtctgcacaggacaacctctgggtcgaggtcgcaaaggtgtcgttcggaattccccatgtgctgctagtgcgggatgcccatggtctgccaggcaaggtggagtcgtacttggcgattgccgcgatgaagatgccagagaaggcgtcaccgtcagatcttcctggcctcccgctaggctggatattgtacaaggacgtccaagtccgccagccggggatggttcctagcgacgatcttgaatgcctcgttccatggtccaatgacggcgtcctgtcgatcggcgagggactgcagctcctgccgggtttttaccatgcctcgcggcccgtgatggcggagttcctggcgaccgagggcccgacgcgcgtcgaggcgtggacccaagatgaaagccctaagctgattgcgtgggccgacggcggagggaatacttgctccctgcgactggatgctgcccgactgcgcttcccacgcggtatcaaagtcaaggcgtaccaagatggatcggaacaggcttccgccgaactatacttcagggactcgaactccccgcatcctcttaaccgcgacaacaagggtcgccttgcctaccggtccgtagtgtccgcaacggcgatccgagacgacgcaagcggaattgccgtcagcgggatggaaccgagcgaagccgttccatcccgaaccggattcccaatggaaaccgccgggcccctgccggacggggtcgtcgaggaaatgcaggtgccggtggttgcagccgccttgcagcgacaggcgtctgcggagacgtgcattgaaagaggctaccactattggatctgcgagacgcttccgccagggcgaccgcggaatacacccctggagcagcgctgcaacgggtgcggagcgatggtgatcatactccaccggggaactcaccaagccggcgtcctgcctcccttgcccatcccgataagccggttgagccagccagcgtcgccgcacgcgaatgccatagatgcaaacgagctcctcgatgccctttgcttcctcggatgcggtaattggggcaagtttcaagcgctcgcaggtctggggaacgatcccacgtcaacgtcagcgaggcaggtcgcccaggattttttcttgcttggattcctagacaccgaactcagcccgggctccagcgcgatcaagtcttggtgcgtgccaagggccaccatcaacttcatagatgatcgcagggcattcctgtcgggctttcggtcgccgaaccttctggatgccatcaagagggcaacgaagcagcatgccggaagggtatttgaggaggatctccccgggcgcccaagaatgatcttgttggacgggctggacgcaacgtcggcgaaatccgcgttttcgggcttgaaggatcctctagagcgcgagatagcgatcaacgaccggcctggcgacaagctggccggcgcttgccaaaaactggaaagtatcgcgtcaagcctgcgacaggtttcgatcggtaggcccaagagcctccaaaaatttgatgtcccaaaggctcgctggattgatgccggccttgcttcacgcgctggggcctatcggtggaacgagggatatcaagtctacgcttacgtggcaccgaacggcacggcttgggccggctcataccaagtggtcaagcttctcgcggcacgggcggagggagtttccctttggcaatacagcgaggcgcaagcaagtttccgcgcgaccctcggctgcgacccaccagggctgctgggtcgagtcctcgtggcgtgctcgggacttctcccgacgcttggacgcggcatcatctcttactcgaatatcggtccaacggttgcatcaagcgtgatgtccgcattgtccatggagaattttgatgaaggcgatcatagacgaagccaatccggctag

SEQ ID NO: 28252 - DNA, 5499 bp, Sinorhizobium meliloti 2011; identical to SEQ ID NO: 28249

SEQ ID NO: 28253 - DNA, 1323 bp, Sinorhizobium meliloti 2011; identical to SEQ ID NO: 28250

SEQ ID NO: 28254 - DNA, 2994 bp, Sinorhizobium meliloti 2011; identical to SEQ ID NO: 28251

SEQ ID NO: 28255 - DNA, 5886 bp, Sinorhizobium sp. GL28
atgcttgacccgctcggagcgttcgaacgcatcagagagctgtacatctcctatctggacacggcgttccgtgtgcgccgtccggccctcgcagccgagcgtagacgtctgctgcggacttccggaacgcttgccacggttccgttcctcgagccggtcccgcgctacagatcgtccccgttagcgctcgaagaccttgtcgacctcgaaagctccgaaaatccgatcggccatctttcgaggtccggccgtcgggctttcgcagaactggcgctctcgggcctttatccgggcctcgccgcggaaggcgaaatcacccgcaagagcatattcaaaccatacgaacatcagatggagatgctggcaaagggcacgcggcccggatctcccggtatcgtcacctcgggtaccggatcgggcaaaacggaagcgttcatgcttccgatcctggcgtctatagcggaggaaggcgtgaaatggagcgcgccgcgacccgggtatctggcgaacgcctggtggagggatacgccttccgagttcaggctacaccgcgagggggaggcgtcggatcgtcccaaggcgctgagagcgctcgttctctatcccatgaacgcactggtcgaggaccagctcagccgcctgcgcaggacactgacttccccggaagcgaccgcggtgatggacgaaaggttcgctggaaataggattttcttcggtcgctacacgggagccactcccgttgccgggcatctagttcatccgcgccgtcctcacgaccggaaggaacagaatgcggccgcgagaagagtcgcaagagtagccgcggcgatgtccagctacgagcgggaccaagaactggcgagggcgcacgatcgaaatcatccggacgacgatccgacccgatacctttttccgtcggttgacgagagcgaactcgtggcgcgctgggatatgcacgcgacaccgccggacattctcgtcaccaacgtctcgatgctcgggactatgctgtcgagagaagtcgaagcacccgttttcgatctcaccgcggaatggctcgagcgtgacgaaaacagctatttcttcctcgtgctcgacgaactgcaccttgtgcgcggatcttccggaaccgaagtgtcgggcttgataagaggcctcatcgcgcggctcggcctcgataggccggagcatcgccataagctgcgcatcctggcctccagcgcttcgcttcctctcgacggcgaacaaagggaaagaagtctgagatacctccacgacttcttcggtccgaacggcacgagcgagacggctgacgatcccggtgcatccggtccggaggattgggctaccgcgatcgttccgggaactccggaaataccgactcccgaaaagccgtttccgctggatggaagtcctttcagggcattgatcgccgtcttgtctgcagatggcaccctgatcggcaagatcggagaaacgtcggccgagctggacgccgtcgtaatcgattgcgcgaaggcgcttgtcgctgtcccaccacaagccgcggccgatgcagcgaaggaagctatcgaggcggcgtccgccgtacttacagccgcttgcaagaccgccgacggaaacaggctgcgcgccactggagcggaaacgcttgccgaacgcatattcggcgagaagacgcccgaggcgatgcaagccctgcgggggcttaccgtcctgcgcgggctgggcgacaaggcgcacgacctttggggtttcaagatcgacgagaagacgaccagcttccgcgagcacatcttcattcgcagcatcgaaggcttgttcgccaccccggtcgacacatccagcggcgtcgatttcgcgggcgtcacgatcgagcgcggaacgagctacggcaccgtgggtgacgcccatcagcggattttcgaactggtctattgcgagtcctgcggcgaggaattcatcggcggacgacgtggcgaaaccggaagaagcaatggcatctccgtggagttgttgccgtcttccccggagctggaaagcctcccggaaaccggggcaacaggaaactacgaagatctcagttatcaggacttcgcggtcttctggccgacgacgcgtcccgcgcagcaaggtgacaccaccgacgaggcctggagcgaagcgaccctggacacccggaacggtctcgtgctcgggtcggtcggcgaggggcggacagggattcgcgggcggttgttttgcctgcctcccaagctgggtaacaatctcaaggcaccgggctcagcagggccgaaatgctgcccggcgtgcggtatcgattacagcgggcgtagcgccaaattcaggcaatcgcccatccgaagcttccggacaggcttcgcgaagagctcccagctcgtggcgaccgaattgttttccgtcctccacgccagcggtgatctcgccaaggcggtggtattttccgacagcaggcaggacgcgtcgcgggcggcgctcgacatcgagcggcggcaccaccaggacagccggcggcagcttctaatcgagtgcctggaagcgttcgccgcggacgttccggcggagcgggaggcgcttcagacacgactaaacgacgcggcggcgaaaatggaccatgccgaaatgtccaaaatcctggcccggctcaccgccctcccgcaaaacggcgaaggtggccgggtgccgttgagcggtgtcgtcgaaacaccggtgcggacgggccaggtagtgacggacgaggctggcccgcttcttagccggatgatcgacatcggaatgcacccgaccgacgacgtcggaattgcccggataggcgagggagataaaagggaaggcttcgagtgggacgaactcttccgccaggaagacaagcttgtccgctggcgcgagcagcaagacgcgaacgcccttcaggcggcgcgaaccgaggtcatcaccgacatgcggcccttggtggacgacgtcctgttctccaagacgtacttcgccctggaagaaacagggctgggttatccatccctgttccccgcggagggtgccgaccacgatcgcttcgacgcgtacctacgtgttttcgccgacgcatatagggtgcgtggcaatcgttgggtcgagaaaaacgagcagcgcaaggaatggccgacggggctctcggttcaaaacaagcgggtaaaaacgctcgccgcagccgcggggctcaaggagccggcggaggaactcgagaccgtcatcgaaagactcagaagcctcggtcacggcaacgggttcatcgatccggaaaaactcttcgtgaggttggttgacagcgagcatgggtatttcgcgtgtaccaactgcacgagagtccatctccatcgtggcgtcggagtatgcacacgctgcgccgtagagcttcccaaggagccgacggggaagaccgccgaaatccgggagcggcacttccttgcgcgcagtatcgagcatgccgcggacgcgggtatcgaagcgttccggctgcggtgcgaagaacttacgggccagacgggatcacccgccgaccgcctccgtcgtttccgcggcattttcgtcgacggtcaggatggcggtcagggggacctgtacaggaaggcaagggagatagacgttctttccgtcaccacgacgatggaggtcggcatcgacatcggcgcgctgcaggcggtctatcaggccaacatgccgccacagcgcttcaactaccagcagcgtgtcggccgcgcgggtcgccgcggacaggcgttttccatggtcgcgacgctttgccgtagcagaagtcatgacctccactatttcatgcacccggaagccattacgggcgacgccccgccgccgccgttcctgacgtcggatcatctggccatcccgctcagactgctccgaaagttctggctgatcgaagccttcgatatcctgcgcgacgaatgcggcgaggattacccgggcgacgacgcgcgggcggacgtgcacggcgagttcgtgccggctcacattttctacggagaaggatcgccgtggccggagcgcctcgccggagctcttgacgcatcgatcggcgtgcgcgactcgtcggcgagggcgctggggtccggcatgccgggcagggaagaggaactgctccaggctctgacacccgagatcctcatcggcgagttgatggggctgcacgaagcggggtccggatccaatgccaacctcgcgagcttccttgccgaaaacggcctgctcccgatgtacgggatgccgaccagggtacgagacctgatcatcggcacgaagtcatccgatatcgggcaacccgaatgggataagatcgaccgtgatctcgatgtcgccatctacgaattcgcgccggggcagagcctgatccgcgacaagcggaagcacacgtcgatcggcttcgccgcgcccacgttgatcctcaacgatggcagaaagaacacggtgaacttcatcaccacgggcggcccgaactggtacaccgatcatgccaacatagccgtctgcgaagcgtgcggggcgaccaacaccgcaccgccggaagccgtccaggacaggcggtgctctgattgcggcaacgcgatacccgccgcgtcgtttgtcagatactacatgcctgccgggttccgaacggcgttcaggccgtcgcctctggaccaggacgatacggtttcgaaaccgacacgacgggaaacgtcttcggaaatggaagacatcaccgcagaccctgtaggcgggacgaacatgatgttcgcgatcggggacaaggcttcgatcatccggcgcaacgacggccccgtgaacgtcaacggcggtggcgacgggttcgtcgtcagggaggctgtgcagcggagcgttctcatgagggagacgccgcccaagctctggggcaataacctcaagtttcagttcgtcgtcccggacgagctcgcgaacacagtgaaatggtccccgccggataacggcggccttcccgccgtcgacgaaaccgtccgcttgatgtcgaggaagagaaccgactccttctacatgagcatgcggaccgtaccgccgcttcttgcgtacgatcgtctcggcggccggagcgtgtacaagacgagcatgcgtgcggccgcggtttcggcaacgcagcttctcctgcagcgtgcggcgctcgagctggatatcggacccgaggaattcgagaccctggaaccgcgactgcggggtggtctgccattgctccagatcgcggacacgctcgtcaacggtgcggggttctcaagacgactggccggatccgtcgggacgtcctcgctggcactgcagttggtgcgctccatcgtcgaaaaccccggcgacagtttggtgtcgccgtatttcaccgacgagcacaggcagacctgcaacaggtcctgctatcgctgcatgcagaggtacaacaaccgcggctatcacggacttctggactggcggctgggcgtcggttttcttaggtcctgcctcgacgagaactggaaggccgggttgaacggggactggagcgctcccgagatatccgactggctcgaaatcgcgtctcgatctgcggctgaactgcaacagctcgatccggtcaaccgtacgatcgcaacggccggaactctccaacttcccgcggttgtcgagcgcaaggggggcgtcgtgtcaaccttcgttatcgtgcaccccttctggcggctggacgacgcatcgacgaatgccgggttgctcggagaagcgctctccgatctcggaacgggaaacgtctacttcgtggatacgttcgaggcagcaaggcgtcccgtgaaggctacggagttcgcaaagctacgacctgccgaggcgttctga

SEQ ID NO: 28256 - DNA, 1152 bp, Sinorhizobium sp. GL28
ttgaccgtagtgtccgcgcccggttcaatctttgcgattgttacgctgattcccagttctgggcatgcgatttaccggggggcgtctgccgtgaatatagaagctatcgacctgttttgcggagcgggtgggttgtcctacgggctccaggaggccgggatcgctgtcaaggcaggactggatctggacggcaagtgctcgtatcctttcgaagccaacatggcgggtgccaaattcctggagaaggacctctcggagacaactggggatgagctcgctgccttttattcccggggttcggtaaagctccttgccggctgcgccccatgccagccgttttcgaccctgcgcaacggcagcgatcgccagacgagtaagaaatggccgctgctcaacgagttcggccgcatgatagaggcgctcgctccggacgtcgtgaccatggaaaacgtccccgtactacggggcgaggccgtcttccgccatttcctagacctactcgaatcgaacggttataacgttttctgggaagtggttgacgcagccgactacggcgtgccgcaaaggcgaaaacgcctcgtgcttctggcgtccaagatgggaccgatccggctactccaaccatccgaactcggaaccgagcgagtcaccgtcagggaagccatcggcgaccttccctccatttccgccggagaaagctcgccggacgaccgtcttcatcgggtaagggcgataacgcaactcaatctcgagcggatcaaggcttcgaaacccggtgggacatgggaagattggccggaacgtcttcgtctggcatgtcatcgcaaaacgtcgggctctagttacaagagcgtgtacggacgtcttgagtgggacaagccgtcgggcacgatcaccacccaggctcacaacttcgggacgggcaggttcgggcaccctgaacaggacaggccgctgtcgctgcgcgagctcgccatactccagtcctttccggaacactaccgtttcgtcgacgagggcgaagaggtcgagttctcgccgctcggccggctcataggcaacgccgttccggtaaagctcggaaacgcgatcgggcgttcgatcgtggcgcatctcgaacgttacggaaacgacggatccgccaggaactaa

SEQ ID NO: 28257 - DNA, 2565 bp, Sinorhizobium sp. GL28
atgcccgccgccaccacgcttaccggcgcagactggaacgccaggctctgcagccattacctctcttccgacggcccttacggcggcgtgccgatgacattcctcgacgcgacggttccggagttggccaatgcgtcgggcgaagcctggtcgggcgacgaggcgatgaactccttcttgagcggattcggtgtgggcgacgtcacccgatggctcggcagggacgattacccgttgcgtgataaagaccagccgccgtacttccgttatctcgtgctgacttgcgttatcgcggtcaacgatatcgccggcgtcgaccgcgggacgcataacttcaggcgtcggctcgggcagaccctgggcatagaggagcttcagaccgtcaacggcgtgaaccgtctctggcgggcacttgccgactggagcgcgcggcagaggcgtaacggtctagcggtgcgtgagatcgtattgccggactacggcacgatgaacctaatcgggtatgcggtacgtatggctttcccttcatggagggatcgcacccagttcacggcgatccttaggggcattcccgaagcggtccggatttccccgggaaggctcgtgggagagctttcgagggcccatcggacgctcgacattcccaaagcgatcttcgaagcactaaccgatttcggcacgcggcgaatgtccggccaaaccatgctcgacggacatcgtttctggtcattggtgaaaagcatcgaggcagaactcgccctggaagccggggagacccctcatcggcgggtttccttggaacttcgcttcggcggctacggacaggacgaacccgaattccgcctggtcgatcaaacggcagggtcggccgatgcgacaccggcgggcgacggatcctggctcgacacagcggggcgtattccgcgcgatcctcgttccgccttggcgaaagcccttgctcggggatacgcgatattcaaacgctctgccgggtgctgggtttgtgacgacgccgggatagacacgaacgacatatgcatgatcgtggccgccgacggctccgcgccgcggtcgtggcgcttgacggcggcttggagcgagatcgggccggggtggtggctttcgaagcgcgtggacggatccgacatcgtcaggctgctcggaatccacgatccgggggtccgtgagctcgatcggccgaagctcgcaggcggcgttccgctgaagcgcggcgtatatctcggccgtccgggcttcctgccccgcgtcgagcaattcggtgcggggacggtggcggcaacctgcctcgtcggctcgcacggtgaactcgcggtggccgacgacggcgtgctgacggcgacgcagccgctcgacggtatctggcgcgtctccgtcgcccaaggcggcaacgccctcgacattccgttcgctctcgaacgcaatgccgcggagcctgccgtatattcaccgcctccacgggcggacagatggcagttcgaggaagagttgagaaacacggtcccggcaaccgttccttgtcggggaacactgtcggaatctgagtcggtggagccgacagagacgatttctgctctttgtgaggcgatcgtctcgcgcgcgggctcagggtggcgagacggcgatctggtcggtctcgtcgaaagtgcctacccgaaatcaccgatcatctgggatatcatacgatcggtccaggaagccggctggctggacgcctactcgtcgacgagctggcgggctcggttctggcggtgcagaccgcccggcatcgtcggcatcccgggtggcgacgcggtggtggacggggcaacgggcagtgcggcgctcgatcgacttcgtgaaactgccgatcgcctcggcgtcacggtcctggtgcacaatggtatatctccgaactccttgccgacggtccgactttcgggacccggtataggcaagctctccgaagctttggcgtggccgatgacggtgctggagggccttcccagcccgtcggatcagtggattgaagacagccgcacgccagaggggcggatgcgtacagcgatctggtcacacgaggtcgggctttttctggaatacgaccgcgatcccatgccgatcacggtcgaatgctgggcgcgagagcggcgcgacgagcccgatctctacgtggtccgggatcggtcgggcgtgttgcggaagactcgaagccgcgtagccgctgttttggaaggacaccgcctcaatcgcgtcccgcttttcagcaagcgggaggatcgcgtcgtcagaacccggaagtcggggcacttgccgctgccgatcgccagggcgatgagatttcgctccctccgagcttccggggtctcgccgggcgaagggccgaaccgggagtactcctattctccagatcgggagatcgagatgtggcttggaaattatctcggcgcggctttcgagaccggggcggcgagccgtcccggaaccacagcctcggaagtcgaatggaggcatcgaggtggacgacgccccgcatggaacgcatacccgatcggatacggtagatga

SEQ ID NO: 28258 - DNA, 1920 bp, Sinorhizobium sp. GL28
gtgttttcgccgaaccatccgcaaggcgcaagcgaggcgttcttcgctttcgacgtcaccgaagtcaccgacctcacgaagcaagacaggttcaggctgcagaccctgcggaaagtggaggaagttctcgactattcggatcgcgatcccgaggacgttcgccgaatcttcgttgaacacggcgtctcaggacgtaaggccgacagggagaccgtcgtcgtcgtcctaccggacgacctatgtgtccgcatctcgctcgtgcgcgacgggaacgggaagaagagcgtggcggagcttatcgacctggccgacctgcctctttattcgttcgaccgctccttgttcgccggggacaggatcgacggctgctggtattccgttccggacgtcacggtcggaccggagcagggcacgatcgactggtcgctcgacaaggattttctggcttcccttttcaagcagctgaagcgcctttccgcaccggaaccgggagaactccggtaccccgcaaccaggtcccaaatccacgcgttcctgaccacgctcgaccgtcacggtcttctaccggccgacgaggaaccctggcgctcggacggcgaaagggttcgtcgtctcgcgtccgatatgcgtttcgaagtcgatgaaatcgaagaactcgtgcacatcctgagttctctcgcaccagtagaggaaaagctttccgaggccctcgacgagaggcgcagagcgctcgaagtcgaacttgccgcgagcgtcgaggccgatgtcagagcggaagtcgaaacgcgttacgaagctctttcggcgcgaaacgccgaactcgacgagatgctatcgaaactcgccgtcgaaaaggctgcactcgagggaaccgtcgccgaactggccgaccgtcgcgatcgtacgcaacgggaaatccggtcgttgaccgccaaggtgacgtctctgatcgaggtccacgatgacgggcgagagttccgagcggatcgtctaattcaagacatcgagaaggtattggggggcgagaagcccgcggtctcgcgcgtaatgcccgggcaaccgcgctcccagttgccgcctttcgattacgatctggcccctgtgccgtgggaacgtttgaacgaggaactaggcgctgccgcgtcgcagcacgggttcgagccgcgggatatcgagacgctggatctcctggccagatcgggggaggtccttctcatctctccggacgtcgcccgcgctgtcctgcggtgctacgcatcggtggtcgcacaaggcggtttcgccgttcagtcgctggatccttcgacgatcggctacgacgatctctggcgctctcctgcccgggaaacaccgaccccgctgtcgcgtgcctgggccgcttgtgcgaacgaccgttcggtggcccgactggtactgttggagggcatcgaaagaacgccgctcgacctctggatacgtccgttgatcgagacgctgcgcggacaggaaaggccgaaaaacctcctggtgttcctatcaatggcttccgcgactatcgaccgcgaccgcagcgtggccgatctttcggagttcgtggtgcccttcaagacgcacgaccctacggcgcttagccctgatttcttgaggaacctgctcggagacgcggagggccccggactgtggttcgatttccgggccaagctcgcggttgcgcgaaacgaaatcggaaccctgatgagcgcggacttcggtccatccggaaaaaaacggatgccgctcgcgctccgggcttctgtcgcggcacgcggtaccggaattgccgatgtcgaaaagaaggtccgaattctttgcgagaacctcgacgctgcgccggccgacgctgccgatcgtatctggagcctcgaactcggcagggaatacctgcgaacgctttcaaattga

SEQ ID NO: 28259 - DNA, 5550 bp, Streptomyces auratus AGR0001
gtgcctggaaaaaccaactcccttgatatcaaccgttcgtttgagcaactgcgtagtgccctcttccgctactacgacactcccttcaggctggcgaacaagaagctcaggaaggagcgccgtgacctccttgacgtagacggcggcgcctggcgcaggccgctgatcgagattcgcccgcagtacaaatcctgcgggacggacatcgccggatcagttgcggcggccggagcgcccggggaactggccgagctcgtcagcgccgggttgctggagggaatcgagaagatgcactcccaccagcatcagtcgctggtggcagcagtccgggacggcaaagacgttgtgatcacagcgggcaccggctcaggcaagaccgaagcctttatggcgcccgtccttgcggaacttgtccgggagtccgctgcctgggtaagcgggactcctgcgcaccctgagaagtggtggtcaggcggcgatggctcgtatgtccctcagcggcgcggcgaaacggggcacaaggccgcggtgagggcgctggtgctctaccccatgaacgcgctggttgatgaccagatgatgcggctgcgcaaggctctcgacagcgatgcggcgcggcagtgggccgataagtaccgccgcgggcaccgcttctatttcggccggtatacaggagctaccccggttacaggagaccggaagaccaagcaggcggtagcaaaactccgcaccctgctgcatgagaccgagaagcggtcgaaccgtgtcagggaatccgcgggtgaggggaacgaccagtactttgtgccgcgggtggatggcgctgagatgaggtcgcggtgggacatgatcgaatccccgccggacatcatgatcaccaactactcgatgctgaacattatgctccagcggcccgatgaggaggctgtcttcgagcagacccggcagtggctgcaggaggaccgcggggcgaagttcacgctcatcatcgatgagcttcacatgtaccgcggcacggcaggtacggaggtcgcctacctcctcaggaacctccgcagccggctggggctcgatcagcacccggagcagttcagagtcctcgctgcatcggcctcgcttgatccgcagcgggacggtgattttctggaggagttcttcgggatcccgcaggcccgcttcgaggtgctcggcggggagctcgacctaccgatggcggaatcagctgatatctcggaacatacggggacgctgagcggaatcggggatgatattacccccgctgggtctgctcgcgtgctgcaggaaaccggcgggcacctggctcttgtcaaggctctgtatgacggggtcgatctcgtcgcgcggctggacagggacgctgccgggcttctcttcccgcgagcggacgaagagtcaagagcagcagccttccaaggccttctcaccgctctgcggaccgcagatgagacggtgactggaccgcttcccaaactgcgcggtcaccttttcttccggaacatccctgggatctgggcctgttcagacccggactgctccggcgtcgagcggacggagggggacgaccggacggtgggcaggcttttcgcgcggcccacctcacggtgcagtgcctgtgcgtcccgcgtgctggagttgctctactgccagaactgcggagatgtgatgcttggtggttacgcctcggcgtcgtcgattgccgccaagcgcttcaacggcgggctgctgcccgacctgccggatctggaggcgcaggctgagggcacattgctggacgcgagcgcggcgaactacgttgtgtactggccgcgcacggaagagcccgtgattgacgccaccgacttcgcatgggcgagatcgtcggaaggtggcacatacagcgcagagttcaggttcaaacgaagcaagctcagtccgcgcacagggcatctggccaatacccgtgaccggaacgagtcaaccggctggtcgttccatacgaccgtcccccagccagggaaaaggaagcaggccctccgcctggagcagctcccggctgccccaacccagtgccctgcctgtggcgatgactgggagacgcccaggatcaaatccgaggcgctcagcctgcgagaccggcggcggatgaggacacccgtccgaaccatgcgtactggtttcgaaaagatcaaccaggtgctcacgaccagcgtgctgtcggaactggacaggaagaaggcggtcgttttttcggacagccgccaggacgccgccaagatcgcggctggtctggggctccgtcattatcaggatctgctcaggctgctgctcgctgagcaggtagccaggcaaggcagccccgccgacgacgcagagctcgtgcggaagtacttcaagcgcgagggtccggcagatactcagagggccgcggaggcgcttgagcggatgtgctcgctcgacaaggaagcagtggacgagctgcgggcaatctggaatgcggacccgatcgacggagtgccggatcctgctcgcgaggaagaacttctggctcatctcggcaagttcccgagcctgaaagctcatgccagggcgatggagaaggctctcgttacgcgcggtgtgaatccaggcggccccaaggaaagcctggagcgtgtggcgcggcagaagggggcacctgatcttgcctggacttctgtttatgactggggccggactccggtcgagccccggacggggcttggagagcgtcagaaggatctcctgacgagcatcagggagtcactcagcagcgagatgctcggcggccttttcggcagcgctggaagggactttgagtctctggggctcggctggctgagcctcgcctcggatacatctccccttgatgctgaccccttctcggagacagcgcttgtgcggtccagcctgagggtgctcggtcacctccgccgtttccaggggatgcgtaccggggcggccgaaccgcccgccccattgcgagccttctggaaagcggtcggtgagcagacaggccaggatccagaggacttgcgcactcgagtcgagcgctccatccgcgacgccgcgcctcagtacgtcatcaaccccgaaaaggtatgtatccggcccgccggtccggacatgtggatctgcttgaagtgcaaacggaagcatctgcaccgtggcgctggtgtctgcaccaagcccaagtgcggtcagccgctcccaagcgagccccggccggtaacaagggcagaggacgactactacgcgtggcaggcggctaaaggggatggctggttccgcctcaattgtgcggaactaacgggtcagaccgaccggctggacgctcaggctcgtcaggcacgtttccaggacatcttccttgaaggcacagaaatcgaagggcctgacagcgttgatgtcctctcagtgaccacaacgatggaagcgggggtggacatcggctcgctggcagtcgtgctcatggccaacatgccgcccacgcggttcaactaccagcagcgcgttggccgcgcggggcgccgcgatgcgcctgtggcgcttgcgctgactgtctgccggggccgcagccatgacgagcactactttcaggctccagagcggatcaccaacgacgaaacgccggagccgtacctctcgacagatatgccggatatctatcagcgtgttctcgctgccgaggtgctccgccgggccttcgcggcggccggtggtctggcggaagacggtgaacagctggacccgacgcgcaatgtgcacgggcagtacggtgccgtcgcggactggaagagggtgcggcagcccatcagcgactgggttaaccggagcgagccggagatcgcggccgtcgcaacggcgcttgccgcgcatacacgtgttcctgggcaggcggcacgggcggtccgctgggtccggaaccggcttatcagtgagatcgacgcggtcgctgatgccgggcacggccacggggatctcagccagaggctggcagaagaaggcctgctgcccatgttcggctttcccaccagtgtccgctacctctacacccgcaggcctgaaaaggcgtatccctggccccctgctggcgtagtcgaccgcgggctgcccgtagcggtctcgcagttcgcgccgggggcggagactgtgaaggacggggccgtgtacacggcgattggcgtagcggacttccggccggcgggagcccatgtgcaagccgccgccaaccctctggggcccgctcggcacatcggcctctgccgtgcgtgctcccacgtggaggagctgatcacgaaggagatgtcagaggagtccgcggagccggagccgctggaatgcccggcctgcaagagtgccgatggtttgtacactcatgtcgaactccgccagcctgcgggcttcttcgcgcctccggtcatgcccttcaaacgcgacttcgacgggaacttctcctggcgagcacgctcgctggccccccggaccggggcaaatctggaaacggaagcgaaaaagcgggagatcggcccggacagcattgccgtgcacgccggcaagggacgcaggtacgcggtgaatgacaatggcggcagcctgttccagttcgcaccgctctctacctccgaccggtggtgggccggagcctacgcggacgtcagtgcgaccgagcgggcaccgtggctcaaggtgcagccggagaagacagtgaatgtcgccctcggggcggtccagcagacggacttgtttctcttcggtccgcgtgagcctgtcgtccgtgaacacgggtaccggctcgacctgtccccggtacggcaggtcacgggatttccggacgaccgtacgggccgcaaagccgcgtggtattcgctggccgcgctgctgcggaagtccgccggggagctgctcgacatccaaccttcggagatcgccgctggcatccatggcgcggtgaccaaggacgtcggagccagggtcttcgccttcctttccgacactctcgacaatggcgctggctactgcacgcacctggccgagcctgacacgttcgaccgtctgatgaagagcacaggagccctgctggcgaagctcggtgtaggaagccatggggaggagtgccggggagcctgctatgagtgcctgcgtgattacacaaacatggcctaccacccgctcctcgactggcggctggctgccgacctgctggggattatgaaaggcgagaagctcgatgtggaccgcgagaatgcccggacgctgctggaaagctggacggctgatacggcggaggccgggcccgtggtggatctcgacagccaccccgtggtcattttcgacagttcggtcgtcgtggcggtgaagagccccttcgagacggtgggcagggacctggagagcaagcggatcaccctggtgggtgatgagatcgctcggcaggagtgggacgtgaagtcagtggtctttgtggatgactttctgctggaacgcgttccctcccgtttcaccgtccagttgggcaacttcctgaaccagtag

SEQ ID NO: 28260 - DNA, 1218 bp, Streptomyces auratus AGR0001
atgaccaccaccaagaggagtctcacttcggttgagatctgcgctggggcgggagggcaggcgctaggcctgcacaacgcactgttcaggcatctcgcgttgattgaaatcgactccaatgctgtcgctaccctcagggcgaacgtggaggggaacgcagagtgggagggctgtgaggtcatccccgctgacctcaccaagctcgatccgctggagctgcggaagaatctgggcctggaaccgggcgatcttgacctgctggccggcggtgttccgtgcccgccgttctccgtagccggcaagcagctgggccgggatgacgagagggatctgttcccgacgatgctcaaactcgtccgggaactcgagcccaaagccgtaatgatcgaaaacgttcgaggactgctggaacctgcggagaagttccagggctaccgcgaggagatcctcgacaccctcgatctcctcggttacgggaagtgctactgggaggtgctggaggccaagaactacggtgttccgcagcttcgcccgcgcgccattctggtcgcgatgaagaagtcgtacatcccgttcttcgagaacaagaagccggaagcctgcccgctggtaacggtgggcgaggcgctggaaaagtccatgcgccatcgctatgacgcctctgacgatccgcgagcggatgagcagtttacccggtggctggaaaaggcatcgaaggatgttgctccgactctcgtcggcggttccaagaagcacggcggggctgacctcggccctacccgggcgaagaaggcgtgggctgacctcggtgtctgcggcctaggtgtcgccaatacaccggaggaaatgaaggccaaggacagtgagcagcgggatctcttctccgccgctggccccaagctcactgtgaagcaggccgcgttgatccagggattcccggagaactgggtgttcacggggaggaagaccacggcctaccggcaggtgggcaatgcctttccgccaccggtagcagaggccgttggagtccaggtcagaaccgccctcgaagcagccagcagagcaggagttgaggcaccggtccgggaatgggagaggcggaccattgccaggcagcgtgacagcgagctcctgttcaggatctctgatatctcaactccgctgagcgcggagccggctgaccgtcgcggcgattgcgagcgcgcagtcgccgggtga

SEQ ID NO: 28261 - DNA, 2118 bp, Streptomyces auratus AGR0001
gtgctcggcgtgaaccgggattcggcatacgaccaatggcagagcgtgcttgagcaagagttcttcggtccgcacatgtccggctatgcggcagtcttctacgtggacgagtgtgcgaagcgttcactcatggacgccaacagccagctggcggagttggctgaagcagtgagtgcggagctctattgggaccgtcctactgggatgttcagtcgactggagtggcgatgccgcctatgggcggccggggagcagagggacgcgccgccggtgcttcctatgctcgcaaccagtgtgctggctgcctccaagatggcagcggagggggacatctcgtcctccaactactacaagcgcctggcagaggtcttctgcgccggaagccgtgagcgagacagcctccgggcctatttcaagcctgtcgccgacatgtgggagacgctggatacctggctggagtcgcgcggcggcgaacggggctacagcacgatctcgcgcgacagtcacctgacgcgcatcggctatccgatgtcccaggctctgctgcgtgagcaggaccggcgaatcctcacggccttcttcgcggccacgggagtgaagcccgcgagcccggaggagttccccgggcaggagataatccggcgtctgcgcctgtggacctcgtcgcagtcgcatggcttgtcccggcctctgctcaatgtgctgcacgggaacggttccgggagcgacggcgtggaaaagcgcgaggtactggtcaggctgctggaacgcctcgtcgagcactgggacggcacgctgtacgagcgcggtgcgggtgcccgccgtgcggctgccttacggctggtgcttgcgggaaggggccgccagctgcgctgggcggcgggagcggtgcagggcataccggcagcggcggtgcgccacgagagttcgggggtgcgctacagcctttcggagccatatggcggcctctattccggtcttgaagaacttgccgtcacgaaccatcaggtggcacacggacttgtactcgagggtgacgagctctatctgagctgggttcctcagccgttgatcttcttcacggaggatgaatacagcggcgacttcgtcagcgtcgcgagcttcggtcccggccagccgcacattcttatggtcccggacagtgaagtcagcgccgtgcgctctgtcctgagcgagattgccgacggcaggaggatcgccgagcacacagcccccctcgtcggctggacgctgatcaggaacgtcgatcttgacgccgcagtcaccccagcgactctcctccggggcggggtgccgcacgccgcgcacttcatgccgtctacccgccatggaatccgcttcgtcggcggcctgagaatcggcagggatctcggctctcaccactatcttcagggcggagtcccagactggcttcttcctcgggatatatcgcggggtgaggctactctgcaggtaacgctcaatggcggtgggggaagccacacccacgacttccccctgcagaaggtcctcaggcccttcccggcgaggctcattccgctcgctgacgggacgtaccaactgagcgcgccagagagcggcaaagcgacctttacggtttcatctgcgttgcgtgagcggcaggcgccggacgctgggagcatcggccaccgctgtgatgcgacggccgagactgaggcggagggggctggcccgggagtaaaggcgatccggggtgcgaacgcaccggagaagctgagcctgcccaagaccgtgatggtcccccgccgggtgaaggagcttgtactcatcggcgcgaagggggagttacagcggctggatctgcctggcataccggagtggatgcacgaacgccttccggatgaggcatacggctactgtgccgaagtgacggtccccgacggatgtgtctgggcgctccagcgctggcagaaccgcacgaccgtgagatgcctgaagcgcagcgggccgactctccgtccggaaccggcgggagacgctacggagtgggcggaagcggtgctgtccgcagcatcagcagaaagcggcccgctgtgggacgcgtacgtcacagcggctaggacggttctgcggtga

SEQ ID NO: 28262 - DNA, 5574 bp, Streptomyces aureofaciens
atgactgataccaacaccacgggcagcggcccggatcagcgctccctcgacatcctgagaaccttcgacgaactcaagaccgctctgttccgctactacaacacccccttcggtctggccaatcgccgcctggagctggagcgggaggccctgttcaacaccccgggcggagcctggcagcgaccactgctggaggtccgcccgcgctaccggtcggccggggttgacttggcggggtcagtctccgatgcggacgcgccgcccgaactggccaagctgatcggactcggcctggtcaaggggattcccgcactctacgagcaccagcaccacgcccttatcgcggccttcagggatcagaaggacgtagtcgtcacagccggcaccggctcaggcaagactgagtcgttcatgctgccgatcctcgccgacctggtgcgtgagtcagcctcctggaagcccgccaggcttccggtcaaccgatggtggaacattccgaatggcccataccagggccagcgcgagggcgagcagggacgccaccaagccgttcgcgcaatggtgctgtaccccatgaacgccctggtcgatgaccagatgatgcgcctgcgcaaagcgctggacagcgatgaggtccgggcctggtttgcgcagaaccgtcctgggcatcgtttctacttcggccgctatacaggcgccacccccgtgcccggcgatgtacgctcaccgagcgggcagaagatcttgcggcgcgaattcaccgagaccgagaagcgcgcccggcaggcccagcaggcgggagatgacaagaggttcttcgttccgcgcctcgacggtgcggagatgcgcagccgctgggacatgatcgagactccgccggacatcatgatcacgaactacagcatgctgaacgtgatgatgctccggccgcgcgagtccgggatcttcgacaagacccggcagtggctggaagaggttcccggcgcgcggttcacgcttgtcgtcgacgagcttcacatgtacaggggcacctcgggaaccgaagtcgcctacttgatcaggaacctgcgccacaggctcggtctggaccggcatccggagaggttccgcgtcctggctgcctcggcatcactggaggccccgcgcgacctcggcttcctcgaggagttctttggcctcagtagggaccggttcgaagtcctcggcggagaactggtgcttcccgtcggcactgggagggacctgtccgcgcatgcacccgcactcgcatcgctgggcactgatccggagcctgcccaggcggacgaagtgcttgctgccacgggcgcagcggatgccctcgtgaacgcgctgcgcgacggcacacgcctgatgagccgttccgatactgacgtcgaggacctcttgttccccgcggtcgcggaggacgggcggaagagtgcattgcagggactgctcggtgcgctgcgcactaccacgctcgccggaatgcccaccctgcgcggccacttgttcttcaggaacatccccggcgtatgggcatgctcggatccgcagtgctccggcgttgcaccggaagcagcagaagaccggacggttggccgtctctacccgcgccctgcctcgcgctgcgacagctgcgaagccagagtgctcgaactgctgtactgccagaactgtggcgatgtattcctcggcggctacgcgcccgagaaggcggtatacgaaagccagggcaagcagttcgatgcaggcctcctcgccgacctgcccgatctcgaccagctccccgaccgcgccgcgaccggccagtctgctgcgaattacgtggtctactggccgcgtacccaggacccggtggtcgaccgccttgagtggaccgctacggcgaacaagggtactgagagcgctgagttcgctttcaagcgaagcgcttacaacccgcggacgggtcggctgacgaacagccggaaccacaccggctggtcattccataccgacgtcccccgctccccgcgcggaaggcagcgactgtgcctggaaagccttcccgccgcgccgaccaagtgccctgcctgcggtgacgactgggaactgctccagatcggtcgggaccggctccccctcagcgaccagcggcggatgcgctcgccgatccgggccatgcgaactggtttcgagaaggtcaaccaggtcatcaccactgcgatgctttctgggcttcctgagaagaaggctgtcctcttctccgatagccgtcaggacgccgcgaagcttgctgccggtctcggtctgcggcactaccaggaccttctgcgtcttctgctcgcccaggaagtcaccgaccagggcgatcctgcggctgatctggccgccgtaagcgcctactacaagggtgaggagacgggtccagaggccaagcggttggccaccgaagcaaggagccgtctcaagccacgtgccccggaaacctttgcggcttgggaaaagctccagaagccgccaacacctggcggccttgacgacctcgaagacgaggacccacggcccgaggaagagctgtacgccgagctcagccgtgtccccagcctggagagccacgtcgccgagatccacgagaggctcgcagccctgggcgccaacccgggcggtcccaaagcgtccctccagcgcacccggtaccggacaggccaacccacgtccagctggagctccctattcgactggcgaagccaacgcccgcgcgaggtctccgatcggctgctcaacgacagccagcgggaccttcgcgaggagatgggtgaatcgatcagcgctgagctgctcatgggtctgttcggtagcgcagggcgcgacttcgagtccctcggcctgggctggctgtgcactgccacagaccaagcgccgcttgaagccgatcctgcatcggacactgcactcgtccgagccagccttcgcgtgctcggccacctgcggcgctttgccggtatgcgcactggacaggacgagcccccgaagaagctcgcgctcttctgggccaaggccgctgagcgcctcgccataaccccggaggatgtccgcttcagggtcgagcgcacctggggagaggccgtcgtcaagtacgtcatccagcccgcgcacacggccatcaggcacggcacagcccagtcctggacctgcgagcgctgccagcgccgccacctccaccccggcatcggcatctgcaccaagtgtggccaggacctgcccaagaccccggagccgtatgacggcgccgccgaggactactatgcgtggatggcccgtgagcgtgtgggccgattccgcctcaactgcgctgagttgaccggtcagacggatcgcatcgaagcacagtctaggcaggctcgcttccagggcgtcttccttgacgacaccgagcacgaccttcctgacggcctggacgtactgtccgtgacaaccactatggaagcaggcgtggacatcggtccactgtcggtcgtgctgatggccaatatgccgcctacccgcttcaactaccagcagcgcgtgggacgtgccgggcgccggaacgcccccgtcgctattgccctgacggtatgtcgaggccggagtcacgacgagtactacttccagaacccagctcggatcaccaacgatccgaccccgcgcccgtacctgtccactgagatgcccgacatctaccagcgagtgtttgccgccgagatcctgcgccgtgctttcgcagcggcggccgacaacggagacatcggcgcagacccgacccgcaacgtccacggccaattcggtctgagtacagactggcctgatatccgcgctaccgttcagcgctggatcgccgggcacggagctgatgtcgaagctgttgccgaagcgctctccctcagcacccgtggcgggcgggccgctgccgagtggcgacagtggtccgagacctttctggttgcggttgtcgacgagatcgccgctcgatctcacggtcaccgtgatctgagccagcgcctggccgaggcaggcctgcttccaatgttcggattcccgacctcggtccgatacctatacacccgcaagccccaggaggcctacccatggccgcctgcggatgtcgtggaccgcgcgctgccgatcgcagtctcccaattcgccccaggtgccgagaccgttaaggacggcagcgttcacaccgccgtgggcgtggtcgcctacgagccgtcaggcccagcccaagtgcgcccagtcgctgatccgttgggaccggcacggctgatcggtctttgccgtgcctgcggtcacattgaagaagacgcgatcccatcacaggccacggtgtccacccagcccgtggacttcccctgccgtgcctgcggagcagcggacggctcctatcaggctgtcgaactgcgcgagcccgccggcttctacgcgtcgggcaagcgcgacttcgacggtaacttcgcctggcgagctaggtccctcgctccgcgcactgccgccaacctcgaaaccgacgcgccccagcagcctctccctgtacccatggcggtgcatgcgggtaagggccgccgctttgcagtcaacgacaatggcggtcggctctttgagttccacgcgctcaaaccgaccgcgcggatctggaacggcgcattcgttgaacaaggtgccgttgaccagtttccttatctcaaggacgacatcgcaggcctcgagcccgtcaccgcagctatcggtgccgtccaggtcacggacctgttcctgctcggccccatccgcgctgaactgcccggtccggggctgcgactcaaccttgcttccccggcccagacgagtggatttccggacgaccgttcaggacgcaaggcggcctggtactcactcgctgcgctgctccgctcagcggcgggtgccctcctgcagattcagccgaacgagatagcggccggtatccacggcgctgtagtccctggaaagcaagctcgggtcttcgctttcctgtccgacactctcgataacggagccggctactgcacacggctcgcggacccggaggagttcacggcgctcattgcaaaggccgctgagatggccaccggcttcgccgctggcagccacggggctgaatgccgcggctcgtgctaccagtgcctgcgcgactactccaacatggcgtaccacaccttgctggactggcgcctggccgctgacctcctcgcggtactcaacggcgacggcctcgacgccaccacactctttgcccggtccgggaagctgctgcggaactgggccgaggacccgggccacacggacgcggaatttgtctccgatctcggaggcgccggacctgcggtgctgtttgaagatcggttgtgggtcgctgcgaaacatccgttcgaggcggccgatgcgcgactggagggtgcccggctggctgctgtgcgcgccgccgctcgggaggagacccctcacgctcccgacgtcgtgtttatcgacgacttcctactcgacaaggtccccggcaaagtaaccaccctgctcgggacgttcgacctgaagtga

SEQ ID NO: 28263 - DNA, 1218 bp, Streptomyces aureofaciens
atgccaggattccacagctcatcgcgcgaccagatccgcatcctagatctgttctccggaggcggaggcttcgcagcagggttccgctcgttctcccggggaaatcctggcgcagcagagttcattccggttgcggcggtagaattcgaccgcgctgctgctagcacgtacgcagccaacttcagctccgcgcatgtgcacgtcggcgatatcgaagggttcgatgcctggccgctttccggagctgtagatgtcgtggttgggggaccgccctgccaagggttctcccagctcgggtccggccacgctggggacccgcggaatcgcctatgggaggactacctccggttcgtcactaccattaagccaaaagtctttgtgctggaaaatgtggaccgcttcattaagtctgacgagttcgaagagtttctggcagccaccgagcgaggacagccactgggcgaatattcactggctttcggtgttctaaattcagcggactacggggtccctcagtcgcggcgccgcaccatagtcatcggcacgcacaaagaccttacactggtcgatctcccgcgtccctcacacaccaagagccggaggcttctcggcaagcgggctgatccagcgctgttcagcacctcgaccggtgccgggctgaagccgtgggagacggtcgagagcgtatttcaccggtcctcgcgcaagaagatacaaggcaccgagctgccgtcccgccaggcagaagtgctaccaggcatcgtggtgcccggcgcctaccggaccgccgatctccacgtcggcaggaaccccaagccgctctcactcgccaggtacgcagccatccctccggggggaaaccgctacgacctccgcggaaagacggccctcatcgatgggcgtgagctcgcgctctccacggcctcttgggataaccacaacagcggatcagccgacgtcatgggacggcttcgcatcgaccggccctccgtaaccatcaggacagaattcttcaaacctgagaaagggcgctacctccatccgttcgaaaaccggccaatcacccactacgaggccgcgctgatccagggattccccgaggactaccagtggtacggaaccaagctcgaaatcgctcgccagatcggtaacgcggttccggtaggactgggttcagcgatcgctgaatccattcacaatcacctgcaactccggtag

SEQ ID NO: 28264 - DNA, 2139 bp, Streptomyces aureofaciens
atgctggtgcggacatggcaggggtgccggatgggcgcgttgtacgggcagtggcagcagattctcgctgccgagtacttcggcccggacagcgccgagcagagtattgcgttctacgtggacgacgaagttggtcaggaacttgcccagcgcccggatgtaactggaagcctgccggaggccgtaagggaggagctcgactgggctcgtcccgagcatctcatgtggcggctgatggagcgctgccgccgttgggagtcgcgggggcgcctgggggcgccgccaagtctcccagtgcttgcctgttccgtgcttgcagcgacgaagatggcgtcctccgacgggatgcgccgcagcaactactacggccggtgggcccagctgttcggtgagcggcccgggagcccgcgcgcagaacggcttgaaggggcattcgaagaggtcgtgtcgatgtggcaggagctcgaccggtggcttgaggacgcggcagggctgtatggcgctagcacaatcagcactgacggcttctaccggaagatcggctacccgctctcgcaggctctcatccgcgcgtccgaccgcgaggcactgactaggttcttctcggcgagcggtgtgcttgccggcaacccggtcggcgtccctggccgtgagctgctgaggcggctgcgcctgtgggtggcaggccgggaccggaacctttcgcctcgcctactggaggaggtagagcttgcaacgggtctcgccgacaactcggtgccgctgctcgcggagattctctttaggcttgcatcccagtgggacggcacgctccatgagccggggcgggaacggcggcggaaggctgcgccgcttcgtttggtactcgccggacggggagaacggctggagtggacggcagatgtggcgccggggctcaacaccgtgcaagtcgggttccctgagggtcgctccttcctgcttaaggctgtctacggaggggtgtactccggattggaatcggtctttcccagcgatgtgcagcttcgccagggcgtgcacctgacgggcgacgagctggtgctcgactggtccggccgtgaggtcatcctcctacggatgcacgagcgcctgggcgagtgggtcagcacggagtacttcgaacccggcgcgcagcatctgattctggcagcgccagccgctacggctgaggtccgcgcgatggcgctcggccttcagtcgagacctgcgcgtgaggttcctgccccagttccgggctggaagttgttcaagggcgtcagggcgttcgacggcgccgcattcggcagaaccctggcgcgcggcggggagcacatccacgtcctggagccgccggtcagagagcaggccgagctcatcggcggactgcggatccttcgcgagtaccgggccggaggacggttggtcggacactacctgcggggcggtgagccggacctactgctgcccacgagcaccgccgaggacggtcgcgtcaccgttgtactgaacgatcggacagagcggcttgccgctgactcgcgagtgccatttccacttcgagttctgcggctggaggaaggggagtacaccgtagggaccccggacgccgtgcggacgttcactgtctccggcggtatcagcgagggagtcccagccggaactggatcgcttgcctgcgtgcgcacggagaacgcaggccctgtgatgcgcaactttgaagggcagccggacgccgtccgcggcgctgcggcgccggcagttggtccgattgcgaagcggaccatggtgccgtacagcgcctcggaggcatacctgctgggtgttcacggcagcatccaggaagttcggatcccagggcgaccggactggatcgcgagtcggctcgcagccagacttgaggaccatgcgttcgaagtaccagtcccggacggatacgtgtggctgttggtccgcgaacagcaacgctggagtaccgcgcctctgctcccttacgccgtacttcccccacccacgcccccgccagatgactatcagtgggcttgggctgtgctgaatgctgccgactgtatatcaactcccatctgggaggcttacgtccgggcggcacgggagatcagcggaaggggggacaggccgtga

SEQ ID NO: 28265 - DNA, 6282 bp, Vibrio splendidus ATCC 33789
atgaaggatccaataggtgcttacagtactcttcaagagggtatcaaacgttatataacctcggcctttggaactaactcgactagctttgaggacgagagaaagcagctacttgatcaagatggagtcttgtttcaggttccttacgttgagcctattccatcgtatttgtcaggcaagcgattaatagaactgggtgaacccgatcttccaactttgagccctgatggcacgcgagcgtttaaagcaattgttaaagcgggactgtttagtggagagttccctctttactctcatcagcagaatatgctgaagaggtctttagagggtaagcattgtgttgtagtgactggtactggttcaggtaagacggaatcgtttttgctccctgccatagcgaatatagttcgagaggcaactacaacagagactcgttggcaagagccaacaaatagacgtgccgctgaatggacatctgaaaacccaccaaaatggaatgactcaagaaaagagataaggggtgaaaaacgtgaagccgccgtcagagctttaatactttacccaatgaatgctttggtagaggaccaagtctcgagattacgacaagctcttgactcagaggaagtgctagacgcattagatgagcacttagatggtaacagaattcgttttggtcgatttaatggctctacaccagttgccggacatccagtaaagcctgatggaaaatcaaattcagctaaacgttcagagctgaaaaaagagttagaaaaagctcttgaggtctatcaagcgataactgcaaaggttgcccaatgcaaagagaaacttgatttagcgagtgctaatggtgatacctcattagtggaaaaagcaaaggctgagctggctcgggctcaagaggaaaaaagctttattcgtcgtattgcacctgacgcagcagaaatgttccaccgttgggaaatgcaagctactccgccggatattctcgtgactaacacgagtatgctatcgataatgctaatgaggcatgcttcgcaagatattaaatcggatagagctgacgcggacattttcgatgcgaccaaaaaatggcttgcccaagatagaaagaataatgtttttcaacttattattgacgaactgcatttacatcgcagttcgtccggtacagaggtcgcttatctacttcgtctcttacttgagaggttggggcttcaaccagacagtcctcaattgcgaattttagcatccagtgcgtctcttgatggagaggatgatgcaacttttcgttacttaggggagttctttggtttttcctcagaaatagcaaaagaacgtttccatatcgaatctggtgagttatcagtttctgttgatagtgagcactcttattttgacgctggtactgctgaggcttgtcttgctgtcgctaactcctctcttgaagttgaaccacaggaactaaaatctttagttgattcactttggagtaatgcagaatcaactaataagtgtattttctctgcctttcagaaagagggggctattagggctaggtcgctgagtactattgctgaaagatggtttagcattctggaaactaaggaagaccgactaaaggcaacccgaggcttattcatggcgctcggctcagactatgctaaacggtgtaaaactggctttcctcgactcagatttcactggatggctaaaaatatcgatggcttgtgggctaccattgcaacaagccctgaagacgacaagcgtagagttggaacgttgttgcctgaaaaaaaactgacctttgataatcaaagagtgcttgaggttttgtattgtgaatgttgtggaactcaattgctttgtggaaatcgagtttcaaatccaggtttcatgcctggcatgccccctcaacgttttgaactcaccccgttagagactcaaatcgatggactcccagagagcactgtagaaactcgtacagatgctcagaattatagagatgtaggtgtcgtttggttgtgcgatcaggagggaggctcggatgcttctcatccaagtttagattgggaacacggcaccatagaaactaacgacaatgataagtttcctggtcaaccaaaagacagaagaccagccacttggcgacgagcaaaaattagtcctaaaaccggtttggttagtttcgtatctggtgcattggatggcatagattgttatgttttcgatctaaaagctgatgataaagagcagcatcaatattcagcgatgcctcaaaggtgtccttcgtgtggtattgattactctgagcgttatggaagaagaacacctattcgctcgtttgtgacaggtctagcccgaatgtcacatttattctcaaagcacataatggttggtttaccggaagggagctcgagaaaacttgttgcattttctgatagtagagaagctgcggcaaacttgtctgttggagtagaagaggaacaatggtctttattattgcggactttcataaatcatgaactgaatcaaagagctgagaacgggatcttaccagtaaagaaacagcttgcagagttacttgagttaggtaacaaggaggatattcaacagtttcaaatggatttgatgagtcgggctgatctaagtgaatcagatatggaagaattgaaggtcttttatggaagcgcccagactgttgttgaaaatccaatatttgcgagtaaggaagctacagagagcttcaatcaagctaaagcgtttaaggtcggctttgtaagagtcaacgatattttagcagcaccaaaagaaggaactgaactgacttcgatatggaaaaattttattgatagtggagtcaaccctggtggtgtatctgttgataagaaaaagattggtagagacttggactggacttccgtttttgatagagatagtgggcaattactacccaaattgaagagaggtgcagaagatgagggtatcgatgctctaagtctatcactacgaaaaaacgcatggagagctcttgctggaaggcttctctatgacttggaggaacagggcatcggtcacctttcaattgctccaaatatccagtcaaagccaccagtaacgatgtctccggacatcttctttcaagcttgtaacagcgtaattagaatcctttcagaagaaaacaggtttgaccctaatccgtggagaagagctactgagggttggagacttgatcaacctatgggagacaaaagggaaggtaccgcaaagaagcgagtctaccgctacctcaaaagagtctcagaaaggtatcgcactagttacgaggctctcttagatagtgtatctaagtcttttattgaggctggacattctgtaggaatggatagttgggctgttattaggttggaaaaactatgggtacgagtagttgatgaggcagagaatccatggatttgttcaaactgtggtagaactcattggcaggcctcggcgggggtttgctctcgttgccatgaagtattagatgacaagcctaatgggggacagtcagccttagacattcagcgttcacattattatgcctttgagtcaatggacaaatctaatttgttcagaattcatgcggaagagctgacggggcaaacgtacgatcaagctcaacgtcaaagacacttccgagatatattttttgataacgaagtaattgatgatgtttccagacgaccagttttgaaaaatgttgactcaatagattttttatctgtaacaacgacaatggaagtcggtgtagacatcggctctttacaagctgtaatgcaagcaaatatgccaccagagcgatttaactatcaacaaagagtgggtcgagcggggcgaaaaggacaagcattttccgtagcattcactttttgtcgagggcagactcacgaccgcattcatttcgagcacccggacgaaatgactggtggcgttcctcctcagccaggtttatctatgggagaagaacagcagatacttgcccgtagattgcttgcgaaagaggtattaagaagagctttcttaagtattggtgtcagctggatagataccagtcatgaacctgatactcatggtgaaatgggaacactttctaatgctacaagcaatttggattgtgttagcgaatggataagaacaaaccaagctgaagttgagcatctagcgcgtgtgattactcaaggctcaaggatttctgctgacgtactgtttaaatttatcgtaaataaactatcggaaaaaattaagcaagtcattgatagtgaggagtatgttggcaggactctagctcaaagattggctgaagcagggattctgccaatgtttgggatgccgactagtgttagacagttgtattttgatcttccttcgactagcagctcaacagccgatgcaaaatcattggatagaccatctgatcaggctattgcagattttgccccagaatcggtgaggacttgggataaacgtcaacttaaccccaaatatattactgggccattattcagtgacctgagaggtggaggctggacttcgtcagggttgcctgtgggggcagtgtttattcatgttcgttgtccagcctgcagaaacttacatgtagaacatgtagatagctctgagctgaggacatatgagagcccggaaggtctttggaagccagaatggttaactaaagcaccagagggtgttacttgtccaaatccaagttgtaggtgtaaggaggctaaaccttatgtagcggtttcacctagagcatttgcgacagatatggatgtgacgaagcccgctttaggagctggagagcaccgcggacgctcggggcgcacagaaatcatgagcccgagattaactctcaaagggtatgagaccaagtgtaatgtaaagataaaaaaagagtccaatgctcaggtctttcgcactaatacgaatctaggtgaaggatatggttttgatgaggtttctgagattaatgaaggttggcctcgcgtaaaaggagactcaatttggaaatccaataatgagtcgccggatcttagagttgcgctcacctcagtaaaaacgacggacatctttgcaattagaatggaagacgatagaggactgaagttctttgatgaaccaaaagaagttcgtctatctagacgtaaagctgcttggtattctgctgcaaccattcttcaaagagcgattgctttagagttggatgtggactcaatggatattgaaatagcttcggtccatgcattgcatgaaccgaatggtggagaattatatttagctgatgctcaccccaatggtgcgggtctagtcgatacagccagtgaaaacttaagctctatcctttatgggtgcctatttggagaaggtaaagcttcattgatgggcaaacatatacgcaaagaagtcgagctctcttcggaggctggatatgcgtggagaagccctgatttacttttaaaaggttttaggaatcgtcaagttcatggtctattggactggcagttgggcatagagttaatagcttgtatgtatgatagtgattacagaccagggctagactatgaggttcaaggaaaagaattaccttttggcaaagaaaatgcgtggtctagtctggcagatcgattagtcggtgaatggtttgctaacgacctttcaccagatgcgaaacgcattcaagaaggggttattagtgggtggattactgatacaacttttaatgtagttgtacatcctctgtggaatggacacccaagtgaattgaatgctgtaggtgaagctcatgctatagctaagaagcacggctgcacagaaataagacgcatagactcgtttaacttatcgcgccgaatgatctgggtttattcgaatttgacagatcaggatatatttgtagttgaagatgtattggatgattttgatatcgaagagagtggatctacttcttcagaagtggaagagccacttgttacagttacagattttcgggaagttgaccagctagccgtcggtgatgtctttttgttttccggtcaaaagtggtgtaaggaaccgttgaatactctgagtcaacttaaggacaacgaagtttggctagcatcaaaactagatggaaatctgagtcgagtaactgcatcttgtaagaaaggtatgcctacaccaaggctccgcacgaataatggctttatgagtaaacaagatgctgaaaaaattaaatttatcgcacgtatcgcagagtaa

SEQ ID NO: 28266 - DNA, 1587 bp, Vibrio splendidus ATCC 33789
gtgaatcatattgagctttttgctggttgtggtggtttatcacttggtttagatgaggccggttttgaactggtacttgcaaatgaactatctccgatggcggcagaaacgtttgcctataactttttcggggaagatctggaagagttgggtaaccagaatagaatgcctgcgcatacgttttggctaaatagtgaaaataacagattaaggcctcgcctccgagagaatccttttgaattcccagcatatggtaccgaaggttttagtgacctatcggatgactggcaagcgcttaatggcaacttaattgttggtagtatcattgagctaaatcgcttgttagacgcacagcctgttctagttgagcatctacgcaatgcttttggtcgtgatggtggcctagatctagtttccggggggccaccatgtcagagtttcagtttagcgggcaagcgagaaaagaataatgataaaaacacattgccatgggagttcgctaaatttgtcaagcatactcgacctaaaattgcattgctagaaaacgtgacgggtatccttcgccccttcaaagacgatgatggtaaacagtttcacgcatggtatgaggttgccaaagtctttgcttctattggctatgtacctctttgcttgcacataaatgcacgtcaggtcggtgtagcccagaaccgcccgcgctttatcatgattgctgtagaacacgctcatcttgagaaccttagagaatttttggatgaggcatcactagcattatttgatcaaccactggctttttatcaccaagttcagagggtagttgttaaccagaacgctgatttaccttttgggctacttgattacacagataccacgaaatcttccgggtcccagcagctcataggcacgttccttcacccgctttttaaggcagagagtgaggtttcagtacaggaagcgcttgatgatctaaaaattcacaatccggcacagccttctatttttattcagaagcttaatcaaacattttcgcgtcttggcaaacatccaacggggctaaaccatgattttcgtaacaacagtccgttggttcaacgccgttttaggctgtatcaagtactacagcaagtggatgatcgtaaggtaaaaagtgctgtcttctcgatcctaaagggagaagctgatacccttcctgatgatatctgggcgacgctcagcggctttgaatacctacatgaaaatcaggaactctatgcttttgcttcaaaacgcgagtttgaacagtatctacttgcccacccaacgaagaagcaaactcagaaggccttgattgctaataatccggcacctgctgccctatccattccggatgatgcctgccattatgatgaacacgaattgagagtattaactgtgcgtgagatggcaaggatccaatcatttccggataattttgtatttcgctctaagatcacaactggtgggcaaatgcggaaatacgaagttcctcagtacacccaagtagggaatgcagttccaccaatactggcactaagactagggcaatgtattgcaaagcttctagattaa

SEQ ID NO: 28267 - DNA, 3045 bp, Vibrio splendidus ATCC 33789
atgattttagagattcctgataaagctgattcgttagcaaatatgccgtcatggcttaatagaaaaccctcaggagaactgttttttgaatggaatctccgaattttaattagtttcttctcaaaagcgtcggagaatgaagaagtatttttgcgtgttgatagcgatttctttgatcagattggtcaagatatcggtggtgacgcgggttttattaacgcagtaaagcagggaccttctagcgtaaaagcacaaggtgggctggcagataaagccacagagctttgcaaccaacggttactcaaagcaacaggttacgaagaccctggtgagctagactcttcctatcttagtgtgagagccccaacgtacttaccgtacttggctgcactggtccgaaactttactagaagtaacacaaaattctatttcaacttgaaaaatgaactcaatttggaggaggattttagttcccctgatatggctaagcttgagattctttgggaggacctccgaacatggacatccacgcagggaggaaaatttggtttttttaagaagcgaactcttggtggttatcgtcacatcggattacctgcagcgcaaagcattgtcaaacagactgatctcaatagtctccttctttgtttcgtacatctacaactaaaaaccggagaggagttatctgacagccgcttgcaggaagttattaattatataggttctttggataattatttctcagctggcttccatgaggctttgcatgaccgcgagtttaggcagccgatttgcgagataattagatatgtattctctgattgggatggttctttgcctaaaaaagaacgcgagttcagtggctcagctagctataaagatgagtttgagttaggaatatcacttatagttaataatactcaaccgccaagcttttcaccttgttggttcatccctccgcttcaagatgaaggtaatttccttctacaaaatggcaaacattcttggagtggaaggttcagcggaaccaatggtgtgagttgtagtagagaagttgcaatagaacaaaagatctgggatctagctggggaaattagaagtacccccctcaattttgagcttgagtcttccggcgctgatgatactaaaccttcaaaaacttccttgcagctacctacaagcgggctttgggttttgacttggtctcaagatcaacttagtggagttcctcagttggttccaagtgacttgccagcacatggtccagcgtatttgttagcgtctccctcgcaagcaggaaaattggtggaatacttagagctacaaaaaccagatgctgaatttattcatgattatggcgttccagctaattggaaaatgttgttcatcaaagactgctccaatctaacctctaatcagcgtcacctacctgatggctcggggcaaccaagaccaaggcctagagtgattcgcttcactggcggtcgaacagttcaacgtggctacaagagaatgtacctttcgtacgacctaccctcgatagagctggatgcggctgccaacgttcgtttagttgcttcagatggtgttgctattgaggaacagtttcacgagttagataagtcatatcaagaagaaagcctgtttcacgatataaagttcaccagaacatttgctctcagactattaaaagcccaaagtgcaaattatcgtattcgagcatttgatttaaaaggtagagagcttgcttcagtacaattaaaagtggctggagtaaacggggacttggttgaggttaaagacaactttagtttagataaatttggaaaaacacaagccactctaagcggacttgtaggtgtagaagttaatttgccttcgattggactgccgaattccaatggacaagctaattttgtatcagttcaggagttgggaaacgacacttcgtttttgatagaagacgcttgcttgtttcgaaaatttttagatacgctcgctcaatctggctctttggattttggaacagccaaaaatgttttgaggcgtcaaattcaagcaagcactgttgagttgcaaccaatatttatattacttgaactccagcggctaggtcatatagaactggctacgactctaaaaggtaatactgctagggttcatgctatacctcctcgtttttataatttaccggttgattgttcgggacatactgtttggggaattagtggaacattaagattggagcactgggagtcaatcgcagaggcgcaatcagcatggaaaattatctcggttccaagcactagtggtatgaataactggcgattggtcataaaagataacaacaacgcccaagatatcgtcaatcaactagggctagatgttgtggatatggcagcactgaccatagctgactactccggtgatataactgagttccatgacaataccttccgaaaccctattgaatcgatagggggggcagaggatcagtcacacaggttcatagcctcagagggctactttgtaaaagaaccgactggaaggattaaaaccatcggcgaactttggaaactgcaagatctagatatcagatttgacaatgtacatgttctagtgaaagacggtcaatatgcctttgttagagactcctcatggggtaagtggttggctatccatgaatttgcagggtttgtaagagaactacctggatttgattcggagctcgagatacctatcaactatcaaaaacaaacaggtaaagtttggattcctgctcgaatagggtttccaaggatactagagcgcgcattggtggtttgtggcgccactgctcctagtgttgttacattgaagaaagtaaatgaagactctctatccaatgaaatgacattggcagactccttaacagacgtattgcttagtagcaacttttattctggtatgtctgatgggaaatggcttgtttatgatcatgttccagaaagtgttgcgaaggttgttgcaagtaaactaggcgccactctttacttgtgtaaataa

SEQ ID NO: 28268 - DNA, 5946 bp, Yersinia aldovae
atgaataatccacttgaaacatttgaatcaattagagatttctacatcacttatcttgaaactgcattccgcattggttccccagctattcagacgtatcgccgagaattacttgaaaagcaaggtacgctatgtgcagatctatttctggaaccgatacctaaatatcaagatcatggcttaacaatcagcgatctaagagatacctcgaaaggggaaacatggttaccggaatttactgctctgcaaagggctgcatttgttgatctctgtttgggcgggcttttgcctcgtgatcccaaagatcccaccaaggggcgttttaaactttatactcaccagctagaaatgttacaacggggcgtacagtctggtatgccgggcatcgttacttcaggaactggttcaggtaaaacagaatcttttttactgcctgttctggcgcaaattgcacaagaggcaagtaaatggccgcagggttctgggtttaaaagttggcaaccatggtggagagaaccaaatactcaccctacctttatgcgagatctggaagctcctgctctcgaacgacctaaagctgtacgagcgctaatcttgtatccaatgaatgcgctagttgaagatcagttagtgcgtatgcggcgtgcgctcgactctgatgaagcccatgaggtgatggattcgcattttggcggcaatcgaattttttttggtcgttacaccagtgctactaaggttactggctggttggaacatcctcgacaacataacgataaaaaagagaaaaaacgagtattgggtaaagtgtctgaattgcgtgaatacatgcaattcgctgataaaacccacaaagaagcggtgcatcaaggcaatctagataaggatgataatctacagttcaattttccaagactgggtgggggggaagttctcagtcgttgggagatgcaaaaaatgccaccagatattcttatcaccaacaccagtatgctctcaactatgttggtgcgtgaaattgatgatcctatttttgaccagactcagcaatggattgaacgagatccgaatgcctatttttaccttgtacttgatgaattacatctccagcgtggtactgcaggcaccgaagttagctatttactcaaacatttaattaatcgtctgggcttggatcaaccacagcaccggcacaaattacgcattctggcttccagtgcctcacttcctgttggtggccccgagggcaaacaaagtattgactatttgtgggggatgtttggtcagcgcggattgccagtgaacgctagcgctaaggactggggttcttgtattgttgatggaaaacccattaatttggtagaaataccgaaattttgtggtgatcttcaagcattttgtaacgcggttgagcagctaaaatctggtagagcaacaggggcatggaacgatatcgctcgctgcctaggatgctatcgtgatggtgactcagtcgaagaattggcacaacatacagtcttactggctgcgagaatgcttgaaaaagggtgtattgacgataaacaatctttgcgagccactgctattgatcagctcgcaatatccttattcgcagaacatcccaatgctcgagagggtgttagagagttaatttggctacggacgaccgctgataactggtactcatggtttgcgcatccttttcctgatcacattctactaccgcgttttcgcgctcatgcatttttacgtgcgctgcaggggttatatgttgctccgcttccattgctaccgcaggcgctaaaagacgaaataaatcaacagttatttgctgatcttactgtcgagtctggtttgcgctatggcgatcgtttgtatggtgataagagaacgcggcgcgtagagctactctattgtgagtgttgtgcaacactatttttgggtggaaaaccgtctgcattctcagtgataagtcgtcatacagaactattacccaacgaccctgacactgaaaagctcccagaacacgccaaatcggtaatgattgagcagcgttcagcagaagagtacgctttgtttatgccaactgttgatcggttttggccattaggtgatgaaaaactctctgatgaagactcttttggcaaatggaaagaggcaagctacgatccattcactgcaacgattactcagccaatatcgcccgtaaaacctataccagaaactgatattgcaggttggttctatcgtgtcacacccggtgatttcaccaatcccaaaaggggacagtcatccagccagtcccccggctccgcattgccttttcagtgtccagcatgtggcacctcatatatatacggtaaaggaaaactttcgcccattcgtggctttcgagtggggtttgcgaaaaccacgcaactacttgccagtacattaatggcagagttacaacaatctggtgatcaggagcgattggtaacgttttccgatagtcggcaggatgcagctaaagctgcacttgatctagaatctggtcatcatgatgatgtccgtcgtgagatcctcatcggctcgcttaaagagattgcggcgggcaaatgttcgcataaaaatttacgtatgcgcttagacgaggttaacaaacggagaaaagaacttgatgctatggccgagctttcactttcagacgcacaggaaaaagaattagaggacctctgggacgaacggcagcaaatcagagaaacattattgcacccagaggctgatagtatctcgctggatacaatactggaaaactccccaaaggcaaataagcaacttaaccgattgctagcaaagttagtagaggccggtatccatccgacggatcggactggtattactcctgtgcccgatccatcaaaatatcgggaagacattcaaacgtttacgtggcagcagctatttgacaaagaccatcaggataaatggcgttggaaaactgtccttaactacgaaaccgacctagacgttgctcgtcaggaaatttcacgagacctgaaagaattagctggtgaaagtgtgtttagtaaaacgtactttgcgttggaagaggcaggatgggggtatccctgcatccctgtttctgatggctactctcgggaaaaattggccatttttgacgcgctacttcgagtattggctgacgcttaccgagttgatccatcgcaatatcgtaatcctgataatcccgacactccttgggaagaagcatcggcgatccctaaactgaatagagtgtatcgtttcgctatttcactatgtaaacgatctggctgtagtgttttaggtctacttgatgagttccttaaactacttgaaaaagcgggtcatcaaggcggtatcattgatattggcaaagtacacttccgcttggtggactctaccgataactactggcgttgtggcaagtgcggtcgtgttcacttacatctagggggcggaatatgcacccgctgccatgatcctttacccgaaatgccgtttgataaagctaaggctctgcaagaacaaaactatctcggtaaacgtatctcacattcatccggcaatcttcgaatgcgttctgaagagctcactggtatgactgaaaacccagctgcaaggttacgccgtttcaaaggtattttgattgcagatgatgatgatatttttccaacaggactgaaaaatttcgatccagacccagccctagatagaaaggcccgagttatcgatgtgctttctgttactaccaccatggaagttggcgttgatatcggcgatctgcgagcggtgtttcaggctaacatgccgccacagcgattcaactatcagcaacgcgtagggcgagctgggcgacgaggacaggcttttgcgttcgtattaacagcatgtcgtagtaaaagccacgatttgttttacttccgccaccccgaaaagattactggagaccttccacctccaccattcctaactacaaaacttgaaatgatctgcatgcggttggtacgtaaagtctggctggtggctgcatttaagtggttgagggtaaaaatagaaggcacaggccaagcatggcccgctgacgttagtaggcataaacctgataaccatggtgaattcttccagattgactggctacaagacaatcaacattactggttgccacttatccatcaagcactggcagctacaattggaaaacgtgatgaatttgtccatgtttgtatgccggaggatcaagctttctatcagactatcgtgcgttcactgacacttgaaaatctgatacaggacattggcgatgcactgggcgatcccgcgatgactgggaaaggacttgctgaagcgttggctgaacgaggcaaattcccgatgtacggcatgccaactcgaacacgattactgcagactagggcaattagtcgcggtaaagatgaggtccagtttgccagtatggatcgagaccttgatattgctatacaagagtttgttccggggaaatatttagttcaggacaagcggcgatacttaacagcaggttatgctgggatgctgagacagcgctatcccaactccacagattttgacctgactacctgtgaactgggtgaaagtagaatgatgaccgcctgtccggcgtgtggcgtctgggcccctattaaccaagaagtcaacatatgtacagcctgcggtgcagttatggatgatgttgagcagtatcaatgctatgtaccttatggatttattaccacgctggaagataaatctgtcaaagaggatggcgatcaaaccctggccaatgctagccgtgtttctgttgccgaggcttattcattctctgctgcaccagaacctgatgtgaatgttgctatccagcttgagtcgcagatcctccttcatcgactgaatcgcggcacttatgccgatgaacagtggagtggtttcaatgcaatacagggcaatctacgggttcctttcagaaaaggagggaagtataggccattgacagcaaatcacgtgtggatagacagtgggctgctaggtaatgatctatcactgagcaaacgtttcacacctttgtcagaaaaccgaacatctttttaccttgcggcacctaaagtgactgacttattagcattgatggtggtgagtacttccgctaatcttcaattacagaccccagcattccgggctgcagcactgtcagccgcatttatgatcgttaactatgcatcaaaagagctgcttgatatcgatccggaagaaatcgaaattctagagccgcgtgtacagctattaaaaaatggcaagctagcaccgatactgcagatggccgaccgcttggttaatggttccggattatgtgaccgtttacaacagaaaggaacgtcaggtacaccgattattcttgaagtgatgagagccattgttagcaacaaaaatgactttccactaagagatcttttagatgatgagcatcgggaaaaatgtttgcaggcgtgttattactgcctgcacagatatggcaatcaggcctatcacggattgcttgattggcggcttggactagatgttatccagctacttctggatgataattatgatgccggattgaatggtgatttctcagctcccggtattgctgattggcgaaacaacgccttgtgtttagcaaaagaagcagcatcactctttgacagtaaaattagaatggtaggccatgttcctctgattggcattggcccgcaacgctgggtggcagtaacccaccctttctggaatgaaaatgctatttttgctacaaatccagagtttgaaaggctattccttgagggacaattagagaaaaaaactgtcaatacattcgatctctctcgtcgaatgggatctgtaatgaccaaattgaaaaatccggaaagcaactag

SEQ ID NO: 28269 - DNA, 1089 bp, Yersinia aldovae
atgaacaatatttttgaaagagagcatgacaatatccgagttctttcactgttttctggtggggggggcatggattttggcattgaatctgccggtgggaaggttgtttttgctaatgatattgttgaaaacgcctgtaagacattggataagtattttcctgactccgatatcagacttggcgatatatccaatatccagagttttccatgtgttgatgttgttgttggcggttacccgtgtcagtcattttctatggcgggtaacagaaagccggataatgatgctcgaagcaatctttataagcagtttttacgtgtgttaaatattgtccgcccaaaatattttgtggcagagaatgtgtctggattacagcaacttggtgcgggtagttttttagagcaacaacttacagcataccagcaagctggttatcaggtcagttatcatctggttaatgccaaagaatatggtgtaccacagtcacgtaagcgtttgtttattattggtgtacgaaaagatttagatcaatgttttgagttccctctagccactcacggtaagctaagccagaagaactctcatttaaaaccttatgtatctcatggtgatgctatttgcgatctccccttatggccagaaggggagttttatgaacgcccccatgatccagaaggccatttttcatggtatttcatgtctaggaatcgtaaggctaagtgggatagccctgcttataccgtggtagctaactggcgacatgtcacattgcacccagcaagcccagtcatgaaactaacctggtcaaaccttgatgacggctggaaacagcgctgggacttttccgatgaatacgaacacttaactgttgatgatacccgtcctaaattggagcaagccagacgtttgtcatggcgagaatgtgctcgtatacaaacgtttcgccacgattatgaaccggagggggatattgatgccaaatttacccaaataggtaatgcggttcctcctatgctagctgaggttctttttagtcaccttttttcaggcgcaggcttgaagaatctctcgataaaagcaggtgattga

SEQ ID NO: 28270 - DNA, 2787 bp, Yersinia aldovae
atgggggagtctttcccagttactttagatgagtggaatactgccctagttagagccattttttttgacccttcttgtattggttcaacactgagtcgtattgatgcgaccggacgcatttttgataaattgaaaggtactcgtagtaaagaagaagctaaaggtagctttttgaatgcatttggtactagtgcagaaaagatacaaaattattttagagatgaattaaggcttgatatattagcggcgagaaacggggttcctccttattttgctatcttatatttaacgttacttgccgccagtgctaatgatgatacctatgatgaaggtgattttcgtgtcagattttcccttctgctaggttttgataaaaataagaaatttatctttagtgaacttcctaaaatgtgggagcgattagaaagatggagccataataaaaaagaatgtgcgcatcttattttgccagatcctcatcgtgaaacattaattggttattcaaaacgactttcctttccttcttataaagacgatttattactaaggcgcttactggctgataaaaatcaggatagtcactcaacatttgaatcaattagtcaaataattcatcaaaagataaattctttcagtcaaacattcatcaatgaatttgatcagtttcgaatactgctattaaaggctttatcgaagcaagcttataacagcccattttggggtgccgttcgagatattactcgatacaaggaaaaccaacaagtaactgcgaatggacgtttttgcgtgcagttagaagacgctaccgatatgtggaaccccgaaatttatttgttgatggatagcaaaggggctaaggaattaggtaccaatcgaatttacacactgccacaaaaaacagaaatttatagcaaaggctattgtaaatcggatgtgaataccactctgatacacctgtcattactattacaaaaacaaaaaaaaggattatcgcaatcgcgagtaggtatggcattgcaggcaggatgtttaccgctatttcgggatgattcgggatttatgaattctgatggtcactattttgatgatggcccagtgtgtctagtaataagcagtaattatgtaaggaaagtttatgcagcatgtaatcatataaatttaaggttccattcgttaggacttaccccagagctgaatgaatggcaacttattgtattcgaatcagtaagtcaacaggcatttctcactttggcaactgctattcctaaactcgcccaacgattttttattcaaaattggatgcctacaagacctcatttggctggcggagctcgctttgggcaagcagtgttacttaatccggccagtactccatttattcgtatggaaggagctagcagcggaagattcgtaattagtgactctgcggataataaactggctacaggcgaacttacggtcagtgacgacggattatatatttcacctgaaaagttgattgccatttccggacaaacactttgccgttatttattaacactggaccaacaagaatcacctctggtttatgatgtttgtgtattagaccatgctcctgatgcagcttatcgacgtttaaatgaaccaaatgattggttgattgatggtcctatgggaactttagtaccatttaatgatattgctaataatgtacctgcctctaggtctataaataagctaaaacttacccctatggggggggagtggtcattatggcaacaaaatgaatatccacctgcagaatgcgaatctattgatttgcattctattcctattgcgctcgactggttagtcgaagcactggcgctgcgttttcaaaggcgtagcacactgccttttgatgaactgaataaacatcttataccagtttcaatcgctgtaaacattcctgtttggcgattacgtcgaatgctgtttacgactggctggctttcaatgactgagagtcgttatgctccttatccgttagtaacactggctgtccgtacaatatcagtttctgacgagaaagcgggtgtggtagctcgtatctgtggaatgatgacaaaaagcgagcgtaatcaactgcagtgcgcactggtagatggtgagcaagttaaacggtggtcagtattaggtcatgatcttgcagccggttgtattgagttaaatttgacaggtattgagcgcgtagaaacattgattgaacagtttggtttgcaattagtcaccaaaacagatttttctgtcagcccattaagtggtgtaatcctaccaataacccaaataaaaaatatcccaacgctatctgaaaacatcaacgtatcgacttggcaagaagggaaaaatatgtggtctgaagagactacggcaattgatcctagaagcaatgctttaatgcgctgccaggaaaaacagcgtaatcgttattttatcactactcaaaatgcttgctggcagaccgatagttttgcttggggattggtcgttcaggctattttttcaaaaaaaacattgggttatcagagccataatggcgatctctcttggtcaaaaaatctcattgcattaccgcttcctctaacacaatggtggttacattttgctggtggttgcctttctattagtgataacggcagcatttcatttttaggtggaggtagttccatgtggggcgatatcgattgttcagatgagacagagcaactatatatcgatcgagctactgttcgccgctcacgagcgttaaagctacgtagagctcgataa

SEQ ID NO: 28271 - DNA, 2817 bp, Yersinia aldovae
atggttaaaaaacagagcgttataaaagaacgactgagccagatgtactattttggtatagaatctcacgaattagccaactgcctaaaagaatgcaagcagaagcttattatggctggcgctaaagcagataacttacctagaacgttaactcaaaaattgcattttttgagtaagctacagccgaaagcacaacttattattcagacgtggtttagcactaacattcagttttctgagcataatgatcctaatgaaatccttaatgaacttctgttgaaagaaaaaagtgatgatgatgtagaacatttaaagccactatggcgtgccattctgggattttacgtctctcaatcctgtccagagattattgaacgatttctgaatgatgaagaaatgaataaactcaataatggtgatactgagaaatataatgataatttatttgcacaatctgcccttaatgtgacagatgaagatatagaacaatgtttattaattggtcagggacagaatatatatccttctgatcgaatactccctatgtttatcgctgctcttactgatacgcttaatggtaatcagaattcggctattttatggaaagaaaaactagccgctcatcctctcccgatggcaaaaaaacttgaaggtattattgcagagttcgagtctggtcatagccagaaaatagctgatagtctagcggtattaccagcagaatttgttacaccagagagcatggatgacaatatagatgacataacgtttgttggtattgttactaaatcactcccatcaggtgccttcttcgtttcaccgattgccttgtttattgataatagtttgagggatctctctgaggaaaatgttaaagttttgtatcctcatcatggtgaaaccgtcggttttatgaatcatttctccagaaattttatacaaggagaattgggtatatggcaagccacccatcagccatccgataagctcgctcaatacgttctgactaggtaccagtcacgcatatatactatcatcaggcttcctcatcagctcagcgagccggatgctataagagagtggttgttaacccagtatcagccaaaaaatgattctcccgttatttttctactagatgatgatgttgcattaaggcttcccggtgatatagcagaccctaaaaaatacgattttgattcaccattagatagctatagagaattagcctgcattgaattacgctctcggaaaattaccattgcgacccaactcccaatgctcgccgaaaaatatgactgtgctccagccagtacatggataaaaagattgataaagttgaattattcatcggtagattttcctgcttttagcaaagcgcaattacaaaatttagctaactttattgagagcaatgaatcagagagtgataaatatatccgcgctttagctcatctggagcaagtcgcagtttcaagagagtttttggatagtatggttcagaaattagtgaacctacctgtagtcgaagctcaaattaatgaacaaaagaaagtgatactttctgattatgagggtgagcaagagaaactaagattggcgattacatcactggtagacaaaaaaacacagcttgaagccgaaattgataatcagaaaaaacgtctgaaagctgaaacagagcgatcgaaaaaagtaattcgccaacaagaagcagaactggattcacgcatcagacaaaccttcgaaaatgcatctcaggctggcattgaaacgttggcgcaaactgcactattacgtgcattgattgctgatgttacaggaccggtttctcagttagaacctatgtgtaaattagaaccagtcactgcaatggcatcttcattggcattagagtcctttaaatcgccgatagcagttgaaatcaccagtaaaagacggttactgacgataatagaagagcaagcggcagtaactggattaagtgaaacgttattgtccggtattattgctgccgcaaatgtaacccctattattggattactgggaaaatatactaaaaaagtgctttctaccgtagcgaatattctgtcgagtggagtatggggggaagtctctattcacggtgatctttttagcatcagtgatttgatgagatctcccgtattagtcagaagcacagaaaacacttttaccatgtctctgggagattttctggcacaccagcaagcgaatgggcaggctacggtggtggaattacgtgggtttaaccgtatgccgccagaaacattgctgcctgagctgagtgattacctcctgagtgatgaacaagcatcaggcttctgctggacagacgaacatcagaaattacgccatctttcaatcaaccatccggtattatttgtgctgacgtttgtcgttggcaaaagcacatttccattacaagggtcagcttcccacaaattaccggtatttctagccgaaaaaatttggggtgatgagcaacctgctgatgaaactactgacgtaactgtgacatatgtaacatcgataatatggcaattgctttatgcgactctacgaaaatctagcagccatagtcataacgaactggaaatcttgcaaattttactaaaagatttcggttttactgagcaaaaatcagaaggtattgccaaactggtgtttgaagcggggcgtagtccatcggttaatctagtttcagatattgaaccactagcaccagtattgatgaattatgctcgggaaattacccaaggcgaagtcgcagctgtacttgattgcctgtttcaggcatag

SEQ ID NO: 28272 - DNA, 5946 bp, Yersinia intermedia
atgaataatccacttgaaacatttgaatcaattagagatttctacatcacttatcttgaaactgcattccgcattggttccccagctattcagacgtatcgccgagaattacttgaaaagcaaggtacgttatgtgcagatctatttctggaaccgatacctaaatatcaagatcatggcttaacaatcagcgatctaagagatacctcgaaaggggaaacatggttaccggaatttactgctctgcaaagggctgcatttgttgatctctgtttgggcgggcttttgcctcgtgatcccaaagatcccaccaaggggcgttttaaactttatactcaccagctagaaatgttacaacggggcgtacagtctggtatgccgggcatcgttacttcaggaactggttcaggtaaaacagaatcttttttactgcctgttctggcgcaaattgcacaagaggcaagtaaatggccgcagggttctgggtttaaaagttggcaaccatggtggagagaaccaaatactcaccctacctttatgcgagatctggaagctcctgctctcgaacgacctaaagctgtacgagcgctaatcttgtatccaatgaatgcgctagttgaagatcagttagtgcgtatgcggcgtgcgctcgactctgatgaagcccatgaggtgatggattcgcattttggcggcaatcgaattttttttggtcgttacaccagtgctactaaggttactggctggttggaacatcctcgacaacataacgataaaaaagagaaaaaacgagtattgggtaaagtgtctgaattgcgtgaatacatgcaattcgctgataaaacccacaaagaagcggtgcatcaaggcaatctagataaggatgataatctacagttcaattttccaagactgggtgggggggaagttctcagtcgttgggagatgcaaaaaatgccaccagatattcttatcaccaacaccagtatgctctcaactatgttggtgcgtgaaattgatgatcctatttttgaccagactcagcaatggattgaacgagatccgaatgcctatttttaccttgtacttgatgagttacatctccagcgtggtactgcaggcaccgaagttagctatttactcaaacatttaattaatcgtctgggcttggatcaaccacagcaccggcacaaattacgcattctggcttccagtgcctcacttcctgttggtggccccgagggcaaacaaagtattgactatttgtgggggatgtttggtcagcgcggattgccagtgaacgctagcgctaaggactggggttcttgtattgttgatggaaaacccattaatttggtagaaataccgaaattttgtggtgatcttcaagcattttgtaacgcggttgagcagctaaaatctggtagagcaacaggggcatggaacgatatcgctcgctgcctaggatgctatcgtgatggtgactcagtcgaagaattggcacaacatacagtcttactagctgcgagaatgcttgaaaaagggtgtattgacgataaacaatctttgcgagccactgctattgatcagctcgcaatatccttattcgcagaacatcccaatgctcgagagggtgttagagagttaatttggctacggacgaccgctgataactggtactcatggtttgcgcatccttttcctgatcacattctactaccgcgttttcgcgctcatgcatttttacgtgcgctgcaggggttatatgttgctccgcttccattgctaccgcaggcgctaaaagacgaaataaatcaacagttatttgctgatcttactgtcgagtctggtttgcgctatggcgatcgtttgtatggtgataagagaacgcggcgcgtagagctactctattgtgagtgttgtgcaacactatttttgggtggaaaaccgtctgcattctcagtgataagtcgtcatacagaactattacccaacgaccctgacactgaaaagctcccagaacacgccaaatcggtaatgattgagcagcgttcagcagaagagtacgctttgtttatgccaactgttgatcggttttggccattaggtgatgaaaaactctctgatgaagactcttttggcaaatggaaagaggcaagctacgatccattcactgcaacgattactcagccaatatcgcccgtaaaacctataccagaaactgatattgcaggttggttctatcgtgtcacacccggtgatttcaccaatcccaaaaggggacagtcatccagccagtcacccggctccgcattgccttttcagtgtccagcatgtggcacctcatatatatacggtaaaggaaaactttcgcccattcgtggctttcgagtggggtttgcgaaaaccacgcaactacttgccagtacattaatggcagagttacaacaatctggtgatcaggagcgattggtaacgttttccgatagtcggcaggatgcagctaaagctgcacttgatctagaatctggtcatcatgatgatgtccgtcgtgagatcctcatcggctcgcttaaagagattgcggcgggcaaatgttcgcataaaaatttacgtatgcgcttagacgaggttaacaaacggagaaaagaacttgatgctatggccgagctttcactttcagacgcacaggaaaaagaattagaggacctctgggacgaacggcagcaaatcagagaaacattattgcacccagaggctgatagtatctcgctggatacaatactggaaaactccccaaaggcaaataagcaacttaaccgattgctagcaaagttagtagaggccggtatccatccgacggatcggactggtattactcctgtgcccgatccatcaaaatatcgggaagacattcaaacgtttacgtggcagcagctatttgacaaagaccatcaggataaatggcgttggaaaactgtccttaactacgaaaccgacctagacgttgctcgtcaggaaatttcacgagacctgaaagaattagctggtgaaagtgtgtttagtaaaacgtactttgcgttggaagaggcaggatgggggtatccctgcatccctgtttctgatggctactctcgggaaaaattggccatttttgacgcgctacttcgagtattggctgacgcttaccgagttgatccatcgcaatatcgtaatcctgataatcccgacactccttgggaagaagcatcggcgatccctaaactgaatagagtgtatcgtttcgctatttcactatgtaaacgatctggctgtagtgttttaggtctacttgatgagttccttaaactacttgaaaaagcgggtcatcaaggcggtatcattgatattggcaaagtacacttccgcttggtggactctaccgataactactggcgttgtggcaagtgcggtcgtgttcacttacatctagggggcggaatatgcacccgctgccatgatcctttacccgaaatgccgtttgataaagctaaggctctgcaagaacaaaactatctcggtaaacgtatctcacattcatccggcaatcttcgaatgcgttctgaagagctcactggtatgactgaaaacccagctgcaaggttacgccgtttcaaaggtattttgattgcagatgatgatgatatttttccaacaggactgaaaaatttcgatccagacccagccctagatagaaaggcccgagttatcgatgtgctttctgttactaccaccatggaagttggcgttgatatcggcgatctgcgagctgtgtttcaggctaacatgccgccacagcgattcaactatcagcaacgcgtagggcgagctgggcgacgaggacaggcttttgcgttcgtattaacagcatgtcgtagtaaaagccacgatttgttttacttccgccaccccgaaaagattactggagaccttccacctccaccattcctaactacaaaacttgaaatgatctgcatgcggttggtacgtaaagtctggctggtggctgcatttaagtggttgagggtaaaaatagaaggcacaggccaagcatggcccgctgacgttagtaggcataaacctgataaccatggtgaattcttccagattgactggctacaagacaatcaacattactggttgccacttatccatcaagcactggcagctacaattggaaaacgtgatgaatttgtccatgtttgtatgccggaggatcaagctttctatcagactatcgtgcgttcactgacacttgaaaatctgatacaggacattggcgatgcactgggcgatcccgcgatgactgggaaaggacttgctgaagcgttggctgaacgaggcaaattcccgatgtacggcatgccaactcgaacacgattactgcagactagggcaattagtcgcggtaaagatgaggtccagtttgccagtatggatcgagaccttgatattgctatacaagagtttgttccggggaaatatttagttcaggacaagcggcgatacttaacagcaggttatgctgggatgctgagacagcgctatcccaattccacagattttgacctgactacctgtgaactgggtgaaagtagaatgatgaccgcctgtccggcgtgtggcgtctgggcccctattaaccaagaagtcaacatatgtacagcctgcggtgcagttatggatgatgttgagcagtatcaatgctatgtaccttatggatttattaccacgctggaagataaatctgtcaaagaggatggcgatcaaaccctggccaatgctagccgtgtttctgttgccgaggcttattcattctctgctgcaccagaacctgatgtgaatgttgctatccagcttgagtcgcagatcctccttcatcgactgaatcgcggcacttatgccgatgaacagtggagtggtttcaatgcaatacagggcaatctacgggttcctttcagaaaaggagggaagtataggccattgacagcaaatcacgtgtggatagacagtgggctgctaggtaatgatctatcactgagcaaacgtttcacacctttgtcagaaaaccgaacatctttttaccttgctgcacctaaagtgactgacttattagcgttgatggtggtgagtacttccgctaatcttcaattacagaccccagcattccgggctgcagcactgtcagccgcatttatgatcgttaactatgcatcaaaagagctgcttgatatcgatccggaagaaatcgaaattctagagccgcgtgtacagctattaaaaaatggcaagctagcaccgatactgcagatggccgaccgcttggttaatggttccggattatgtgaccgtttacagcagaaaggaacgtcaggtacaccgattattcttgaagtgatgagagccattgttagcaacaaaaatgactttccactaagagatcttttagatgatgagcatcgggaaaaatgtttgcaggcgtgttattactgcctgcacagatatggcaatcaggcctatcacggattgcttgattggcggcttggactagatgttatccagctacttctggatgataattatgatgccggattgaatggtgatttctcagctcccggtattgctgattggcgaaacaacgccttgtgtttagcaaaagaagcagcatcactctttgacagtaaaattagaatggtaggccatgttcctctgattggcattggcccgcaacgctgggtggcagtaacccaccctttctggaatgaaaatgctatttttgctacaaatccagagtttgaaaggctattccttgagggacaattagagaaaaaaactgtcaatacattcgatctctctcgtcgaatgggatctgtaatgaccaaattgaaaaatctggaaagcaactag

SEQ ID NO: 28273 - DNA, 1089 bp, Yersinia intermedia; identical to SEQ ID NO: 28269

SEQ ID NO: 28274 - DNA, 2787 bp, Yersinia intermedia
atgggggagtctttcccagttactttagatgagtggaatactgccctagttagagccattttttttgacccttcttgtattggttcaacactgagtcgtattgatgcgaccggacgcatttttgataaattgaaaggtactcgtagtaaagaagaagctaaaggtagctttttgaatgcatttggtactagtgcagaaaagatacaaaattattttagagatgaattaaggcttgatatattagcggcgagaaacggggttcctccttattttgctatcttatatttaacgttacttgccgccagtgctaatgatgatacctatgatgaaggtgattttcgtgtcagattttcccttctgctaggttttgataaagataagaaatttatctttagtgaacttcctaaaatgtgggagcgattagaaagatggagccataataaaaaagaatgtgcgcatcttattttgccagatcctcatcgtgaaacattaattggttattcaaaacgactttcctttccttcttataaagacgatttattactaaggcgcttactggctgataaaaatcaggatagtcattcaacatttgaatcaattagtcaaataattcatcaaaagataaattctttcagtcaaacattcatcaatgaatttgatcagtttcgaatactgctattaaaggctttatcgaagcaagcttataacagcccattttggggtgccgttcgagatattactcgatacaaggaaaaccaacaagtaactgcgaatggacgtttttgcgtgcagttagaagacgctaccgatatatggaaccccgaaatttatttgttgatggatagcaaaggggctaaggaattaggtaccaatcgaatttacacactgccacaaaaaacagaaatttatagcaaaggctattgtaaatcggatgtgaataccactctgatacacctgtcattactattacaaaaacaaaaaaaaggattatcgcaatcgcgagtaggtatggcattgcaggcaggatgtttaccgctatttcgggatgattcgggatttatgaattctgatggtcactattttgatgatggcccagtgtgtctagtaataagcagtaattatgtaaggaaagtttatgcagcatgtaatcatataaatttaaggttccattcgttaggacttaccccagagctgaatgaatggcaacttattgtattcgaatcagtaagtcaacaggcatttctcactttggcaactgctattcctaaactcgcccaacgattttttattcaaaattggatgcctacaagacctcatttggctggcggagctcgctttgggcaagcagtgttacttaatccggccagtactccatttattcgtatggaaggagctagcagcggaagattcgtaattagtgactctgcggataataaactggctacaggcgaacttacggtcagtgacgacggattatatatttcacctgaaaagttgattgccatttccggacaaacactttgccgttatttattaacactggaccaacaagaatcacctctggtttatgatgtttgtgtattagaccatgctcctgatgcagcttatcgacgtttaaatgaaccaaatgattggttgattgatggtcctatgggaactttagtaccatttaatgatattgctaataatgtacctgcctctaggtctataaataagctaaaacttacccctatggggggggagtggtcattatggcaacaaaatgaatatccacctgcagaatgcgaatctattgatttgcattctattcctattgcgctcgactggttagtcgaagcactggcgctgcgttttcaaaggcgtagcacactgccttttgatgaactgaataaacatcttataccagtttcaatcgctgtaaacattcctgtttggcgattacgtcgaatgctgtttacgactggctggctttcaatgactgagagtcgttatgctccttatccgttagtaacactggctgtccgtacaatatcagtttctgacgagaaagcgggtgtggtagctcgtatctgtggaatgatgacaaaaagcgagcgtaatcaactgcagtgcgcactggtagatggtgagcaagttaaacggtggtcagtattaggtcatgatcttgcagccggttgtattgagttaaatttgacaggtattgagcgcgtagaaacattgattgaacagtttggtttgcaattagtcaccaaaacagatttttctgtcagcccattaagtggtgtaatcctaccaataacccaaataaaaaatatcccaacgctatctgaaaacatcaacgtatcgacttggcaagaagggaaaaatatgtggtctgaagagactacggcaattgatcctagaagcaatgctttaatgcgctgccaggaaaaacagcgtaatcgttattttatcactactcaaaatgcttgctggcagaccgatagttttgcttggggattggtcgttcaggctattttttcaaaaaaaacattgggttatcagagccataatggcgatctctcttggtcaaaaaatctcattgccttaccgcttcctctaacacaatggtggttacattttgctggtggttgcctttctattagtgataacggcagcatttcatttttaggtggaggtagttccatgtggggcgatatcgattgttcagatgagacagagcaactatatatcgatcgagctactgttcgccgctcacgagcgttaaagctacgtagagctcgataa

SEQ ID NO: 28275 - DNA, 2817 bp, Yersinia intermedia
atggttaaaaaacagagcgttataaaagaacgactgagccagatgtactattttggtatagaatctcacgaattagccaactgcctgaaagaatgcaagcagaagcttattatggctggcgctaaagcagataacttacctagaacgttaactcaaaaattgcattttttgagtaagctacagccgaaagcacaacttattattcagacgtggtttagcactaacattcagttttctgagcataatgatcctaatgaaatccttaatgaacttctgttgaaagaaaaaagtgatgatgatgtagaacatttaaagccactatggcgtgccattctgggattttacgtctctcacccctgtccagagattattgaacgatttctgaatgatgaagaaatgaatcaactcaataatggtgatactgagaaatataatgataatttatttgcacaatctgcccttaatgtgacagatgaagatatagaacaatgtttattaattggtcagggacagaatatatatccttctgatcgaatactccctatgtttatcgctgctcttactgatacgcttaatggtaatcagaattcggctattttatggaaagaaaaactagccgctcatcctctcccgatagcaaaaaaacttgaaggtattattgcagagttcgagtctggtcatagccagaaaatagctgatagtctagcggtattaccagcagaatttgttacaccagagagcatggatgacaatatagatgacataacgtttgttggtattgttactaaatcactcccatcaggtgccttcttcgtttcaccgattgccttgtttattgataatagtttgagggatctctctgaggaaaatgttaaagttttgtatcctcatcatggtgaaaccgtcggttttatgaatcatttctccagaaattttatacaaggagaattgggtatatggcaagccacccatcagccatccgataagctcgctcaatacgttctgactaggtaccagtcacgcatatatactatcatcaggcttcctcatcagctcagcgagccggatgctataagagagtggttgttaacccagtatcagccaaaaaatgattctcccgttatttttctactagatgatgatgttgcattaaggcttcccggtgatatagcagaccctaaaaaatacgattttgattcaccattagatagctatagagaattagcctgcattgaattacgctctcggaaaattaccattgcgacccaactcccaatgctcgccgaaaaatatgactgtgctccagccagtacatggataaaaagattgataaagttgaattattcatcggtagattttcctgcttttagcaaagcgcaattacaaaatttagctaactttattgagagcaatgaatcagagagtgataaatatatccgcgctttagctcatctggagcaagtcgcagtttcaagagagtttttggatagtatggttcagaaattagtgaacctacctgtagtcgaagctcaaattaatgaacaaaagaaagtgatactttctgattatgagggtgagcaagagaaactaagattggcgattacatcactggtagacaaaaaaacacagcttgaagccgaaattgataatcagaaaaaacgtctgaaagctgaaacagagcgatcgaaaaaagtaattcgccaacaagaagcagaactggattcacgcatcagacaaaccttcgaaaatgcatctcaggctggcattgaaacgttggcgcaaactgcactattacgtgcattgattgctgatgttacaggaccggtttctcagttagaacctatgtgtaaattagaaccagtcactgcaatggcatcttcattggcattagagtcctttaaatcgccgatagcagttgaaatcaccagtaaaagacggttactgacgataatagaagagcaagcggcagtaactggattaagtgaaacgttattgtccggtattattgctgccgcaaatgtaacccctattattggattactgggaaaatatactaaaaaagtgctttctaccgtagcgaatattctgtcgagtggagtatggggggaagtctctattcacggtgatctttttagcatcagtgatttgatgagatctcccgtattagtcagaagcacagaaaacacttttaccatgtctctgggagattttctggcacaccagcaagcgaatgggcaggctacggtggtggaattacgtgggtttaaccgcatgccgccagaaacattgctgcctgagctgagtgattacctcctgagtgatgaacaagcatcaggcttctgctggacagacgaacatcagaaattacgccatctttcaatcaaccatccggtattatttgtgctgacgtttgtcgttggcaaaagcacatttccattacaagggtcagcttcccacaaattaccggtatttctagccgaaaaaatttggggtgatgagcaacctgctgatgaaactactgacgtaactgtgacatatgtaacatcgataatatggcaattgctttatgcgactctacgaaaatctagcagccatagtcataacgaactggaaatcttgcaaattttactaaaagatttcggttttactgagcaaaaatcagaaggtattgccaaactggtgtttgaagcggggcgtagtccatcggttaatctagtttcagatattgaaccactagcaccagtattgatgaattatgctcgggaaattacccaaggcgaagtcgcagctgtacttgattgcctgtttcaggcatag

SEQ ID NO: 28276 - DNA, 5949 bp, Yersinia pseudotuberculosis
atgaataatccactcgaaacgtttgaatcaataagagatttttacattacctatcttgagacggcatttcgtattggctctcctgcaattcaggcaaatcgccgagaattgcttgagaaacaaggtacgctgtgtgcggatctatttctggaaccgatgcccagatataaagaccatgatttaatcatcagcgatctacgggatgccttgaaaggggaaacatggctaccggggtttaccacccagcaaagggctgcatttatcgatctctgtctgggcggacttttgccacgcgatcccaaggatgctaccaaagggcgttttaaactctatacccatcagttagaaatgctacaacgaggtgtacaacccggcatgccgggcattgttacctcaggaacgggttcaggtaaaacagaatccttcttacttcccgttctggcgcaaattgccaaagaggcaagcaagtggccgcaaagtccctcgcttaaaagttggcgaccatggtggatagaaccaaacatacagcccaccttcatgagagagcgggaagggcggcctaaagctgtacgagcattaatcctgtatccgatgaatgcgctggtagaagatcaattagtgcgtatgcgtcgagcgctcgactctgatgaagctcatgaggtgatggattcccattttggtggcaatcgtattttctttggccgttataccagtgctaccaaagtgactgggtggttggatcatcctcgacagggtgacgatcagaaagagaaaaaacgagtgacaggtaaagtcgctgaattgcgtgaatatttgcaatttgctgaaaagacccataaagaggctgtatatcaagggaatcttgatgagaatgataatttacagttcaatttccctagaccagacggcggtgaagtgctaagtcgttgggaaatgcaaaaaactccgccagatattctcattaccaacactagtatgctttcaactatgctggtgcgtgaaattgacgacccgatctttgatcagacccaacaatggattgaacacgatccggacgcctacttttatcttgtgctcgatgaactgcatctacagcgaggaacagcaggtactgaagtcagctatttacttaaacatttacttaatcgtcttgggttggatcagccacaacatcgccacaaactacgtattctagcttcgagtgcttcactccccgttagtggcccagagggagagcaaagcatcaactatctgtggggcatgttcggcaaacgcggattgccaatgaatgccagcgcaaaggactggaagacttgtatcgttcatgggaaacccgaggcactggttgaaataccggatttttatggcgatcttcctgcgttttgccgagcggttaagaagctgagatctggtggaacaactgaagtatggaacgacatagcccgcggtttgggttgctatcataaatacgacactttagaagaattagcacaatatactgtccaatattcagcaagaatgctggaaaaagggtgtgctgatgataaaaaatctttacgagcaacggccattgaccaactcgcaatatccctctttgctgaacatcccaacgctcgagatggtgttagtgagttaatttggctacgaacggccgccgataattggtactcgtggtttgcgcatccttttcctgaccacatcccattgccacgttttcgtgctcatgcctttttacgtgcactggaaggattatatgttgctccgttgccatcaccagcacaggcagcaaaagacgaaaggaaccaatggctatttgccgatcttactgtcgaatccggcctacgctacggtgatcgtttgtatggtgataagcaacattcgcggcgtgtggaattgctctattgtgaatgttgcgcaacattatttttgggtggacaaccatctgctttctcagcgacaagtaaccggacagaactactaccaaacgatcctgacacagagaaactcccagaacatgccaaatcggtcatgattgagcgacgttcagcggaagagtatgtcctgttcatgccaaccgttgatcggttttggcctctaggtaatgaaaagctctctgatgacgattcttttggcaaatggaaggaagcaagttacgatccgtttacggcaacaattacgcaaccaatatcgcccgtaaaacccttaccagcaaccgatattgcagggtggttctatcgtgtcccttcaggtgattttatccccccgaaaagagatcagtcatctagtcaatcacctggttcttcgttgcctttccaatgccctgcatgtggtacctcatataaatacggtaaaggaaaacagtcacctatccgtggctttagggtaggttttgcgaaaacaacgcagctacttgctagtacattaatggcagagttacagcaatctggagatcaagaacgactggtaacgttttctgatagccgacaagatgcggctaaagcggcgctcgatcttgaatctggtcatcatgatgatattcggcgggagatcctcattggttccctgaaagagcttgctgcggataaatgttcacatgaaaaattgcgtatacgtttagacgaagttactaaacggaaaaaagaacttgatgctcttgacgatctaaacaagctttcagatatacagacaaaagaattagacgatctctggaaggaacgaaagcaaattagagaaacattattactcccacaggctgatagcatctcgctagaagctatattggaaaattctcccaaagcgggtaagccacttaatagattgctggctaaattggttgatgctggtattcatccgacggatcggactggcatcactcctgtacccgacccatcaaaacatagcgaagatattaaaacttttacttggcagcagctctttgataaaggtcatcaggataaatggtgctggaaggctttcccttattatgaaactgatctggatattgcccgtcaggaaatttcacgcgacctgaaagaattagctggtgaaagcgtgtttagtaaaacttactttgcgttagaagaagcaggatggggatatccctgcatccctatttctgaaaattattcacgggaaaaattaactatatttgacgcactacttcgagtattggcggacgcttaccgagtcgaaccatcgcagtatcgtaatcctgataatcctgacataccttggggaactacatcagcgatccctaaacggaatagggtatattgttttgcaaattctctatgccaacagtctggcggtagtgtcttaggcttacttgatgagttccttctgctacttgaaaaagcaggccatcaaggtggcatcattgatattgggaaagtacactttcgcctggtcgatcccgctgataatttctggcgttgcgacaaatgtggacgtgttcacttacatccgggggcaaaactctgcacccgttgccatgctcctttgcccgaaattccatctggcgaagccgggacattgcaaaaacaaaactatctcggaaaacgcatttcacactcatccggagttcgtcgtatgcgttctgaagaactcaccggcatgacggggaacccggcagcaaggctacgtcgcttcaaaggtattctgattgctgatgatgatgatattttaccaacgggactgaaaaactttgaaccagatcctgatctggacagattagctcgcgttattgacgtgctttccgtcaccactaccatggaagttggcgttgatatcggcgacttgcgtgccgtttttcaggccaacatgcctccacagcgctttaactaccaacagcgcgtaggccgcgccgggcgacgcggacaggcttttgcatttgtactaaccgcatgtcgcagcaaaagccacgatctgttttacttccgccacccagaaaagatcaccggcgaccttccacctccaccctttctgaccaccaagctggaaatgatctgccagcgactggttcgcaaaatctggctggttgcagcgtttaaatggctaaggcagaaaacagtcgactcacgccagccatggcctgtggatgagcacaggcagaaacccgataaccacggtgaattttttcaggttgactggttaaaagatcagcaggctgattggctaccatgtatccgtcaggcactaacagcgacgatcagcgatcgtgatgaatttgctcatgtctgcatgccgcaggatcaaaccttctatcataccattgtgcaattactgacccccgacaagcttatacaggatatttgtgcggcgttaaacgatggtgcaatggcaggtaaagggctagctgaggcgctggctgagcgagggcaattaccgatgtatggtatgccaacccgcacgcgtctgttacagaccagagccattgctactggcggagatgatatccagtttgccagcatggatcgcgatctggacattgcaatacaagaatttgcaccgggaaaatatctgatacaggacaaacggcgctacttaacggcaggctacgccgggatgctgaggcaacgctatcctaaatctatagaatttgactccaacgtgaatgaaccgggagaaggcagaatgatgaaagcctgtcctgtgtgtcacgtctggactccaatcaatcaccaagttcacgaatgtaccgcctgtggtgccgtgatggatgacattgagcagtaccaatgttatgtaccttatggatttattacctcactggaagataaatcagtcaaagaggacatcgatcaaactctgaccaatgccagccgagtttctgtagcagaagcctactcattttctgctatacaagagtctgacactaatgtcgctatccagcttcaatctcaaatttgtcttcaccgactgaatcgcggcacctatgccgatgaacgatggagcggtttcaatgcggtacagggcagcttacgtgttccctttagaaaagggggaacgtaccagccattaatggcaaatcgcgtttgggtagatagtcaattgcttgaggctgatcttttattgaagagacgtttcacaccttggcaggaaagtaaaacctccttttatcttgccgcacctaaagtgaccgacttgttggctctgatggtggtcaatacccccgtaggtctacagctacaaactcaggcgtttcgggccgcagcactttctgctgcatttatcattgttaactatgcttcaaaagagttactcgacattgatcccgaagaaatcgaaattctggaaccgcgtgtccagagattggaggacggtaggttagctccgatattgcaaatggctgaccgtctggttaatggttcaggattatgtgaacgcctacaacagaaaggcatatccggtacaccgatcattcttgaggtgatgagggctattgttagcaataaaaatgacttcccgcttaaagagcttttagacaaagatcatcgtgaaaaatgttttcaagggtgttactactgcctgcacagatatggcaatcaggcctatcacgggctgcttgattggcgactcggactggatgttatccagttgcttctggatgaaaattatgatgccggattgaatggtgatttctctgctcccggtatcgccgactggcgagagaacgccctgcgtttagcaaaagaggctgcttcactctttaatagcgaaattagaatggtaggccatattccgctgatcggcgttggcccacagcgttgggttgctgtgacccatccattctggagcgttgatggcgtttttactgctaattctgaacttgaaaggctatttcttgagtggcaactggagaaggaaacggtcagtacttttgatctctcccgccgtatgggtgctgttatgaccaagctcagaaacccagacagtaatcaggcgaattga

SEQ ID NO: 28277 - DNA, 1131 bp, Yersinia pseudotuberculosis
ttggaacagttatttaagcaggacgataatacccggtatgattatatgaacaatatttttgaaagagagcatgacaacatccaagttctttcactgttttctggtggtggtggaatggattttggtattgaatcagccggagggaaggttgtttttgctaatgatattgtggacaacgcttgtaagacgttagataagtattttcctgactcagatatcagacttggcgatatatcaaatatccaaaactttccgcgcgttgatgccgttgttggcggttatccgtgccagtcattttcgatggctggtaacaggaaaccggatagtgatgcccgaaccaatctttataaacagtttctgcgtgtattaaatattgttcgtccaaaatattttgttgcggagaatgtgtctgggttacagcaacttggcgcgggtagctttttagaacaacagctcactgcatatcagcaagcaggctatcaggtcagctatcatctggttaacgccaaagagtatggtgttccacaatcacgtaaacgtttgtttattattggtgttagaaacgacttaggacagtgttttgagttcccctctgcaacacatggtaagctgagccataagaatccgcatctaaaaccttatgcatctcatggtgatgctatccgcaatttgccattatggccagagggggagttttatgaacgccctcatgatcccgaagggcatttttcttggtatttcatgtcgagaaatcgcaaagctaaatgggatagccctgcttataccgtggtagctaattggcgtcatgtcacattacatccagcaagcccggtgatgaaattgacatggtcaaaccttcaggatggctggaaacagcgctgggacttttccgatgaatacgaacacttaaacgtcgatgacactcgcccaaaattggatcaggctagacgtttgtcgtggagagaatgtgcccgtatccagacattccatcatgattatgaaccggtgggagatatcgatgccaagtttactcaaataggtaatgctgttccccctatgttggctgaggttctttttaaccaccttttctcaggcgcaggcttgataaatctctcgacaaaaaacaggtga

SEQ ID NO: 28278 - DNA, 2784 bp, Yersinia pseudotuberculosis
atgggggaatgttttccggtttctttagacgagtggaatgctgccctagttaaagccattttttttgacccttcttgtgtatatttaactctgagtagaattgatgctactggacgaatttttgaacagctaaaaggatctcgtagcaaagatgaagccaagattagttttctggattcattcggtaaaagctcgaatgaaatacagaaccattttaaagatgtattaaggactgaaatattaaccataagagatggaattcctcccaatttttccatcttatatttaacattacttgcagctagtgctgacgataatactcatgatgaaggtgattttcgtgtcagattttccttgctgttgggttttgataaagataaaaaattcatcttcactgaacttcctaaaatgtggaagcgattagcaaaatggagtcataataaaaaaggatgttcacgccttatcttgccagaccctcagcgagaaacactcattggctattctaagcggctttctttcccttgctataaggatgactctttactaagaagtttactcgccagtaacaatttcgatagctactcaacgtttgagctagttagtcaagctattcataaaagaattaatagctttagcaaaatattcattaacgagtttattcacttccgggagttattattaaaggctgaaacacagcaggcttacaatagcccattctggggtgcaattagggacattacgcggaatgatgaaagccaacaaatagcatcgaatggccgtttttgcatacagctagactctgccgatacgtggaacccagaaatatatttgttaatggatcagaaaggtgccgaaatattagctccgcacgagatttatacactaccgcaacagacagatatttataccaagggttattataaatccagtgcgaatcggacattgatagatctttcgtctttattacaaaaacaaaagaaagggctttctaaatcgcgagtgggtatggcgttgagggcaagatgcttatctctttttaaggatgactcaggatatatgagctctgatggtcatttttttgataatggcccagtttgtcttgcagtcgatagtgattatgtaaaatgcattaatgtagcgtgtgaacgtattaacttaaaatttagaacattaggaattaattcagaatttgatgagtggcaatttcttgtatttgatgcagtaagccgacaggcactaactattctagcgcaggcacttcctaaaagtgctcaacaatttttgattcaaaactggatgccagcaagacctcatcttattggcggagccagattcgggcaggcgatattactcaaccctgctagtacgccttttattcgtatggaaggggcacgtagtggaaggtatgtaattagtgactgtgcgggtcgtgaattatctgttggtgaactgacgttcagtgacgaagggctatatatttcacctgaaaagttgattaatatttttgggcaagcattttgccgatatctgctaacactggatcaacgagaaaaccctatagtctatgaaattcatgtattagaccacgccccttatgcagactatcggcggttgaatgaactgagtaattggttggtcgatggtgctctgggaaccctagtatcactcgatgatattgctcataacgtatctacttctattcctgtacataagaaaaaatataccccgctgggcggtaagtggtcattatggcaacaaaatgagtatccacttgaggaatgtgaacgaatcgatttgcattccatacccgttgaacttgaatggttagcagaggcacttgctttgcgtttccaaaagcgtagtacgctaccttttgaggagctaaaaaaacatcttatctccgtatcaatcgcagtgggtatccctgaatggcgattgcgtcggatgctatttgcatccggctggctttgtataacagaaaatcgttatgcgccttatccgttaataatactgacctctcgtacaatctctatttctggagacgggggcgttacggtggcccgtatcagcggaatgatgacaaaaagcgagcgtaaccgactgcaacacttactggaggaaggcgagcaggcaaaacagttatcagtactaggtcacgatattacaacgggttgtattgagttaagcctattaagtattgagcgcgtcgaatggttggctgaacagttcggctggcgactaatcactagagctgatttccccgttagcccattaagcggtgtgatcttaccaataaccgaaatagaaaatatcccaacgttaccagtcaacatcaccgtgtcaacttggctgggagaaaaaaataagtggtctgaggagtcgacgttaattgcccccaatagcaatgccttaatgcgttgccaggaaaaaaaacgcaatcgttattttatcactacccaaaacagcgtttggcagaccgatagttttgcctggggattgatggttcagactattttttcaaagaaaatattgggtaccattaaccatcgaggggatctctgttggtcaaaaaatctagtaacattaccccttcctctcacgcaatggtggttacattttgctggtggttgtctttccattggtgatgatggacatgtttcatttgttggtggtggcagctccatttgggcagatatagatctttcagataagactacggaagtttttgtcgaccgagctactgttcgcagatcgcgggcgttaatgctgcgtagaggccgataa

SEQ ID NO: 28279 - DNA, 2790 bp, Yersinia pseudotuberculosis
atggttaaaaaacagcacgttataaaagaacgaatgaaccagatgttctgttttggtttagaacctcacgagttaatcaactgcctgaaagagtgtaaacaaaagcttatcatagcgggtgctaaagcggataatttacctagaacactgcctcagaaattacgttttctaaatacgcttcagcctaaggctcggttggttatccatgcatggtttagtactaatctactatttcctgaatcggatgaacccgaaaaaatcctcaatgaacttctagtaaaagaacgtaccgataacgacgaaatagaatcgtcaaagccattatggcgcgccattttgggattctacgtctctcagtcctgtcctgaaattatcgagcgatttcttaatgatgagtcgatggtgccgccccatgatgatatcgaagaatgcaatgagagtctttcagagcatctaagcataaatgtaacggatgatgatatcgaacagtgtttattaatcagtcgagggaacgccgtattgccatctgaccgcgtactaccgatgttcgttgctggtcttgttgatacgtttaatggtgagcaggaagcagccagtatatggaaagaaaaattatccaatcatgcgcttcctatggtgcaaaaactcgaaaatatcatcaaggaatttgagattactcgtggcccgaaagaggctgatagtgttgaagtattaccggcagagtttattgcaacagaggacatgaatgactatgtcgtcgatagtatggcttttgtcggtgtcgttaccaaattgctccccaacgaggctttctttgtttcacctgttggcttgcttattcacgacaaactgtgggcgctttctgaagaacaagcgaaaatcctgtatcctcatcgtggtgaaaccgttgggtttataaacaattacaccaaaaattttactcagggagagcttgggatatggcacgcggagcatcgaccgtccgacaaaccagcgcaatatgtgctaactagctaccagtcgcgcgtatacccggttatcagacttccccatttatccagcgagcccgattctgtcagagagtggttattaacccagtatcaaccacaagatgaatcaccagccatttttttgcttgatgatggggtggcattaagacttcctagtgatctacctgatcctaaaaaatatgacttcgatgtgccacttgatagctacagagaattgacctgtattaaattacattcgcggcaaatcaccattgtgactcaacttcctgtagccagcgaaaaatacgattgtgcacctgccagtacatggataaaacgtctgataaagttagaatattcatcaacaaacttccctgttttcaacaaaaaaaacttacaaaatttaactcactttattgctgagcatgagccagaaactgatggttatgtccgtgccatagctcatctcgaacaagttagtgtttcaagaggattattgggcaatatgattcaacaattgctaacactgcccgaagtagaggctcaaattaatgtagagaagaaagcgatcattactggctataaatgcgagcaagaacaattaagacaggctattgcttctctggcagagaaaaaagtgcaacttgaagcggaaattgataaacagaaaaaacacctaaaaacagaaacagagaaatcaaaaaaagcgcttcgccaacaggaagtagaactggattcacgtatcagacaaaccttcgaaaatgcatcacaagccggtatcgaaacgttggcgcaagcggcactactgcgggcattgatcgctgatgtggccgtaccggtttctcaaccagagcctacgactaaacctgagcccaccattgctttgccactgtcatcgccaatagcaaataagctcatcaataaaaggcagctattgactgtgatagaaaaacaggcggtggcaacagggttaagtgaaaccttattatctggccttgtcgcagcggctaatgtaacacctattattggactgctaggaaaacacacaaaaaaagcactttataccatagcgaatattctttcgggcggagtcttgggggaagtttctatccacggtgatctttttagtatcagtgatttaatgaagtctccagtgttagtcagaagtacagaaaacacctgcaccatgactctgggggattttctaatgcatcagcaagataatggactgtctacagtggtggagttacgtggatttaaccgtatgccaccagagacattgttgcctgagttgagtgactgcctgcttagtgacgaacaggcatctggattttgctgggtagatcaacaccagacactgcgccatctttcaatcagccaaccgatactatttgtgttgacgtttgctgttggaaaaagcacattccccttacaaggacctgcagtccacagattgccggtgtttctggcagaaaatctgtggggtgatgaacaatcagctgattcctcgattaccattacacccactcatgtcactccggcattatggcaatcgttctaccaagaagctaatccgtctgctaatcatgactttaacgaacaacaaaccttgcgggcagtactacaagcatttggtttttctgaaagcaaatcacgggcgattgcggcactggcatttacggcggggcgtagcacctcagaggcagaggctttcggtagtgagttgttagcccgtacattaatggatgaaattgatcatggtgaagctgccacgatacttgattgtctgtttcagcgatag

SEQ ID NO: 28280 - DNA, 5946 bp, Yersinia pseudotuberculosis
atgaataatccacttgaaacatttgaatcaattagagatttctacatcacttatcttgaaactgcattccgcattggttccccagctattcagacgtatcgccgagaattacttgaaaagcaaggtacgctatgtgcagatctatttctggaaccaatacctaaatatcaagatcatggcttaacaatcagcgatctaagagatacctcgaaaggggaaacatggttaccggaatttactgctctgcaaagggctgcatttgttgatctctgtttgggcgggcttttgcctcgtgatcccaaagatcccaccaaggggcgttttaaactttatactcaccagctagaaatgttacaacggggcgtacagtctggtatgccgggcatcgttacttcaggaactggttcaggtaaaacagaatcttttttactgcctgttctggctcaaattgcacaagaggcaagtaaatggccgcagggttctgggtttaaaagttggcaaccatggtggagagaaccaaatactcaccctacctttatgcgagatctggaagctcctgctctcgaacgacctaaagctgtacgagcgctaatcttgtatccaatgaatgcgctagttgaagatcagttagtgcgtatgaggcgtgcgctcgactctgatgaagcccatgaggtgatggattcgcattttggcggcaatcgaattttttttggtcgttacaccagtgctactaaggttactggctggttgaaacatcctcgacaacataacgataaaaaagagaaaaaacgagtattgggcaaagtgtctgaattgcgtgaatacatgcaattcgctgataaaacccacaaagaagcggtgcatcaaggcaatctagataaggatgataatctacagttcaattttccaagactgggtgggggggaagtactcagtcgttgggagatgcaaaaaatgccaccagatattcttatcactaacaccagtatgctctcaactatgttggtgcgtgaaattgatgatcctattttcgaccagactcagcaatggattgaacgagatccgaatgcctatttttaccttgtacttgatgaattacatctccagcgtggtactgcaggcaccgaagttagctatttactcaaacatttaattaatcgtctgggcttggatcaaccacagcaccggcacaaattacgcattctggcttccagtgcctcacttcctgttggtggccccgagggcaaacaaagtattgactatttgtgggggatgtttggtcagcgcggattgccagtgaacgctagcgctaaggactggggttcttgtattgttgatggaaagcccattaatttggtagaaataccgaaattttgtggtgatcttcaagcattttgtaacgcggttgagcagctaaaatctggtagagcaacaggggcatggaacgatatcgctcgctgcctaggatgctatcgtgatggtgactcagtcgaagagttggcacaacatacagtcttactggctgcgagaatgcttgaaaaagggtgtattgacgataaacaatctttgcgagccactgctattgatcagctcgcaatatccttgttcgcagaacatcccaatgctcgagagggtgttagagagttaatttggctacggactaccgctgataactggtactcatggtttgcgcatccttttcctgatcacattctactaccgcgttttcgcgcccatgcatttttacgtgcgctgcaggggttatatgttgctccgcttccattgctaccgcaggcgctaaaagacgaaataaatcaacagttatttgctgatcttactgtcgagtctggtttacgctatggcgatcgtttgtatggtgataagagaacgcggcgcgtagagctactctattgtgagtgttgtgcaacactatttttgggtggcaaaccgtctgcattctcaatgataagtcgtcatacagaattattacccaacgaccctgacactgaaaagctcccagaacacgccaaatcggtaatgattgagcagcgttcagcagaagagtacgctttgtttatgccaactgttgatcggttttggccattaggtgatgaaaaactctctgatgaagactcttttggcaaatggaaagaggcaagctacgatccattcactgcaacgattactcagccaatatcgcccgtaaaacctataccagaaactgatattgcaggttggttctatcgtgtcacacccggtgatttcaccaatcccaaaaggggacagtcatccagccagtcacccggttccgcattgccttttcagtgcccagcatgtggcacctcatatatatacggtaaaggaaaactttcgcccattcgtggctttcgggtggggtttgcgaaaaccacgcaactacttgccagtacattaatggcagagttacaacaatctggcgatcaggagcgattggtaacgttttccgatagtcggcaggatgcagctaaagctgcacttgatctagaatctggtcatcatgatgatgtccgtcgtgagatcctcatcggctcgcttaaagagattgcggcgggcaaatgttcgcatagaaatttacgtatgcgcttagacgaggttaacaaacggagaaaagaacttgatgctatggccgagctttcactttcagacgcacaggaaaaagaattagaggacctctgggacgaacggcagcaaatcagagaaacattattgcacccagaggctgatagtatctcgctggatacaatactggaaaactcccccaaggcaaataagcaacttaaccgattgctagcaaagttagtagaggccggtatccatccgacggatcggactggtattactcctgtgcccgatccatcaaaacatcgggaagacattcaaacgtttacgtggcagcagctatttgacaaagaccatcaggataaatggcgttggaaaactgtccttaactacgaaaccgacctagacgttgctcgtcaggaaatttcacgagacctgaaagaattagctggtgaaagtgtgtttagtaaaacgtactttgcgttggaagaggcaggatgggggtatccctgcatccctgtttctgatggttactctcgggaaaaattggccacttttgacgcgctacttcgagtattggctgacgcttaccgagttgatccatcgcaatatcgtaatcctgataatcccgacactccttgggaagaagcatcggcgatccctaaactgaatagagtgtatcgtttcgctatttcactatgtaaacgatctggctgtagtgttttaggtctacttgatgagttccttaaactacttgaaaaagcgggtcatcaaggcggtatcattgatattggcaaagtacacttccgcttggtggactctaccgataactactggcgttgtggcaagtgcggtcgtgttcacttacatctagggggcggaatatgcacccgctgccatgatcctttaccagaaatgcagtttgataaagctaaggctctgcaagaacaaaactatctcggtaaacgtatctcacattcatccggcaatcttcgaatgcgttctgaagagctcactggtatgactgaaaacccagctgcaaggttacgccgtttcaaaggtattttaattgcagatgatgatgatatttttccaacaggactgaaaaatttcgatccagacccagccctagatagaaaggcccgagttatcgatgtgctttctgttactaccaccatggaagttggcgttgatatcggcgatttgcgagctgtgtttcaggctaacatgccgccacagcgattcaactatcagcaacgcgtagggcgagctgggcgacgaggacaggcttttgcgttcgtattaacagcatgtcgtagtaaaagccacgatttgttttacttccgccaccccgaaaagattactggagaccttccacctccaccattcctaactacaaaacttgaaatgatctgcatgcggttggtacgtaaagtctggctggtggctgcatttaagtggttgagggtaaaaatagaaggcacaggccaagcatggcccgctgacgttagtaggcataaacctgataaccatggtgaattcttccagattgactggctacaagacaatcaatattactggttgccacttatccatcaagcactggcagctacaattggaaaacgtgatgaatttgtccatgtttgtatgccggaggatcaagctttctatcagactatcgtgcgttcactgacacttgaaaatctgatacaggacattggcgatgcactgggcgatcccgcgatgactgggaaaggacttgctgaagcgttggctgaacgaggcaaattcccgatgtacggcatgccaactcgaacacgattactgcagactagggcaattagtcgcggtaaagatgaggtccagtttgccagtatggatcgagaccttgatattgctatacaagagtttgttccggggaaatatttagttcaggacaagcggcgatacttaacagcaggttatgctgggatgctgagacagcgctatcccaattctacagattttgacctgactacccgtgaattgggtgaaagtagaatgatgaccgcctgtccggcgtgtggcgtctgggcccctattaaccaagaagtcaacatatgtacagcctgcggtgcagttatggatgatgttgagcagtaccaatgctatgtaccttatggatttattaccacgctggaagataaatctgtcaaagaggatggcgatcaaaccctggccaatgctagccgtgtttctgttgccgaagcttattcattctctgctgcaccagaacctgatgtgaatgttgctatccagcttgagtcgcagatcctccttcatcgactgaatcgcggcacttatgccgatgaacagtggagtggtttcaatgcaatacagggcaatctacgggttcctttcagaaaaggagggaagtataggccattgacagcaaatcacgtgtggatagacagtgggctactaggtaatgatctatcactgagaaaacgcttcacacctttgtcagaaaaccgaacatctttttaccttgcggcacctaaagtgactgacttattagcgttgatggtggtgagtactcccgctaatcttcaattacagacccccgcattccgggctgcagcactgtcagccgcatttatgatcgttaactatgcatcaaaagagctgcttgatatcgatccggaagaaatcgaaattctagagccgcgtgtacagctattaaaaaatggcaagttagcaccgatactgcagatggccgaccgcttggttaatggttccggattatgtgaccgtttacagcagaaaggaacgtcaggtacaccgattattcttgaagtgatgagagccattgttagcaacaaaaatgactttccactaagagatcttttagatgatgagcatcgggaaaaatgtttgcaggcatgttattactgcctgcacagatatggcaatcaggcctatcacggattgcttgattggcggcttggactagatgttatccagctacttctggatgataattatgatgccggattgaatggtgatttctcagctcccggtattgctgattggcgaaacaacgccttgtgtttagcaaaagaagcagcatcactctttgacagtaaaattagaatggtaggccatgttcctttgattggcattggcccgcaacgctgggtggcagtaacccaccctttctggaatgaaaatgctatttttgctacaaatccagagtttaaaaggctattccttgagggacaattagagaaaaaaactgtcaatacattcgatctctctcgtcgaatgggatctgtaatgaccaaattgaaaaatccggaaagcaactag

SEQ ID NO: 28281 - DNA, 1089 bp, Yersinia pseudotuberculosis
atgagcaatatttttgaaagagagcatgacaatatccgagttctttcactgttttctggcggtggtggcatggattttggtattgaatctgccggtgggaaggttgtttttgctaatgatattgttgaaaacgcttgtaagacattagataagtattttcctgactcagatatcagatttggcgatatatccaatatccagagttttccatgtgttgatgttgttgttggcggttacccgtgccagtcattttcgatggcgggtaacagaaagccggatagtgatgctcgcagcaatctttataagcagtttttacgtgtgttaaatattgtccgcccaaaatattttgtggcagagaatgtgtctggattacagcaacttggtgcgggcagctttttagaacaacaacttacagcataccagcaagctggttatcaggtcagttatcatctggttaatgccaaagaatatggtgtgccacagtcacgtaagcgtttgtttattattggtgtacgaaaagatttagatcaatattttgagttccctctagccactcacggtaagctaagccagaagaaccctcatttaaaaccttatgcgtctcatggtgatgctatttgcgatcttcccttatggccagaaggggagttttatgaacgtccccatgatccagaaggccatttttcatggtatttcatgtcaaggaatcgtaaggctaaatgggatagccctgcttataccgtagtagctaactggcgacatgtcacattgcatccagcaagcccagtcatgaaactaacctggtcaaaccttgatgacggctggaaacaacgctgggacttttccgatgaatacgaacacttaactgttgataatacccgccctaaattggagcaagccagacgtttgtcatggcgagaatgtgctctcatacaaacgtttcgccacgattatgaaccggtaggggatattgatgccaaatttacccaaataggtaatgcggttcctcctatgctggctgaggttctttttagccaccttttttcaggcgcaggcttgaagaatctctcgataaaagcaggtaattga

SEQ ID NO: 28282 - DNA, 2787 bp, Yersinia pseudotuberculosis
atggaggagtctttcccggttactttagatgagtggaatactgccctagttagagccattttttttgacccttcttgtattggttcaacactgagtcgtattgatgcgaccggacgcatttttgataaattgaaaggtactcgtagtaaagaagaagctaaaggtagctttttgaatgcgtttggtactagtgcagaaaagatacaaaattattttagagatgaactaaggcttgatatattagcggcgagaaacggggttcctcctcattttgctatcttatatttaacgttacttgccgccagtgctgatgattatacctatggtgaaggtgattttcgtgtaagattttcccttctgctaggttttgataaagataagaaatttatctttagtgaactccctaaaatgtgggagcgattagaaagatggagtcataataaaaaagaatgtgcgcatcttattttaccagctcctcatcacgaaacattaattggttattcaaaaagactttcctttccttcttataaagacgatttattactaagacgcttgctggctgataaaaatctggatagtcattcaacatttgaatcaattagtcaaatcattcatcaaaagataaactccttcagtcaaacattcatcaatgaatttgatcagtttagaagactgctattaaaggctttatcgaagcaagcttataacagcccattttggggtgccgttcgagatattactcgacacaaggaaaaccaacaagtaactgcgaatggacgtttttgcatacagttagaagatgctactgatatgtggaaccccgaaatttatttattgatggatagcaaaggggctaaggaattaggtaccaatcgaatctacacactaccacagaaaacagaaaattatagcaaaggctattgtaaatcagatgtgaataacactctgatacacctttcattactattacaaaaacataaaaaaggattatcgcaatcgcgagtaggcatggcattgcaggctggatgtttaccactatttcgggatgattcgggatttatgaattctgatggtcactattttgacgatggtccagtttgtctagtaatcagcagtaactatgtaaggaaagttaatgcggtatgtaatcatataaagttaagattccattcattaggacttaccccagagctgaatgaatggcaacttattgtatttgaatcagtaagtcaacaggcattgctcactttggcaactgctatgcctaaactcgcccaacgattttttattcaaaattgggtgcctacaagacctcatttggctggcggagcgcgctttgggcaagcagtgttacttaatccggccagtactccatttattcgtatggaaggagctagcagcggaagattcgtaattagtgactctgcggataataaactggctacaggcgaacttacggtcagtgacgacggattatatatttcacctgaaaagttgattgccatttccggacaaacactttgccgttatttattaacactggatcaacaagaatcacctctggtttatgatgtttgtgtattagaccatgctcctgatgcagcttatcgacgtttaaatgaaccaaatgattggttgattgatggtcctatgggaactttagtaccatttaatgatattgctaataatgtacctgcatctaggtctataaataagctaaaacttacccctatggggggggagtggtcattatggcaacaaaatgattatccgcctgcagaatgcgaatctattgatttgcattctattcctattgcgctcgactggttagtcgaagcactggcgctgcgttttcaaaggcgtagcacactgccttttgatgaactgaataaacatcttataccagtttcaatcgctgtaaacattcctgtttggcgattacgtcgaatgctgtttacgactggctggctttcaatgactgagagtcgttatgctccttatccgttagtaacactggctgtccgtacaatatcagtttctgacgagaaagcgggtgtggtagctcgtatctgtggaatgatgacaaaaagcgagcgtaaccaactgcagtgcgcactggtagatggtgagcaagttaaacggtggtcagtattaggccatgatcttgcagccggttgtattgagttaaatttgacaggtattgagcgcgtagaaacattgattgaacagtttggtttgcaattagtcaccaaaacagatttttctgtcagcccattaagtggtgtaatcctaccaataacccaaataaaaaatatcccaacgctatctgaaaacatcaatgtatcgacttggcaggaagggaaaaatatgtggtctgaagagactacggcacttgatccttgcagcaatgctttaatgcgctgccaggaaaaacagcgtaatcgttattttatcactactcaaaatgcttgctggcagaccgatagttttgcttggggattggtcgttcatgctattctttcaaaaaaaacattgggttatcagagccataatggcgatctctcttggtcaaaaaatctcattgcattaccgcttcctctaacacaatggtggttacattttgctggtggttgcctttccattagtgataacggcagcatttcatttttaggtggaggtagttccatgtggggcgatatcgattgttcaaatgagacagagcaactatatatcgatcgagctactgttcgccgctcacgagcgttaaagctacgtagagctcgataa

SEQ ID NO: 28283 - DNA, 2817 bp, Yersinia pseudotuberculosis
atggttaaaaaacagagcgttataaaagaacgactgagccagatgtactattttggtatagaacctcacgaattagccaactgcctgaaagaatgcaagcagaagcttattatggctggcgctaaagcagataacttacctagaacgttaactaaaaaattgcagtttttgagtaagctacagccgaaagcacaacttattattcagacgtggtttagcactaacattcagttttctgagcataatgatcctaatgaaatccttaatgaacttctgttgaaagaaaaaagtgacgatgatgtagaacatttaaagccactatggcgtgccattctgggattttacgtctctcaatcctgtccagagattattgaacgatttctgaatgatgaagaaatgaatcaactcaataatggtgatattgataaatataatgataatttatttgcacaatctgcccttaatgtgacagatgaagatatagaacaatgtttattaattggtcagggacagaatatatatccttctgatcgaatactccctatttttatcgctggtcttactgatacgcttaatggtaatcagaattcggctattttatggaaagaaaaactagccactcatcctctcccgatggcaaaaaaacttgaaggtattattgcagagttcgagtctggtcatagccaaaaaatagctgatagtctagcggtattaccagcagaatttgttacaccagagagaatggatgacaatatagatgacataacgtttgttggtattgttactaaatcactcccatcaggtgccttcttcgtttcaccgattgccttgtttattgataatagtttgagggatctctctgaggaaaatgctaaatttttgtatcctcatcatggtgaaaccgtcggttttatgaatcatttctccagaaattttatacaaggagaattgggtatatggcaagccacccatcagccatccgataaggtcgctcaatacgttctgactaggtaccagtcacgcatatatactatcatcaggcttcctcatcagctcagcgagccggatgctataagagagtggttgttaacccagtatcagccaaaaaatgattctcccgttatttttctactagatgatggtgttgcattaaggcttcccggtgatatagcagatcctaaaaaatacgattttgattcaccattagatagctatagagaattagcctgcattgaattacgctctcggaaaattaccattgcgacccaactcccaatgctcgccgaaaaatatgactgtgctccagccagtacatggataaaaagattgataaagttgaattattcatcggtagattttcctgcttttagcaaagcgcaattacaaaatttagcttactttattgagagcaataaatcagagagtgataaatatatccgcgctttagctcatctggagcaagtcgcagttgcaagagagtttttggacagtatggttcagaaattagtgaacctacctgtagtcgaagctcaaattaatgaacaaaagaaagtgatactttctgattatgagggtgagcaagagaaactaagattggcgattgcatcactggtagacaaaaaaacacagcttgaagccgaaattgataatcagaaaaaacgtctgaaagctgaaacagagcgatcgaaaaaagtaattcgccaacaagaagcagaactggattcacgcatcagacaaaccttcgaaaatgcatctcaggctggcattgaaacgttggcgcaaactgcactattacgcgcattgattgctgatgttacaggaccggtttctcagttagaacctatgtgtaaattagaaccagtcactgcaatggtatcttcattggcattagagtcctttaaatcgccgatagcagttgaaatcaccagtaaaagacggttactgacgataatagaagagcaggcggcagtaactggattaagtgaaacgttattgtccggtattattgctgccgcaaatgtaacccctattattggattactgggaaaatatactaaaaaagtgctttctaccgtagcgaatattctgtcgagtggagtatggggggaagtctctattcacggtgatctttttagcatcagtgatttgatgagatctcccgtattagtcagaagcacagaaaacacttttaccatgtctctgggagattttctggtgcaccagcaagcgaatgggcaggctacagtggtggaattacgtgggtttaaccgcatgccgccagaaacattgctgcctgagctgagtgattaccttctgaataatgaacaagcatcaggcttctgctggacagacgaacatcagaaattacgccatctttcaatcaaccatccggtattatttgtgctgacgtttgtcgttggcaaaagcacatttccattacaagggtcagcttcccacaaattaccggtatttctagccgaaaaaatttggggtgatgagcaacctgctgatgaaactactgacgtaactgtgacatatgtaacatcgataatatggcaattgctttatgcgactctacgaaaatctagcagccatagtcataacgaactggaaatcttgcaaactttactaaaagatttcggttttactgagcaaaaatcagaaggtattgccaaactggcgtttgaagcggggcgtagtccatcggttaatctagtttcagatattgaaccactagcaccagtattgatgaattatgctcgggaaattacccaaggcgaagtcgcagctgtacttgattgcctgtttcaggcatag

SEQ ID NO: 28284 - DNA, 5949 bp, Yersinia pseudotuberculosis
atgaataatccactcgaaacgtttgaatcaataagagatttttacattacctatcttgagacggcatttcgtattggctctcctgcaattcaggcaaatcgccgagaattgcttgagaaacaaggtacgctgtgtgcggatctatttctggaaccgatgcccagatataaagaccatgatttaatcatcagcgatctacgggatgccttgaaaggggaaacatggctaccggggtttaccacccagcaaagggctgcatttatcgatctctgtctgggcggacttttgccacgcgatcccaaggatgctaccaaagggcgttttaaactctatacccatcagttagaaatgctacaacgaggtgtacaacccggcatgccgggcattgttacctcaggaacgggttcaggtaaaacagaatccttcttacttcccgttcttgcgcaaattgccaaagaggcaagcaagtggccgcaaagtccctcgcttaaaagttggcgaccatggtggatagaaccaaacatacagcccaccttcatgagagagcgggaagggcggcctaaagctgtacgagcattaatcctgtatccgatgaatgcgctggtagaagatcaattagtgcgtatgcgtcgagcgctcgactctgatgaagctcatgaggtgatggattcccattttggtggcaatcgtattttctttggccgttataccagtgctaccaaagtgactgggtggttggatcatcctcgacagggtgacgatcagaaagagaaaaaacgagtgacaggtaaagtcgctgaattgcgtgaatatttgcaatttgctgaaaagacccataaagaggctgtatatcaagggaatcttgatgagaatgataatttacaattcaatttccctagaccagacggcggtgaagtgctaagtcgttgggaaatgcaaaaaactccgccagatattctcattaccaacactagtatgctttcaactatgctggtgcgtgaaattgacgacccgatctttgatcagacccaacaatggattgaacacgatccggacgcctacttttatcttgtgctcgatgaactgcatctacagcgaggaacagcaggtactgaagtcagctatttacttaaacatttacttaatcgtcttgggttggatcagccacaacatcgccacaaactacgtattctagcttcgagtgcttcactccccgtgagtggcccagagggagagcaaagcatcaactatctgtggggcatgttcggcaaacgcggattgccaatgaatgccagcgcaaaggactggaagacttgtatcgttcatgggaaacccgaggcactggttgaaataccggatttttatggcgatcttcctgcgttttgccgagcggttaagaagctgagatctggtggaacaactgaagtatggaacgacatagcccgcggtttgggttgctatcataaatacgacactttagaagaattagcacaatatactgtccaatattcagcaagaatgctggaaaaagggtgtgctgatgataaaaaatctttacgagcaacggccattgaccaactcgcaatatccctctttgctgaacatcccaacgctcgagatggtgttagtgagttaatttggctacgaacggccgccgataattggtactcgtggtttgcgcatccttttcctgaccacatcccattgccacgttttcgtgctcatgcctttttacgtgcactggaaggattatatgttgctccgttgccatcaccagcacaggcagcaaaagacgaaaggaaccaatggctatttgccgatcttactgtcgaatccggcctacgctacggtgatcgtttgtatggtgataagcaacattcgcggcgtgtggaattgctctattgtgaatgttgcgcaacattatttttgggcggacaaccatctgctttctcagcgacaagtaaccggacagaactactaccaaacgatcctgacacagagaaactcccagaacatgccaaatcggtcatgattgagcgacgttcagcggaagagtatgtcctgttcatgccaaccgttgatcggttttggcctctaggtaatgaaaagctctctgatgacgattcttttggcaaatggaaggaagcaagttacgatccgtttacggcaacaattacgcaaccaatatcgcccgtaaaacccttaccagcaaccgatattgcagggtggttctatcgtgtcccttcaggtgattttatccccccgaaaagagatcagtcatctagtcaatcacctggttcttcgttgcctttccaatgccctgcatgtggtacctcatataaatacggtaaaggaaaacagtcacctatccgtggctttagggtaggttttgcgaaaacaacgcagctacttgctagtacattaatggcagagttacagcaatctggagatcaagaacgactggtaacgttttctgatagccgacaagatgcggctaaagcggcgctcgatcttgaatctggtcatcatgatgatattcggcgggagatcctcatcggttccctgaaagagcttgctgcggataaatgttcacatgaaaaattgcgtatacgtttagacgaagttactaaacggaaaaaagaacttgatgctcttgacgatctaaacaagctttcagatatacagacaaaagaattagacgatctctggaaggaacgaaagcaaattagagaaacattattactcccacaggctgatagcatctcgctagaagctatattggaaaattctcccaaagcgggtaagccacttaatagattgctggctaaattggttgatgctggtattcatccgacggatcggactggcatcactcctgtacccgacccatcaaaacatagcgaagatattaaaacttttacatggcagcagctctttgataaaggtcatcaggataaatggtgctggaaggctttcccttattatgaaactgatctggatattgcccgtcaggaaatttcacgcgacctgaaagaattagctggtgaaagcgtgtttagtaaaacttactttgcgttagaagaagcaggatggggatatccctgcatccctatttctgaaaattattcacgggaaaaattaactatatttgacgcactacttcgagtattggcggacgcttaccgagtcgaaccatcgcagtatcgtaatcctgataatcctgacataccttggggaactacatcagcgatccctaaacggaatagggtatattgttttgcaaattctctatgccaacagtctggcggtagtgtcttaggcttacttgatgagttccttctgctacttgaaaaagcaggccatcaaggtggcatcattgatattgggaaagtacactttcgcctagtcgatcccgctgataatttctggcgttgcgacaaatgtggacgtgttcacttacatccgggggcaaaactctgcacccgttgccatgctcctttgcccgaaattccatctggcgaagccgggacattgcaaaaacaaaactatctcggaaaacgcatttcacactcatccggagttcgtcgtatgcgttctgaagaactcaccggcatgacggggaacccggcagcaaggctacgtcgcttcaaaggtattctgattgctgatgatgatgatattttaccaacgggactgaaaaactttgaaccagatcctgatctggacagattagctcgcgttattgacgtgctttccgtcaccactaccatggaagttggcgttgatatcggcgacttgcgtgccgtttttcaggccaacatgcctccacagcgctttaactaccaacagcgcgtaggccgcgccgggcgacgcggacaggcttttgcatttgtactaaccgcatgtcgcagcaaaagccacgatctgttttacttccgccacccagaaaagatcaccggcgaccttccacctccaccctttctgaccaccaagctggaaatgatctgccagcgactggttcgcaaaatctggctggttgcagcgtttaaatggctaaggcagaaaacagtcgactcacgccagccatggcctgtggatgagcacaggcagaaacccgataaccacggtgaattttttcaggttgactggttaaaagatcagcaggctgattggctaccacgtatccgtcaggcactaacagcgacgatcagcgatcgtgatgaatttgctcatgtctgcatgccgcaggatcaaaccttctatcataccattgtgcaattactgacccccgacaagcttatacaggatatttgtgcggcgttaaacgatggtgcaatggcaggtaaagggctagctgaggcgctggctgagcgagggcaattaccgatgtatggtatgccaacccgcacgcgtctgttacagaccagagccattgctactggcggagatgatatccagtttgccagcatggatcgcgatctggacattgcaatacaagaatttgcaccgggaaaatatctgatacaggacaaacggcgctacttaacggcaggctacgccgggatgctgaggcaacgctatcctaaatctatagaatttgactccaacgtgaatgaaccgggagaaggcagaatgatgaaagcctgtcctgtgtgtcacgtctggactccaatcaatcaccaagttcacgaatgtaccgcctgtggtgccgtgatggatgacattgagcagtaccaatgttatgtaccttatggatttattacctcactggaagataaatcagtcaaagaggacatcgatcaaactctgaccaatgccagccgagtttctgtagcagaagcctactcattttctgctatacaagagtctgacactaatgtcgctatccagcttcaatctcaaatttgtcttcaccgactgaatcgcggcacctatgccgatgaacgatggagcggtttcaatgcggtacagggcagcttacgtgttccctttagaaaagggggaacgtaccagccattaatggcaaatcgcgtttgggtagatagtcaattgcttgaggctgatcttttattgaagagacgtttcacaccttggcaggaaagtaaaacctccttttatcttgccgcacctaaagtgaccgacttgttggctctgatggtggtcaatacccccgtaggtctacagctacaaactcaggcgtttcgggccgcagcactttctgctgcatttatcattgttaactatgcttcaaaagaattactcgacattgatcccgaagaaatcgaaattctggaaccgcgtgtccagagattggaggacggtaggttagctccgatattgcaaatggctgaccgtctggttaatggttcaggattatgtgaacgcctacaacagaaaggcatatccggtacaccgatcattcttgaggtgatgagggctattgttagcaataaaaatgacttcccgcttaaagagcttttagacaaagatcatcgtgaaaaatgttttcaagggtgttactactgcctgcacagatatggcaatcaggcctatcacgggctgcttgattggcgactcggactggatgttatccagttgcttctggatgaaaattatgatgccggattgaatggtgatttctctgctcccggtatcgccgactggcgagagaacgccctgcgtttagcaaaagaggctgcttcactctttaatagcgaaattagaatggtaggccatattccgctgatcggcgttggcccacagcgttgggttgctgtgacccatccattctggagcgttgatggcgtttttactgctaattctgaacttgaaaggctatttcttgagtggcaactggagaaggaaacggtcagtacttttgatctctcccgccgtatgggtgctgttatgaccaagctcagaaacccagacagtaatcaggcgaattga

SEQ ID NO: 28285 - DNA, 1131 bp, Yersinia pseudotuberculosis
ttggaacagttatttaagcaggacgataatacccggtatgattatatgaacaatatttttgaaagagagcatgacaacatccaagttctttcactgttttctggtggtggtggaatggattttggtattgaatcagccggagggaaggttgtttttgctaatgatattgtggacaacgcttgtaagacgttagataagtattttcctgactcagatatcagacttggcgatatatcaaatatccaaaactttccgcgcgttgatgccgttgttggcggttatccgtgccagtcattttcgatggctggtaacaggaaaccggatagtgatgcccgaaccaatctttataaacagtttctgcgtgtattaaatattgttcgtccaaaatattttgttgcggagaatgtgtctgggttgcagcaacttggcgcgggtagctttttagaacaacagctcactgcatatcagcaagcaggctatcaggtcagctatcatctggttaacgccaaagagtatggtgttccacaatcacgtaaacgtttgtttattattggtgttagaaacgacttaggacagtgttttgagttcccctctgcaacacatggtaagctgagccataagaatccgcatctaaaaccttatgcatctcatggtgatgctatccgcaatttgccattatggccagagggggagttttatgaacgccctcatgatcccgaagggcatttttcttggtatttcatgtcgagaaatcgcaaagctaaatgggatagccctgcttataccgtggtagctaattggcgtcatgtcacattacatccagcaagcccggtgatgaaattgacatggtcaaaccttcaggatggctggaaacagcgctgggacttttccgatgaatacgaacacttaaacgtcgatgacactcgcccaaaattggatcaggctagacgtttgtcgtggagagaatgtgcccgtatccagacattccatcatgattatgaaccggtgggagatatcgatgccaagtttactcaaataggtaatgctgttccccctatgttggctgaggttctttttaaccaccttttctcaggcgcaggcttgataaatctctcgacaaaaaacaggtga

SEQ ID NO: 28286 - DNA, 2784 bp, Yersinia pseudotuberculosis
atgggggaatgttttccggtttctttagacgagtggaatgctgccctagttaaagccattttttttgacccttcttgtgtatatttaactctgagtagaattgatgctactggacgaatttttgaacagctaaaaggatctcgtagcaaagatgaagccaagattagttttctggattcattcggtaaaaactcgaatgaaatacagaaccattttaaagatgtattaaggactgaaatattaaccataagagatggaattcctcccaatttttccatcttatatttaacattacttgcagctagtgctgacgataatactcatgatgaaggtgattttcgtgtcagattttccttgctgttgggttttgataaagataaaaaattcatcttcactgaacttcctaaaatgtggaagcgattagcaaaatggagtcataataaaaaaggatgttcacgccttatcttgccagaccctcagcgagaaacactcattggctattctaagcggctttctttcccttgctataaggatgactctttactaagaagtttactcgccagtaacaatttcgatagctactcaacgtttgagctagttagtcaagctattcataaaagaattaatagctttagcaaaatattcattaacgagtttattcacttccgggagttattattaaaggctgcaacacagcaggcttacaatagcccattctggggtgcaattagggacattacacggaatgatgaaagccaacaaatagcatcgaatggccgtttttgcatacagctagactctgccgatacgtggaacccagaaatatatttgttaatggatcagaaaggtgccgaaatattagctccgcacgagatttatacactaccgcaacagacagatatttataccaagggttattataaatccagtgcaaatcggacattgatagatctttcgtctttattacaaaaacaaaagaaagggctttctaaatcgcgagtgggtatggcgttgagggcaagatgcttatctctttttaaggatgactcaggatatatgagctctgatggtcatttttttgataatggcccagtttgtcttgcagtcgatagtgattatgtaaaatgcattaatgtagcgtgtgaacgtattaacttaaaatttagaacattaggaattaattcagaatttgatgagtggcaatttcttgtatttgatgcagtaagccgacaggcactaactattctagcgcaggcacttcctaaaagtgctcaacaatttttgattcaaaactggatgccagcaagacctcatcttattggcggagccagattcgggcaggcgatattactcaaccctgctagtacgccttttattcgtatggaaggggcacgtagtggaaggtatgtaattagtgactgtgcgggtcgtgaattatctgttggtgaactgacgttcagtgacgaagggctatatatttcacctgaaaagttgattaatatttttgggcaagcattttgccgatatctgctaacactggatcaacgagaaaaccctatagtctatgaaattcatgtattagaccacgccccttatgcagactatcggcggttgaatgaactgagtaattggttggtcgatggtgctctgggaaccctagtatcactcgatgatattgctcataacgtatctacttctattcctgtacataagaaaaaatataccccgctgggcggtaagtggtcattatggcaacaaaatgagtatccacttgaggaatgtgaacgaatcgatttgcattccatacccgttgaacttgaatggttagcagaggcacttgctttgcgtttccaaaagcgtagtacgctaccttttgaggagctaaaaaaacatcttatctccgtatcaatcgcagtgggtatccctgaatggcgattgcgtcggatgctatttgcatccggctggctttgtataacagaaaatcgttatgcgccttatccgttaataatactgacctctcgtacaatctctatttctggagacgggggcgttacggtggcccgtatcagcggaatgatgacaaaaagcgagcgtaaccgactgcaacacttactggaggaaggcgagcaggcaaaacagttatcagtactaggtcacgatattacaacgggttgtattgagttaagcctattaagtattgagcgcgtcgaatggttggctgaacagttcggctggcgactaatcactagagctgatttccccgttagcccattaagcggtgtgatcttaccaataaccgaaatagaaaatatcccaacgttaccagtcaacatcaccgtgtcaacttggctgggagaaaaaaataagtggtctgaggagtcgacgttaattgaccccaatagcaatgccttaatgcgttgccaggaaaaaaaacgcaatcgttattttatcactacccaaaacagcgtttggcagaccgatagttttgcctggggattgatggttcagactattttttcaaagaaaatattgggtaccattaaccatcgaggggatctctgttggtcaaaaaatctagtaacattaccccttcctctcacgcaatggtggttacattttgctggtggttgtctttccattggtgatgatggacatgtttcatttgttggtggtggcagctccatttgggcagatatagatctttcagataagactacggaagtttttgtcgaccgagctactgttcgcagatcgcgggcgttaatgctgcgtagaggccgataa

SEQ ID NO: 28287 - DNA, 2790 bp, Yersinia pseudotuberculosis
atggttaaaaaacagcacgttataaaagaacgaatgaaccagatgttctgttttggtttagaacctcacgagttaatcaactgcctgaaagagtgtaaacaaaagcttatcatagcgggtgctaaagcggataatttacctagaacactgcctcagaaattacgttttctaaatacgcttcagcctaaggctcggttggttatccatgcatggtttagtactaatctactatttcctgaatcggatgaacccgaaaaaatcctcaatgaacttctagtaaaagaacgtaccgataacgacgaaatagaatcgtcaaagccattatggcgcgccattttgggattctacgtctctcagtcctgtcctgaaattatcgagcgatttcttaatgatgagtcgatggtgccgccccatgatgatatcgaagaatgcaatgagagtctttcagagcatctaagcataaatgtaacggatgatgatatcgaacagtgtttattaatcagtcgagggaacgccgtattgccatctgaccgcgtactaccgatgttcgttgctggtcttgttgatacgtttaatggtgagcaggaagcagccagtatatggaaagaaaaattatccaatcatgcgcttcctatggtgcaaaaactcgaaaatatcatcaaggaatttgagattactcgtggcccgaaagaggctgatagtgttgaagtattaccggcagagtttattgcaacagaggacatgaatgactatgtcgtcgatagtatggcttttgtcggtgtcgttaccaaattgctccccaacgaggctttctttgtttcacctgttggcttgcttattcacgacaaactgtgggcgctttctgaagaacaagcgaaaatcctgtatcctcatcgtggtgaaaccgttgggtttataaacaattacaccaaaaattttactcagggagagcttgggatatggcacgcggagcatcgaccgtccgacaaaccagcgcaatatgtgctaactagctaccagtcgcgcgtatacccggttatcagacttccccatttatccagtgagcccgattctgtcagagagtggttattaacccagtatcaaccacaagatgaatcaccagccatttttttgcttgatgatggggtggcattaagacttcctagtgatctacctgatcctaaaaaatatgacttcgatgtgccacttgatagctacagagaattgacctgtattaaattacattcgcggcaaatcaccattgtgactcaacttcctgtagccagcgaaaaatacgattgtgcacctgccagtacatggataaaacgtctgataaagttagaatattcatcaacaaacttccctgttttcaacaaaaaaaacttacaaaatttaactcactttattgctgagcatgagccagaaactgatggttatgtccgtgccatagctcatctcgaacaagttagtgtttcaagaggattattgggcaatatgattcaacaattgctaacactgcccgaagtagaggctcaaattaatgtagagaagaaagcgatcattactggctataaatgcgagcaagaacaattaagacaggctattgcttctctggcagagaaaaaagtgcaacttgaagcggaaattgataaacagaaaaaacacctaaaaacagaaacagagaaatcaaaaaaagcgcttcgccaacaggaagtagaactggattcacgtatcagacaaaccttcgaaaatgcatcacaagccggtatcgaaacgttggcgcaagcggcactactgcgggcattgatcgctgatgtggccgtaccggtttctcaaccagagcctacgactaaacctgagcccaccattgctttgccactgtcatcgccaatagcaaataagctcatcaataaaaggcagctattgactgtgatagaaaaacaggcggtggcaacagggttaagtgaaaccttattatctggccttgtcgcagcggctaatgtaacacctattattggactgctaggaaaacacacaaaaaaagcactttataccatagcgaatattctttcgggcggagtcttgggggaagtttctatccacggtgatctttttagtatcagtgatttaatgaagtctccagtgttagtcagaagtacagaaaacacctgcaccatgactctgggggattttctaatgcatcagcaagataatggactgtctacagtggtggagttacgtggatttaaccgtatgccaccagagacattgttgcctgagttgagtgactgcctgcttagtgacgaacaggcatctggattttgctgggtagatcaacaccagacactgcgccatctttcaatcagccaaccgatactatttgtgttgacgtttgctgttggaaaaagcacattccccttacaaggacctgcagtccacagattgccggtgtttctggcagaaaatctgtggggtgatgaacaatcagctgattcctcgattaccattacacccactcatgtcactccggcattatggcaatcgttctaccaagaagctaatccgtctgctaatcatgactttaacgaacaacaaaccttgcgggcagtactacaagcatttggtttttctgaaagcaaatcacgggcgattgcggcactggcatttacggcggggcgtagcacctcagaggcagaggctttcggtagtgagttgttagcccgtacattaatggatgaaattgatcatggtgaagctgccacgatacttgattgtctgtttcagcgatag

SEQ ID NO: 28288 - DNA, 5961 bp, Yersinia rohdei
atgaataatccacttgaaacatttgaatcaattagagatttctacatcgcttatcttgaaactgccttccgaatcggcgctccagctattcagaaatatcgtcgagaattacttgaaaaacaagggacgttgtgtgcggatctatttttggagccaatgccccgatataaagactatggtttaactatcagtgatttgctggatgccccgaaaggggaaacatggctaccggggtttactatcccgcaaagagctgcatttatcgatctctgtttgggcggccttttaccccgcgaccctatggatacaatcaaagggcgttttaaactctatacccatcaattagaaatgttaaaacgaggtgtgcaacccggaatgccgggtattgttacttcaggaacaggctccggtaaaacagaatctttcttactacctgtttttgctcaaattgctaaagaggcaagtcagtggtcgcaaagttctgagcttaaaagttggcaaccatggtggagtgagccaaacgcccaacctacctttgtacgagatcgagaagcatccacttctgggcgccctaaagctgtgcgagcattaatcctctatccgatgaatgcgctggtagaagatcaattagtccgcatgcgccgagcactcgactctgatgaagctcacaaagtgatggattctcattttggtgggaatcgtattttctttggtcgttatactagtgcaacgaaagtaacgggatggttagatcaccctcggctacgtaatgatccaaaagagaaaaaacgtgtagctgttaaagtcactgaattacgtaaatacatgcaatttgctgataagacacataaagaggcggtgtatcaagggaaacgcgatgaggatgacaatttacagttcaatttcccgagaccggatggggccgaagtgctcagccgttgggaaatgcaaaaaacgccgccagatattctcattaccaacaccagcatgctctcaactatgctggtgcgtgaaattgacgatcctatatttgatcagactcaaaaatggattgaacatgacccaaacgcctatttttaccttgtgctcgatgaactgcatctacagcgtggcacggcaggcactgaagtcagctatttgcttaaacatttgatcaaccgtctggggttggatcaaccacaacataggcacaaattacgaatcctggcttcgagtgcttcgcttcccgtgagtggtcaggaaggtaatcaaagtatcgactatttgtggggtatgtttggtcaacgcggattaacaatgaatgccagtgcgaaggactggaaggcttgcattgtcgacggaaaacccgaagcactggttgatatatcggattattgttgtgacctacccgcgttttgtcactcggttgagcaactaaagtcaacggaggcatctataatatggcgcgatatagctcgtagtttgggatgctatcgtgacgaagttactttagaagaattggcgcagcatacggtcttattggctgccaggatgttggaaaaaggatgcactgataataaaaaatctctacgtgcaaccgccatcaattcactggcaacaggcttgtttggagaacatctcgatgcgcgtagaggagtcagtgcgctaatctggatacgcacgacggttgatcgttggcaacagtggtttgaacatccttttcctgctcacatcatactaccgcgtttccgtgctcacgcatttttacgtgcgctggaaggtttgtatgttgctccattaccatctccgccaaaagcaaataaagatgaaataaatcaatctttattcgcagatcttacggttgaatccggtctacgctacggtgatcgtttgtatgaagataagcagcgttcacgacgcgtggaactgctttattgtgaatgttgtgcaacattatttttgggcggtaaaccatctgctttctcagtcacaagtcaccgcacagaactactaccaaacgatcctgacacagagaagctccccgaacatgccaaatcagtcatgattgagagaagatcagcagaagagtatgtcctgttcatgccaaccgttgatcggttctggcccctcggtagtgaaaaactcactgatgacgattcttttggtaaatggagagaggcaagttacgatccgtttaccgcaacgattactcagcctatatccccagtaaaacccttaccagaaaccgatattgcaggctggttttatagtgttccttcaggtaattttattcctccgaaaagagagcagtcatccagtaaatcgcctggttcatcattgcctttccaatgcccagcatgcggaacctcatataaatacggtaaaggaaaacagtcgcctattcgtggttttcgagtaggtttcgcaaaaaccacgcagctacttgccagtacattaatggctgagttgcaaaaatctggagatcaagaacggctagtaacattctctgatagtcgacaagatgcggctaaggcagcacttgatctcgaatcgggtcatcatgatgatattaggcgggagatcctcatcggttcgctgaaagagcttgtagcagataaatgttcacatgaaaaattgctgatacgtttagatgaggttacaaaaaggaagaaagcacttgatattattgacgatcttaacaagctttcagatgaacaagaaaaagaattaaacgatctttggaaagaacgaaaacgcatcaaagaaacattattactcccgcaggctgatagtgtctcgctagaagcaatattggaaaattcgcccaaagcgggtaaaccacttaatagattgctggctaagttagttaaagctgggattcatccgacggaccgtacaggcatcactcctgtgcccgatccgtcaaaacatagcgaaaacattaaaacttttacatggcaacagctctttgataaagaccatcacaataaatggtgctggaaggcttttccttactatgaaaccgatctagatattgcccgtcaggaaatttcacgcgacctgaaagaattagccggtgaaagcgtgttcagcaaaacttattttgcgttagaagaagctggatggggatatccttgcatccctatttctgagaattattcccggaaaaaattagcaatatttgacgcattacttcgagttttggctgacgcttaccgagtcgacccatcgcaatatcgtaatcccgataaccctgacaccccctggaaaacagcatcagcgatccctaaacgcaacagggtatattcctttgcaaattccatatgccatcagtctggtggtagtgttttagatttacttgatgagttcctcctgctccttgaaaaaacgggtcatcaaggtggcatcattgatattgggaaagtacatttccatttagttgaacccacaagtagcttctggcgctgcagcaagtgcggtcgcgttcacttacatctaggggcaaaaatatgcacccgctgccatgctcttttacctgaaatacaatacggtgaagcgggtgtgcttcaaaagcaaaactaccttggtaaacgtattttatattcatctggcagccatcgaatgcgttctgaagagctcactggaatgactgaaaatccagctgcaagattacgtcgcttcaaaggtattctgattgcggatgatgatgatattttaccaacggggctgaaaaactttgaaccagacactgaactggacagaaaggcacgcgttattgatgtgctttcagtcaccaccactatggaagttggtgttgatattggggatttacgagctgtttttcaggcgaacatgccgccacagcgctttaattatcaacagcgtgtaggccgagctgggcgacgtggacaagcttttgcctttgtactaaccgcatgccgtagcaaaagtcacgatctgttctatttccgccacccggaaaagatcactggtgatctgccacctcctcctttcttaactactaagctggaaatgatctgccagcgactggtacgcaaaatctggttggtggccgcgttcaaatggctaaggcaaaacacaattaactcacaccagtcatggcctgtcgatgagcacagacaaaaacccgataaccatggtgagttttttcaggttgactggctaaaagtgaattgggttacatggcaaccacgtatccgtcaggctctaatagcaacgattagaaatcgtgatgaatttgcccatgtctgcatgcctgacgagcaatccttctatcatcgcattgtgcaattactgaccccagacaatctgattcaggatattggtgcagcactaaacgacgatgctatgacaggcaaagggctggctgagtcgctggctgagcgagggcaactcccgatgtatggtatgccaacccgcacgcgtctgttacaaaccagggccattgctactggcgaagatgatattcagtttgccagcatggatcgcgatttagacattgcaatacaagaatttgcaccggggaaatatctggtacaggacaaaaggcgctacttaacggcaggctatgccgggatgctgaagcgacgctatcctaaatctatagaatttgattctaacgcgaatgaactgggagaaagcagaatgatgacagcctgtccagtctgtcacgtttgggctccaatcaatcacgagatcagcgaatgtactgcctgcggtgccgagacggaagatgctgagcagtaccaatgctatgtaccttatgggtttattacctcactggaagataaatctgtcaaagaggatgtcgatcaaaccctaaccaatgctagccgtgtttcaatagctgaagcctactcattttctgccgtgtcggatttttacgctaatgtcgctatccaacttgaatctcaaatctgtcttcaccggctgaaccgcggcacctatgtcgatgaacgatggagtggttttaatgcggcgcaaggcaatttacgggttccctttagaaatgggggaacgtaccagccattaacagcaaatcgcgtttgggtagatagtcaattgcttgaggctgatcttttattaaagagacgtttcacaccattgcaggaaagtaaaacttcattttatcttgccgcacctaaagtgaccgatttgttggctctgatggtggtcaatacccctgcggggcttcagttgcagacacaggcatttcgtgctgcagcgctctccgctgcatttatcatcgttaactatgcctcaaaagagctactcgacattgatccagaagaaatcgaaattctggaacctcgagtccagagattagaggacggcaggctggcaccgatactgcaaatggccgaccgtctggtgaatggttccggattatgcgagcgcctacagcagataggaacatccggtacgccgatcattttggagataatgaaagctattgtcagtaacaaaaatgatttcccgctaaaagagtttttagacgattctcatcgagaaaaatgttttcaggggtgctactactgtcttcatagatatggcaatcaggcctatcacgggttgcttgattggcgacttgggctggacgttatccagctgcttctggatgaaaattatgatgccggattaaatggtgatttttccgctcctggtatcgctgattggcgagagaacgcccagcgtttagcaaaagaggctgcatcactttttaatagcgaaattagaatggtaggccatattcccctaattggcattggcccacagcgctgggtcgcggtgacacatccgttctggagcagtgatggcatttttaatgctaatcctgaacttgaaaggctattccttgagtggaaactggaaaaacaaacggttagtacgtttgatctctcgcgccgcatgggcgctgttatgaccaaattgaaaaacccagaaagtaacttgggtaattga

SEQ ID NO: 28289 - DNA, 1089 bp, Yersinia rohdei
atgagcaatatttttgaaagagagcatgaaaatatccgagttctttcactgttttctggcggtggtggcatggattttggcattgaatctgccggtgggaaggttgtttttgctaatgatattgttgaaaacgcctgtaagacattagataagtattttcctgactcagatatcagacttggcgatatatccaatatccagagttttccatgtgttgatgttgttgttggcggttacccgtgccagtcattttcgatggcgggtaacagaaagccggatagtgatgctcggagcaatctttataagcagtttttacgtgtgttaaatattgtccgtccaaaatattttgtggcagagaatgtgtctggattacagcaacttggtgcgggcagttttttagaacaacaacttacagcataccagcaagctggttatcaggtcagttatcatctggttaatgctaaagaatatggtgtgccacagtcacgtaagcgtttgtttattattggtgtacgaaaagatttagatcaatattttgagttccctctagccactcacggtaagctaagccagaagaaccctcatttaaaaccttatgcgtctcatggtgatgctatttgcgatcttcccttatggccagaaggggagttttatgaacgtccccatgatccagaaggccatttttcatggtatttcatgtcaaggaatcgtaaggctaaatgggatagccctgcttataccgtagtagctaactggcgacatgtcacattgcatccagcaagcccagtcatgaaactaacctggtcaaaccttgatgacggctggaaacaacgctgggacttttccgatgaatacgaacacttaactgttgatgatacccgccctaaattggagcaagccagacgtttgtcatggcgagaatgtgctcgcatacaaacgtttcgccacgattatgaaccggtaggggatattgatgccaaatttacccaaataggtaatgcggttcctcctatgctagctgaggttctttttagccaccttttttcaggcgcaggcttgaagaatctctcgataaaagcaggtaattga

SEQ ID NO: 28290 - DNA, 2787 bp, Yersinia rohdei
atggaggagtctttcccggttactttagatgagtggaataccgccctagttagagccattttttttgacccttcttgtattggttcaacactgagtcgtattgatgcgaccggacgcatttttgataaattgaaaggtactcgtagtaaagaagaagctaaaggtagctttttgaatgcatttggtactagtgcagaaaagatacaaaattattttagagatgaactaaggcttgatatattagcggcgagaaacggggttcctcctcattttgctatcttatatttaacgttacttgccgcaagtgctgatgatgacacctatgatgaaggtgattttcgtgttagattttcccttctgctaggttttgataaagataagaaatttatctttagtgaactccctaaaatgtgggagcgattagaaagatggagtcataataaaaaagaatgtgcgcatcttattttaccagatcctcatcgcgaaacattaattggttattcaaaaagactttcctttccatcttataaagacgatttattactaagacgcttgctggctgataaaaatctggatagtcattcaacatttgaatcaattagtcaaatcattcatcaaaagataagttccttcagtcaaacattcatcaatgaatttgatcagtttagaaggctgctattaaaggctttatcgaagcaagcttataacagcccattttggggtgccgttcgagatattactcgacacaaggaaaaccaacaagtaactgcgaatggacgtttttgcatacagttagaagatgctactgatatgtggaaccccgaaatttatttattgatggatagcaaaggggctaaggaattaggtaccaatcgaatctacacactaccacagaaaacagaaaattatagcaaaggctattgtaaatcagatgtaaataacactctgatacacatttcattactattacaaaaacataaaaaaggattatcgcaatcgcgagtaggcatggcattgcaggctggatgtttaccgctatttcgggatgattcgggatttatgaattctgatggtcactattttgacgatggtccagtttgtctagtaatcagcagtaactatgtaaggaaagtttatgcggtatgtaatcatataaagttaagattccattcattaggacttaccccagagctgaatgaatggcaacttattgtatttgaatcagtaaatcaacaggcattgctcactttggcaactgctcttcctaaactcgcccaacgattttttattcaaaattggatgcctataagacctcatttggctggcggagcgcgctttgggcaagcagtgttacttaatccggccagtactccatttattcgtatggaaggagctagtagcggaagattcgtaattagtgactctgcggataataaactggctacaggcgaacttacggtcagtgacgacggattatatatttcatctgaaaagttggttgccatttccggacaaacactttgccgttatttattaacactggaccaacaagaatcacctctggtttatgatgtttgtgtattagaccatgctcctgatgcagcttatcgacgtttaaatgaaccaaataattggttgattgatggtcctatgggaactttagtaccatttaatgatattgctaataatgtacctgcctctaggtctataaataagctaaaacttacccctatggggggggagtggtcattatggcaacaaaatgaatatccgcctgcagaatgcgaatctattgatttgcattctattcctattgcgctcgactggttagtcgaagcgctggcgctgcgttttcaaaggcgtagcacactgccttttgatgaactgaataaacatcttataccagtttcaatcgctgtaaacattcctgtttggcgattacgtcgaatgctgtttacgactggctggctttcaatgactgagagtcgttatgctccttatccgttagtaacactggctatccgtacaatatcagtttctgacgagaaagcgggtgtagttgctcgtatctgtggaatgatgacaaaaagcgagcgtaatcaactgcagtgcgcactggtagatggcgagcaagttaaacggtggtcagtattaggtcatgatcttgcagccggttgtattgagttaaatttgacaggtattgagcgcgtagaaacattgattgaacagtttggtttgaaattggtcaccaaaacagatttttctgtcagcccattaagtggtgtaatcctaccaataacccaaataaaaaatatcccaacgctacctgaaaacatcaacgtgtcgacttggcaggaagggaaaaatatgtggtctgaagagactacggcaattgatcctagcggcaatgctttaatgcgctgccaggaaaaacagcgtaatcgttattttatcactactcaaaatgcttgctggcagaccgatagttttgcttggggattggtcgttcaggctattttttcaaaaaaaacattgggttatcagagccataatggcgatctctcttggtcaaaaaatctcattgcattaccgcttcctctaacacaatggtggttacattttgctggtggttgcctttccattagtgataacggcagcatttcatttttaggtggaggtagttccatgtggggcgatatcgattgttcagatgagacagagcaactatatatcgatcgagctactgttcgccgctcacgagcattaaagctacgtagagctcgataa

SEQ ID NO: 28291 - DNA, 2817 bp, Yersinia rohdei
atggttaaaaaacagagcgttataaaagaacgactgagccagatgtactgttttgctatagaacctcacgaattagcaaactgcctgaaagaatgcaagcagaagcttattatggctggcgctaaagcagataacttacctagaacgttaactcaaaaattgcattttttgagtaagctacagccgaaagcgcaacttattattcagacgtggtttagtactaacattcagttttctgagcataatgatcctaatgaaatccttaatgaacttctgttgaaagaaaaaagtggcgatgatgtagaacatttaaagccactatggcgtgccattctgggattttacgtctctcaaccctgtccagagattattgaacggtttctgaatgatgaagaaatgaatcaactcaataatggtgatactgagaaatataatgctaatttgtttgcacaatctgcccttaatgtgacagatgaagatatagaacaatgtttattaattggtcagggacagaatatatctccttctgatcggatactacctatgtttatcgctggtctaactgatacgcttaatggtaatcagaattcggctattttatggaaagaaaaactagccactcatcctctcccaatggcaaaaaaacttgaaggtattattgcagagttcgagtctggtcatggccagaaaatagctgatagtctagcggtattaccagcagaatttgttacaccagagagcatggatgacaatatagataacataacgtttgttggtattgttactaaattactcccatcaggtgccttcttcgttacaccgattgccttatttattgataatggtttgagggatctatcagaggaaaacgcaaaatttttgtatcctcatcatggtgaaaccgtcggctttatgaatcatttctccagaaattttacacaaggagaattggggatatggcaagccactcatcagccatccgataagcttgctcaatacgttctgactaggtatcagtcacgcatatatcctatcatcaggcttccacatcagctcagcgagccggatgctataagagagtggttgttaacccagtatcagccaaaaaatgattctcccgttatttttctactagatgatggtattgcattaaggcttcctggtgatatagcagaccctaaaaaatacgattttgattcaccattagatagctatagagaattagcttgcattgaattatgttcccggaaaattacccttgcgacccaacttccaacgctcacagaaaaatatgactgtgctccagccagtacatggataaagagattaataaagttgaattattcatcgatagactttcctgcttttagcaaagcgcagttacaaaacttagcctactttattgagagcaatgaatctgagaacgataaatatattcgtgccttagctcatctggaacaagtcgtagtttcaagagagtttttggatagtatggttcagaaattgctgaacttgcctgtagtagaagctcaaattaatgaacaaaagaaagtgatactttctggttatgagaatgaacaagaaaaactaagattggtgattgcatcactggtagacaaaaaaacgcagcttgaagccgaagttgataatcaaaaaaaacgtctgaaagctgaaacagagcgatcgaaaaaagtaattcgccaacaggaagcagaactagattcacgcataaggcaaaccttcgaaaatgcatctcaggctggcatcgaaacgttggcgcaaactgcactattacgcgcattgactgctgatgttacaggaccggtttctcagttagaacctatgggtaaattagagccagatactgtaatggcaccttcattggcgttaaagccttttaaattgccggtagcagttgaaatcaccaataaaagacggttactaacgataatagaggagcaagcggcagtaactgggttaagtgaaacgttattatccagtattattgctgccgcgaatgtaacccctattattggattactgggaaaatatactaaaaaagtgctttctaccgtggcaaatattctgtcaagtggggtacggggggaagtctctattcacggtgatctttttagcatcagtgatttaatgagatctcccgtattagtcagaagcctagaagacacttgtaccatgtctctgggagatttcctggcgcaccagcaagcgaatgggcaggctactgtggtggaattacgtggatttaaccgcatgccgccagaaacattgttgcccgagttgagtgattgcctactgagtgataaacaagcatctggcttctgctggacagacgaacagcagaagctacgccatctttcaatcaaccaccctatcttatttgtgctgacatttgttattggcaaaagcacatttccattacaaggatcagcttccaacagattaccggtatttttaaccgagaatatttggggggatgagcaacctgcagttgatactaatgatgtaactgtgacatatgtaacatcggtagtctggcaattgctttatgcaactctgcaacaatttagcagccatagtcataacgaactggaaagcttgaaaaacttactaaatgatttcggttttactgagcaaaaatcagaaggaattgccaagctagcgtttgaagctgggcgtagcccatcagcgaatctggtttcagatatcgaatcactaactccggtattgatgaattatgctcgggaaattacccaaggcgaagtcactgctgtacttgattgcctgtttcaggcataa

SEQ ID NO: 28292 - DNA, 5961 bp, Yersinia rohdei ATCC 43380; identical to SEQ ID NO: 28288

SEQ ID NO: 28293 - DNA, 1089 bp, Yersinia rohdei ATCC 43380; identical to SEQ ID NO: 28289

SEQ ID NO: 28294 - DNA, 2787 bp, Yersinia rohdei ATCC 43380; identical to SEQ ID NO: 28290

SEQ ID NO: 28295 - DNA, 2706 bp, Yersinia rohdei ATCC 43380
atggctggcgctaaagcagataacttacctagaacgttaactcaaaaattgcattttttgagtaagctacagccgaaagcgcaacttattattcagacgtggtttagtactaacattcagttttctgagcataatgatcctaatgaaatccttaatgaacttctgttgaaagaaaaaagtggcgatgatgtagaacatttaaagccactatggcgtgccattctgggattttacgtctctcaaccctgtccagagattattgaacggtttctgaatgatgaagaaatgaatcaactcaataatggtgatactgagaaatataatgctaatttgtttgcacaatctgcccttaatgtgacagatgaagatatagaacaatgtttattaattggtcagggacagaatatatctccttctgatcggatactacctatgtttatcgctggtctaactgatacgcttaatggtaatcagaattcggctattttatggaaagaaaaactagccactcatcctctcccaatggcaaaaaaacttgaaggtattattgcagagttcgagtctggtcatggccagaaaatagctgatagtctagcggtattaccagcagaatttgttacaccagagagcatggatgacaatatagataacataacgtttgttggtattgttactaaattactcccatcaggtgccttcttcgttacaccgattgccttatttattgataatggtttgagggatctatcagaggaaaacgcaaaatttttgtatcctcatcatggtgaaaccgtcggctttatgaatcatttctccagaaattttacacaaggagaattggggatatggcaagccactcatcagccatccgataagcttgctcaatacgttctgactaggtatcagtcacgcatatatcctatcatcaggcttccacatcagctcagcgagccggatgctataagagagtggttgttaacccagtatcagccaaaaaatgattctcccgttatttttctactagatgatggtattgcattaaggcttcctggtgatatagcagaccctaaaaaatacgattttgattcaccattagatagctatagagaattagcttgcattgaattatgttcccggaaaattacccttgcgacccaacttccaacgctcacagaaaaatatgactgtgctccagccagtacatggataaagagattaataaagttgaattattcatcgatagactttcctgcttttagcaaagcgcagttacaaaacttagcctactttattgagagcaatgaatctgagaacgataaatatattcgtgccttagctcatctggaacaagtcgtagtttcaagagagtttttggatagtatggttcagaaattgctgaacttgcctgtagtagaagctcaaattaatgaacaaaagaaagtgatactttctggttatgagaatgaacaagaaaaactaagattggtgattgcatcactggtagacaaaaaaacgcagcttgaagccgaagttgataatcaaaaaaaacgtctgaaagctgaaacagagcgatcgaaaaaagtaattcgccaacaggaagcagaactagattcacgcataaggcaaaccttcgaaaatgcatctcaggctggcatcgaaacgttggcgcaaactgcactattacgcgcattgactgctgatgttacaggaccggtttctcagttagaacctatgggtaaattagagccagatactgtaatggcaccttcattggcgttaaagccttttaaattgccggtagcagttgaaatcaccaataaaagacggttactaacgataatagaggagcaagcggcagtaactgggttaagtgaaacgttattatccagtattattgctgccgcgaatgtaacccctattattggattactgggaaaatatactaaaaaagtgctttctaccgtggcaaatattctgtcaagtggggtacggggggaagtctctattcacggtgatctttttagcatcagtgatttaatgagatctcccgtattagtcagaagcctagaagacacttgtaccatgtctctgggagatttcctggcgcaccagcaagcgaatgggcaggctactgtggtggaattacgtggatttaaccgcatgccgccagaaacattgttgcccgagttgagtgattgcctactgagtgataaacaagcatctggcttctgctggacagacgaacagcagaagctacgccatctttcaatcaaccaccctatcttatttgtgctgacatttgttattggcaaaagcacatttccattacaaggatcagcttccaacagattaccggtatttttaaccgagaatatttggggggatgagcaacctgcagttgatactaatgatgtaactgtgacatatgtaacatcggtagtctggcaattgctttatgcaactctgcaacaatttagcagccatagtcataacgaactggaaagcttgaaaaacttactaaatgatttcggttttactgagcaaaaatcagaaggaattgccaagctagcgtttgaagctgggcgtagcccatcagcgaatctggtttcagatatcgaatcactaactccggtattgatgaattatgctcgggaaattacccaaggcgaagtcactgctgtacttgattgcctgtttcaggcataa

SEQ ID NO: 28296 - DNA, 6501 bp, Acetobacter cerevisiae
atgactgagcacgcgagcacgcaggcaacctctcatctttacaccgcacttgaacgcctttcgagacgatcggcagatgcatttgttggttatgcgcgtttttccaagccgtctttgacgtctctcgtgcatgacatgctgcgtggcgtgccggggagcggaagtgcgggcttgataagcgacccttatctggaagctgccaagctatggaaaccagcgcacgagacatatgcccagctggctgaagaaggattgctggaaaaaggatttgtaaaagctcttgcccggtcaaatcctaactggatgggaaagtcatgccatccgtatgcacatcaggtggaggctttgcggacagcccagacaggtaagtcctacattgtcacgtcaggaaccgggtctggtaaaactgaatgtttcatgttgccggtgattaacgatgttttgcgtcatcccgagcgcaaaggtatacaggccattattgtttatcccttaaatgcactcattgattcacaacgcgaacgcctgcgtaaatggacggatgagctggctgctgtggggctgggcgaccgcgttcgatttgctctttatacaggcgatacgccgctaagccgcagttccagggggcagaacgaagcaaggccggatggaatcggcaaggctgaagtggaaagtcgggatgagattcggaagaatcctccatctattctcattacaaacgtcacgatgcttgagtatatgcttttgcgccctgaagatcagcgtattcttcaggtttcaaaaggatctttgcgttgggttgtgttggacgaagcacacagttatgttggaagccaagcagcggagatggcgctccttttgcgtcgggttcggcaggcgtttgatgtgccgcctgataaagctcaggtgctggcgacctctgctacaatcagtgggagtgaggtcggcaatgatgcattggcccggtttgttgctgcgttgtctggtcgttctgttgatgatgcggccgtaatacatggtgtcccacaacctgtggttctgccaccacaaaatcccaatagctccctcaacctggatgctgtggcggctgctagcgatcatgacaaatggcgtatgcttgcgcctcatcctgccgtacaaaaactgagcagggaactgcgagaagagggggcgtgtaaaaaagcatctgacattggaactcaggtgctgggcttgaaggtaagtgaagcggaaactcaagctttgcttgatgcgcttgccgtagcgcgtaatccagagacaaacgataaattattgtcttggcgtgcgcatgttttccatcgttctgttggagggctgtgggcctgtacgaatcccgactgtcattaccggcaggcgaccttgcgggccgaggacgcaaaatggggatggggcgccctgtatctgggagagacagaccggtgccaatgtggaagtctttgtctggagttggctggatgtcaggaatgtggtgaggtctggcttgctgcgcgccacatcatggcaggacgcgatgactatattcgtcgccgacgggcatggaatggcaacacgactgattttgaacgcgataatgagcctgtcacaagtgatgatgacgaaggcagtgaacatcactcaaatgaagatagttctggtgagacagtagccgatatttggatacaagacccgttttttccgcaagagcgtgcattgcctgaaccgtctggattgcagcctggaggtgttttggacccgcagtcgggccgatttgctcccaatggttcgcttcctgatgataaggccggcctgccgatatcctatatcacggcgcatggtcctgattgctgttgtaaaagaggtaatcaaaaggttcagatcagaacttttcattatggatcagtgtttttttcggatacaggtttgcctgatttgctgggcctgcttgcgcaccccatggataaaagtttgcccggttatcgccccatggatggacgccgggcactgacatttacagatagccgccaaggtgttgcgcgcttatctgcaaaactgcaggctgcatcagaacgtaatcttgttcgcgcattcatctatcattctgtgcaaacaaccaacagtctcccacctgaagagaaattggctcttcagagaaatcttgacaggaagcgtcgctttcgcgcgggatgtgattccgaaacacctgaaggtttggaagatattgcctcatttgacaaagaaatcagaagcatagagcaggaacttgctattgagcataagcctgttccctggaatagacttgtcgagaatcttgccgaactgacaagcgtttcggaaaatcttgctatgctttgggggggcaggtttaagcgagcacttgggcaaagcggagattataacctgtctgagcacccagaaattcttgcaaagattcttctgcttcaagaattaggtcgtcgcccaaaaattcaaaataacattgaaactatgggtatggctcagataatttttccaaagatgtatgatcttattctggaagacaatggaccgtttgctgatgtcaagcgtgcttctgggctgaaagatgaagattggctgtctttggctcgtgcagcgattgatctgattttcaggcagcgttgggccgttgtttttccagagagtaaaaagctactacatcttgtttttcccaatatgcataatgcaatgtccattggaagcgagcgtgaactcaatcatgagatccagtcatggaacagacgttggcctgatgcaaaagataaaatggacttcatgcgccttgtgcggctaaccatgtcagcccgtcaggtgcctgatacgcgtgtgcaaggttttcttgatggactctgggatcttttaaaaaccacatgccttaagaaagtgcaaacatctccagagtattatgctctggatttttccaaggcctctcttgaacctgtgaaacaggcttggatatgcccattaacgcgtcgtgtgattaactatctagtaaatggtcgttcgccttttgctccagatgtagcggcagaaccagagagtattaatttttcagcgccaccacatattgataaaaatggactgaatagcgccaaacgggaagtgaatcggaggtggttcgaggggaatgaaacctgggcgttgcgtaaacgcctgatctggacagatcaggccgaaaacgtcattacctggaggccgtacttcagggcacaggaacattcagctcaaattcaccgaggtgatcttcatacgtatgaagaggcttttgataaggggcaaatcaatattctggactgctcgacgaccatggaaatgggtgtcgatatcgccgatgtgcatctggtggggaacaccaatgttcctccatctatttcaaattatcgccagcgtgtagggcgcgcagggcggcgtggtgagccgtgggcctttggtatgacatggtgccgagagcagccattagatgaaaatacatttcgtaaccctggtgcttttttgcagcgagctattaaggctcccactgtttatcttgaaagcgaaccgattgtgcagcgtcatatcaatgcattgctgttcggtatgtttgtacgtacgtctggaatccctcttacgacatcgacagacgaattttttggtgcgcctaagacaagaggagatgtaaacgcctcaacatttaggaacgatcttgataaatggactgatccttcagatacgctcgcaggtagattttctgaatggcttagtaatgccgcagacattcccgctgtaaatgaggcagtggttacgttggttcatggcacgtctctggttgcgaaaaccgtaacacatttggttgataaagttgagaaggagttggatgatctaagacgcaagtggcgtgaggattatcaggttgtaattgaccgcttgaaaaagtctattgatcaaaaagataattcttctgttattagccttttccagagccgtgcccaaaatatggctggaaaatttattttaagcgagttgggaagccgcaatttcctgccgccacatggatttcccattgatgttgttcaattggaatatgaaacacatacaaccaatctaaaccgtagaagatcgcaactgcgatcaactgaggtaagccaggaagatgtgcggccattgcggcgtactgtgggagaaagctctcgtcctttaagtattgctctgcgtgaattttcacctggtgccgatgtcgtgattgatggtttggtctatcgatcaggtggggtgaaacctgcatgggctcggttgcacggagagggggggacagagcacctggaacgtttgtggacatgccccaaatgcgagcaaaccggaattgtgcgtatatttgaagttgggcagctttgtaccaatcaggactgtaagcatcgtctgcggatagaggatacggccgaagtgctcaagcctgcgggctttatcgctgaccgtgggacgcatgctggttatgatgttattgcacaagcgccatttgatcctgctgtcattacgctcaacaagaacgactggacgcatctcattcaaccaaaatggggtcgttttcgttgtgatagcgcgggacaaattattgtaacagccaaaggccgggaccagaatggttttgccctgtgtctgacatgtgggcggatgaaagagcaactgactgaaactgatgaagagggtgaaaaaagcgtccggaatgcagtatcgttgctaaaagaccataaaccgttggagccgtctgttgtacctacggaagctggccgatgccctgggaatgatcagaatggtgctattcgatcacgtgttcagcttttcagccagaatttgacaaatgtttttgaattatgtttgcccgaatttgatctctggcctgatgaagtgcttaagcatatgcgtgagcatgaacaaaagggcgactatcgtgcgggcgtaggtttggctgtgggggctgcattgcgcgaggccctttgtgctgcccttaatgttgaatcccaagaagtgcatgtttatggaaaacgaggcaagtcacatagtcatgactctatttttctgtatgatgcggccgagggtggggctggcctgtcctcacaactcgataatttcgattttctggtaaactgtcttcaagatgctgaaaagcagctggagtgtcaaaatagtgctgatggcggggacgggtgtgaaaatggctgtccagaatgcatcatgcgacctgatgttgctttctctcgcattcttgcgcaacgtaaggcggcactcgcgcttctcaaatggctgttaccatatttgtctctttctcaagatctccagctttttggcccggaaacgcattatgccggtcaggatgccgagcgttggctgcaaaacgcgcttgatcagcatgttttcagcactcttacgctttgcatgccaggcgagccggatgagtgggatgttaatgaatggctgtccaagcgtacgcgatatatgcttgagcaatcaggtatctccataaatctgcttttgcctcgtgtagccgtggaaccttctaggctctctactgcacggattgcggatttgatggctttgcagattgcaacgaatgcagactgtagagttgtggatacgttgcccaagattaaagacaaggcaattctgctatttggaaccgcacgtaggaaaggtagcgattttacaacgcctcttgcattggcaaccgtagatgaatacggcccaattgtgagcagtgattggggaaagtgcaatacacttgatcttgctcatagttgcaacattgctgggccatatgatgacgttccaatggtgggtaaacctttggaactaagtgcgttgttgacaatgccggaaaacataaaaggaactaatgcttattttgctcctgtgacacatgaattggatggctccatcaatcggcagcaagatagtttcggcatgcgtttctggcattattgggaaaacaaagcaggagctggagtggaaattgatgcgttgcgaaaaattggagtgaaagctgtttactatacagacaggtttgttcgctctccgcttgttgtggcattactttatagcgttgtatcaactattccgggtgcagatgcgcatttggaggtcattattaagactgtacctttggatccagacgaagtgcatacttctcgttaccatcgttcttacgcatcgaaagattggcctaaaacaaatgagcgggatggcgtgctcaagagtgtatttcctaaagtggatatacgcatttatgagaatagacacgatatgcagcatgatcgtgagctgactttgatccgccatgacggaaggcggctcactatcgggcttgggcaagggtttggtgcatggggggcaatatataaacccaagttcgattttggagcattggtagatgagcaggcacgtcaaattaaacaagctaattggcttattaattatgctggaaaaggacgcacaaccctggttatggctttggaatga

SEQ ID NO: 28297 - DNA, 1674 bp, Acetobacter cerevisiae
atgtttgatggtggtgaaaatcatgtttccctaccatttgaaaatggtattgcgcgcgggaaaattgtttcctcaggcgaagttcctgcggctatgcgtctggttattgctgagctgcattcagggcaaagcatcgaactcacgcggccatggccctcaaagcatccattccttgtggatgatacaaagcgcctgacgcaagagcgacagattttcataactcaactcagtgaattccgcgctatcgggccagataacgctgagcttcttcttcttgtgcgtggtcaatcacaaagtggaactattccgctctgctcaccggcgccgctaagtacgcaggctgcatttctgcgtcaactgctggcgcaggatacccgcgcagcagatggaagccttgcgttttctctgctggcaaaaggagttacaagcccaatactgcacgtaaagcgttatgctcgccagtgcagagaatggagcgggctcgggattatggatccaatgcttctaccagatcacgaaacggcagaaattatagccgttgaagttagcgggaaactgaaaaccacgacatatagtacagaagttgttcccaacggcgagagtgcatttacattggggtcgcacttttcgtgcaatgggcagtggatgatttatgtcacgattgatggcaaaccataccggcccttcttctggttggggtccgcgacactggcctctcctgcaccacggacgcgtcaggcccgtattgaagggtatgtgaagcagtgggaggagcgtctcgaagcaggggctctgcgtgactggtatgggcgttggcgtgtaatccgggaggccgccgaagccggtgacgcaggtgctcttgatgaagcgcaggctatagctcacgttcctgctgctgctctgtgcctgttattggtggtagaggaagaacagataaatgatgttattgcgctaaacgaagccattcctcttttctggccatgtgtgccggttaaagaattttctcgcgcccttgtccaggcgtatcgcatgcggcttgagcgtgagagagaacaagacacgctagatcccgaaagccaggttaacgtgaggcggccggaagaagagacggttcgcgtgattggtaaccgattgtgcaaaattggagagcggatgcccgcacttcgtatgcactgggttcgtggtttgtacgaaaatggtatgctactggatttcatggattttctgaattctggccctctgaagccacagcctgccgatcccacaactcagttccgtgacgaaataaaagcaacagactgcggctcacacgaaatgcgaagtcgctccgccctttggaacttggcgcaggattgcgctcgaagcgtggcgcaagcgaaccgaggagataataacatacgcaaaattccccgcgtctccatacccccccgtgtgccaagagcaaattggcaaaagctctttcctgatggagctattcctggcgctgaatttggggcggatgacctcattcaggccccttacattgcagcacgtctagcgttgggggaaggttcgcagctttcatgggaggaccgcctttctgctcaggctgcactgctgtttctgagtgattttgatagcagttattttgaggaagctctgccttgggtgatagccaccctggggccgcagtaa

SEQ ID NO: 28298 - DNA, 6318 bp, Acinetobacter baumannii
atgtataaatattttagttctttaacacaagaaagtattcaaaaaaataaagaagctacattgagtatattgggtatttcgtatccagaactacgtgatgttctaggacagcagatgtctcaagctgcgggcaaagatcaatcatttttatcttcaccggtgattgaacaaatgttcgcatgggaaaaaggtcaacccacattagatgctttgggtggtgaattacttcataagaaattaatcgatgctttagatcactcagaaaatggcgcatatcgttttaatcgtaattatcagccttatgtacatcaattacaaagctggaatgctttattaaaagacaagaaatctataatggttacttcaggaacgggttcaggtaaaactgaatgttttatggtacctattctaaatgatttatacgaagagtttattcaagcagggcaatccttaacaggtgtgcatgccttatttttatatccactcaatgcactgattaactcgcaacaagagcgattagatacttggactcgccatttttcacaatctaatgccattcggtattgtttgtataatggcaatacaccagagcataaatcacaggaaacaggaaaacaaaaacttcatcccaaccaagtgctcacacgtgaagaactgagattaaatccatctcctattttagtgactaatggcaccatgttggaatatatgatggtgcgccaaattgatgcacctattttgcaaaaatctcaaggaaaattgcgttggattgtattagatgaagcacatagttatatgggctcacaagctgcagaacttgcgatgcagttacgtcgggttctgcatgcttttggtgtggaagcaaaagacgttcgttttgtagcgacctctgcaaccattgcaggtgcagatgcagaagaaaagcttaaacaatttttatctgaaatctcaggtcaaagcacagagaatattttggtcattggtggtcagcgcgaagtccctgtattacctgtagttgaaaatcatcagcaatcttttgatgagttagtagcaattgatgctcaacacgaaatatcttatgagcgttatcaacaattagcagggcatccaattgcatgtgttttaagagaaagtatttgctcgcaacgtgctttaaccttagatgatttattaaaaattacccgagaaaagggtttccaactttctcaacatgaaattttggaatggttagatctattaacctatacaagaccatctgatgaagaacaagcttttcttaagattcgtgttaattattatcagcgtgtgactcatggtctatggagttgtacaaatgacaagtgtgataaaaaagacgatggtttaaaaaattggagctttggtcagatatatgcgacacatcaagaaaaatgtgattgtggggctcctgtattagaattaacgttctgtcacagctgtaaggaaccacatttaatcggttcattaggcaaggaagatgtgctgaaacagtggaccgttgaaattgaagatgaatttgcattacttcttgataatgaaacggaagaacaagaagaggttgaatataaaaatactatcaagaatcgtttagtagtattttctgtcaatgagaataaagaaaaaaactaccgccgagaccaactgaatttagaaaatttaaaactcggagaaatttctaaaaataccctgaacgtacattattttgaacctcataacagcagtgatccaattttatgtagtcatcctgaatgtggtgcaaagggttcgaagtttgatttgccatttaatcgtgcaattttaggtgcgccttactatattacacaaactgttccacagcttttacaatattgtccggatattgaacaaaaagaaattaatgaggcaagcaaaaattataatgacccagaatttattgaaggtgagtttaaagatttaaaggattgtgcaccggaggatatgccagctaagggtaagcgtttaatcacctttactgatagtcgtcaagggactgcgcgtttatccgtaaaaatgcaacaagaggcggaacgatcacgcttacgtggtgctgtgcttaaagcaataatacaacatacaaaagctcaagccaaaaccatagatccgatggaagtgctattacgtcagagattaaatgaagcagagcaagaaggtaatattgctagaataaagttctttcaagaagaattaaataatttaagtgctaataatacgccaatgacacttcctgaaatgaattgggaagagttatgtcgagaattagcgaaagatttcgattttagaacaggtattttgctcgccaatcgccatattgcaggtggaatttttgacgatgctggatcgcttaaacttgcacaaatgttactaacacgagagttttcacgtcgtcctaaaaatgcaaatagtttagaaacgttggggttggtgaaagttagttatcaaggcttaaaagacttaaatgatctgcctaactattggaaggagcaagggttaaccggtcaggattggcagaattttattaaagttattttggattactttattcgtgaaaatacagtgattgaacttgctgaggattggaaacaatggctaggaggcccagttctgcctaaacatgttgtcagtcctgaattgaaagagcaatttaagaaaagagaagatgggtcaaaaaataatagtgtactggcatggccactcgcctcagtatctaaaaatcatcgtttggtgaagcttttagtattaggggcaaaattagatttgaatttgattcaacatcgcaatatggctgatgattggttgaaaaaagcatggcaagttttaaaagctgaatttttagttgaagatggtaattcaaaatatcatcttagaaaggaaaaactgacttttagtttagttgatcaagtgtttttatgcccaatcacacatcgtttaatagatatcaccttcaaaggttttacaccttatttacctagaagtttgccacaagatattgataaatataaaacccaagaaatggattttccaaagctatggaactttgatgttgaagatctaactgaacttcatcaagattcagcagtgcaaaagctaagatcactaaatttatggacagacttgtcggatagcgcagtatcgggaggatttttctatcgtacagcggagcattctgcacagcagtcggcaaatttactgaagcaatatgaaacctactttaaggctggtaaagttaatgtcttaaactgctcgacgaccatggaaatgggggttgatattggagggatatcaacagtggtaatgaataatgtaccaccgcatcctgccaattatttacaacgtactggacgagcaggtcgtggtaatcaatcacgtgctatttcttatacgatttgtaaaaataatcctcatgatcagcaagtgtttaagcaaccattatgggcttataccacagcaattcaggcacctcacgttagctttaattcacaacgattgattcagcgccatatcaatgcacagttgcttgccatctttttaatcaaagaggttggagatactgatattgatagacctagcttagacctgaaatggttttacattaagcaagatggtcaatctgattcgatttgtgacacttttgaaaagtggttagtgggtaaagtaatacaagattatcaatatgtattggaatttttgaaaaaaggcacagcattaaaagatattgataatgcagcaatcatagatgcttgcttgacaaaaattcgtgagctcaaaacagaatggctggaagaatatgtcattattgaaagagagtatcaacaagagctagttacgaatcctaatagtagctatctacatcgtctaacatgtgaaagggatcgattaacacaagcatatttattgtctgagttggcgatgcgtaatttcttaccaagctatgggttcccaactgatgtgattacttttgataacaccaataagatcgagagagatcattggaaaaagctttcaaaacgccgaaaaaagaaggatttggaaagtagtattgatcgcgaagataatttatcgcgaataaaaggcctaccaagccgaaatattgccattgccattcgtgaatatgcaccgggtgccgaagtgattgttgagggtcgagtctatacgtccaaaggaatatcacttgcatggcgaaatattcataatgaacacgataagaaaccacaaaaatttgattatgcatggatgtgtcatcattgtggtcagacaggtttaacttctggtgttttatcgaatgaaaatgagttgacctgtacaaatattgaatgtgaggaaactattactgatataaaaaaggtattacgtccaaatggttttagtgtcgattatcatgataaacctaacaatgatgtaactacgcaaaaatacatacctgtccaaaaaccttgggtaggtctttcaaaaagtgctgaaacttggccattgccacatgctaatttgggatattttaacttagatcctaatggacatgtattccaatatagttcagggttgaacggcacagggtatgccatatgtatgcagtgtggtcgtgccgactcaatggaagaaagttatgatggggaagtgaagtttccaagtactttaactccagatcgtccacatcagtctcttaaggctcaaaaagatggcgataaatttaagcaccatgattgtggtggctcaagtgtcgtaaaatctaatattcatttaggttgtcaaattaaaacagatgtattagagattgttttaagacatccgactcataatgaatatattttaaactctgaagaaggtcgagtaattgccacaacattggtcgtagctttacgtcaggcgatagcgagtgaattgggaattgccacagatgaactcggctacgcaattaaagtgaaaagaattgataatcaatcggttctaattttacaaatttatgatgatctaagtggtggtgctggtttttcaacaacggcagccaattttattgctgaagttttaagttcgttgatagagaaactcaattgtgtagatgaaagttgttcttcagtgtgtggcaaatgcttgcttgatagtcaaacaagacatgatagtgaatatttagatcgaactttagccttaagttggttagggagtgattttttaacttacttagagtctccaattcctggaacaaaatttatttctggtaccccattttcgatcattgaacagtatgtaaactatggagcaacacaggttacattcaacttaacgggaaacagtgaagattgggatgttttatgtactgcaaatagaaaaaaactatttaagttattgaacactaatattaagttagtgattgtagtttcaccaactttaaatttgaatgcacaaatacagcaagaaatgttggctctcgaaaaaattggcctttcatttgcagtaaatatcaatctcaattctgaatacttatacgctcagattgtaggtcaagataaaataactactttatatagtcagtcaccagaggtgagttgttttaatgaatactggttggaaagccaaagcccaagttataaatcaacctctgatccagaattgcaattacaaaaatttagttttgattttaaggctattgaatcttatgaaaatgagtttcaccagctaaaaattagtaaagattttgatagtgatctggtggatgcttttgcatacaaattctggtctaaaattctacctgtttcaaaattaaataatctcgtgaatgatgaggttgtagagatagaatattctgatcgatatcttcaatctccagccaatatcattttaataagtagcttgtttaaagaaataaagaatttattaggtaatcgtccaaaatttaccataacaactttttttaaaaacaaacaagtacaggaggagaggttatattcagatttcagacaattagatgaatttaataacttctttataaattattttgaagatcaattatctcagaaacttaatttaaatatatcacgatcaaaaatagatcattctcgttactttattttttcattaaaatcaggtaagaaagttgatatccgtttggatcaaggtgttggctattggcagatcaaatatattaattggcgtgaaattcaagagaaaggagattttcctttcttagaaagtatccagaaacaattattatggataaatgggaataataccaatatgtatgtagtgggtgaagatggttttaaaactgatatatatatcacaaaatcttga

SEQ ID NO: 28299 - DNA, 3291 bp, Acinetobacter baumannii
atgtatagtttaaattttagctctagacagtatttagcgcagatattaaaaacaagaggattaacatctgctgatgcacgtgtactttaccaatatcaattgtcttttcctgaatttaaagaaattgagaacattcttaaaacaagttttcaattccaaaatataaatcgtataggcgatgaatgggctaacttatttacgttgtacgctgccgaatggtttagacgtgaatatactgcaaaatggacatgggatccgattttaactgccttagatattagggatttaccagtaaacactagaaacgaagttgtaattaaggggctgagattttggaaacgcccgattattaaatatagtaaagccaataactatttaggttcgatttttaaagagggtggattcccctcacgcttgttaaaagaagatggaaatcgttatattgcgattttccaaaaagtgacctctttatatttagaaaataaatctcatattgatgagttaagagctgaggtacaacaagaattaaagactttaccacaagcatttgagcatgatgaaacactatctttagtgcttgatattgtaagattaattatcgaaaaagtggaaaactgtcaattaactgcactccaagacccaattaccactttagatcagcaatctaagcattggcgtaatgaatttccgttgcctattgatgaagaccaaacgatcgtagaggattttttaagaaatttatttaagtcggcctcagaagaaatatctaagcatcatcaattacgccaagcgttaaaatgtactcatagcttatctgaagattttaaatatttatctagtacaatttacttgccagaagaactttcatttacactaaatgaagatgttgagttgcgacgcacacgcggtaatttagtcattaaagaagggtggaatcataaaagccaatttttatgtacgacttatctttctcagcaaaataataaagtcattgcagaaattaatagaggttttttaaaagacatatatcgtcaattccacaacgaagctttatatctatgtttagaggtggatggggtagtactcagtcatattgaattagaagatacggctctcgattttgaaaccttacctatagcttttgaaatacaagaaaaaccaaaatatattgcccaaggtgctttaaaaaccaaagcacctgaaatattcattagtctgccaactggtgcaaggtttaccagtgtagaatcagcagaactttttgaatctgtaggtcagtttttaacatttaaactgtataaaattagggggcagcaacagatattgacacaagatggtgatcaaataataatcaaatgtggacattctgatattgaatttgagcagttattgtttagaaaaaataatatcagccaattagagacttccccaagtttagcatttatgggtaagccagcattaaaaacttatggcacacataccttatttcgtgggaatgatcagatcgagactacccctttgcatttacttttagggcagcaaatgctgactttaaaaaatagaaaaggtgaaagtttattaaaaaagaaagtggttattttgccaaaacattttaaggtcatggtacaagcaggtgtgacactagatcaggctatacttgatattgaatcggatgcagaaattcacattgaagtatcgaattctcactcaagcttagtgtatgaaaagataggaatatcctataagtgccaagtgaaatgtgcggtagtacctttagcattaaacttaaaaataatctttaaatttggtggagagtgtattgttactgttccgttccctgcaagaggttttaaactaattaatgagcaaaaagaagtaacatcaaaagatttagtaattcacgacttattgaatactgaactgcaagtgtactcctatgaccgcgcggctaagttgaattttgatattgtattaaaaactaaaataaatcagggacatgctgtacctttttatcgtaagaaaataaaggttaaacaaggcatttcttctattaatttatatgagctagtagaagatgtgaaaggcgttttagccttagatgatgatttagatagttttgttgaatgcgcaattagttatcatcacagcgaaaaaaaatggaacattcggcattatgcacaccaacttaattggggtaaaagtattaaggcttattataacaatgaagctttattatcctttaagccacaggctatgtcactagtgcaaccacaagttgcacctctcgttttacttgaaaaaaatgaatggataggtaaggtttttcaagttccggaattggatatgagtcttgcaccttatttattaatacctacaaaaaattctacattgtttagagccaagcttattccagaatttgattatcctcaagatagtgaaatagaagcattaaccgaggcaacacgtagttttggtcagaataaacaatcgattaagcagtttatacggacgttaaattatgacaataatgaggtattttgggattatgtgaaaaccttattacatgattatgaccatttgcctctaaatacttttgaagtcttaaagggtctagcgacaaattatgatcaattggctattactgtatttaaacttgatctatctctcgatattttacgtcgttttgaaactgaattatctgtactatggtttttaatacctgtttcatcttggcagaatgcaaccttacaagttattcaatactggcagaaaatgcttggtgatgaaggtacttatggtcgtgtaaaggcagaaaatattttaaaaaaagtaaagaatttaacacctttattggctgaatcatttcattcattctatttaagcaaccaacgtgaatttgggcctgagtttaattttcactttttaaatgactggatatttaagggtgaatttttgggaggagtagaaaacactgagtatcaacgaatgttgcaaagaaatcatagtgcgacagaagaccaagcttggcccacggcactttcgcagaataaatggggctactttgaatgtatgcagaagctcccttttagttgtcaattggcaagtaaatggaataaagatgtggtgtatttaccattttgtttagcatatatgaatgttaagtatcactctaaactccaattaagtgcctacgatttattgcaacttaaacaaattattgcatttgacgagcaatggtttaatcaaatttttagttcaactgttaaatatttaattttagaagcgaagtaa

SEQ ID NO: 28300 - DNA, 6318 bp, Acinetobacter baumannii; identical to SEQ ID NO: 28298

SEQ ID NO: 28301 - DNA, 3291 bp, Acinetobacter baumannii; identical to SEQ ID NO: 28299

SEQ ID NO: 28302 - DNA, 6318 bp, Acinetobacter baumannii
atgtataaatattttagttctttaacacaagaaagtattcaaaaaaataaagaagctacattgagtatattgggtatttcgtatccagaactacgtgatgttctaggacagcagatgtctcaagctgcgggcaaagatcaatcatttttatcttcaccggtgattgaacaaatgttcgcatgggaaaaaggtcaacccacattagatgctttgggtggtgaattacttcataagaaattaatcgatgctttagatcactcagaaaatggcgcatatcgttttaatcgtaattatcagccttatgtacatcaattacaaagctggaatgctttattaaaagacaagaaatctataatggttacttcaggaacgggttcaggtaaaactgaatgttttatggtacctattctaaatgatttatacgaagagtttattcaagcagggcaatccttaacaggtgtgcatgccttatttttatatccactcaatgcactgattaactcgcaacaagagcgattagatacttggactcgccatttttcacaatctaatgccattcggtattgtttgtataatggcaatacaccagagcataaatcacaggaaacaggaaaacaaaaacttcatcccaaccaagtgctcacacgtgaagaactgagattaaatccatctcctattttagtgactaatggcaccatgttggaatatatgatggtgcgccaaattgatgcacctattttgcaaaaatctcaaggaaaattgcgttggattgtattagatgaagcacatagttatatgggctcacaagctgcagaacttgcgatgcagttacgtcgggttctgcatgcttttggtgtggaagcaaaagacgttcgttttgtagcgacctctgcaaccattgcaggtgcagatgcagaagaaaagcttaaacaatttttatctgaaatctcaggtcaaagcacagagaatattttggtcattggtggtcagcgcgaagtccctgtattacctgtagttgaaaatcatcagcaatcttttgatgagttagtagcaattgatgctcaacacgaaatatcttatgagcgttatcaacaattagcagggcatccaattgcatgtgttttaagagaaagtatttgctcgcaacgtgctttaaccttagatgatttattaaaaattacccgagaaaagggtttccaactttctcaacatgaaattttggaatggttagatctattaacctatacaagaccatctgatgaagaacaagcttttcttaagattcgtgttaattattatcagcgtgtgactcatggtctatggagttgtacaaatgacaagtgtgataaaaaagacgatggtttaaaaaattggagctttggtcagatatatgcgacacatcaagaaaaatgtgattgtggggctcctgtattagaattaacgttctgtcacagctgtaaggaaccacatttaatcggttcattaggcaaggaagatgtgctgaaacagtggaccgttgaaattgaagatgaatttgcattacttcttgataatgaaacggaagaacaagaagaggttgaatataaaaatactatcaagaatcgtttagtagtattttctgtcaatgagaataaagaaaaaaactaccgccgagaccaactgaatttagaaaatttaaaactcggagaaatttctaaaaataccctgaacgtacattattttgaacctcataacagcagtgatccaattttatgtagtcatcctgaatgtggtgcaaagggttcgaagtttgatttgccatttaatcgtgcaattttaggtgcgccttactatattacacaaactgttccacagcttttacaatattgtccggatattgaacaaaaagaaattaatgaggcaagcaaaaattataatgacccagaatttattgaaggtgagtttaaagatttaaaggattgtgcaccggaggatatgccagctaagggtaagcgtttaatcacctttactgatagtcgtcaagggactgcgcgtttatccgtaaaaatgcaacaagaggcggaacgatcacgcttacgtggtgctgtgcttaaagcaataatacaacatacaaaagctcaagccaaaaccatagatccgatggaagtgctattacgtcagagattaaatgaagcagagcaagaaggtaatattgctagaataaagttctttcaagaagaattaaataatttaagtgctaataatacgccaatgacacttcctgaaatgaattgggaagagttatgtcgagaattagcgaaagatttcgattttagaacaggtattttgctcgccaatcgccatattgcaggtggaatttttgacgatgctggatcgcttaaacttgcacaaatgttactaacacgagagttttcacgtcgtcctaaaaatgcaaatagtttagaaacgttggggttggtgaaagttagttatcaaggcttaaaagacttaaatgatctgcctaactattggaaggagcaagggttaaccggtcaggattggcagaattttattaaagttattttggattactttattcgtgaaaatacagtgattgaacttgctgaggattggaaacaatggctaggaggcccagttctgcctaaacatgttgtcagtcctgaattgaaagagcaatttaagaaaagagaagatgggtcaaaaaataatagtgtactggcatggccactcgcctcagtatctaaaaatcatcgtttggtgaagcttttagtattaggggcaaaattagatttgaatttgattcaacatcgcaatatggctgatgattggttgaaaaaagcatggcaagttttaaaagctgaatttttagttgaagatggtaattcaaaatatcatcttagaaaggaaaaactgacttttagtttagttgatcaagtgtttttatgcccaatcacacatcgtttaatagatatcaccttcaaaggttttacaccttatttacctagaagtttgccacaagatattgataaatataaaacccaagaaatggattttccaaagctatggaactttgatgttgaagatctaactgaacttcatcaagattcagcagtgcaaaagctaagatcactaaatttatggacagacttgtcggatagcgcagtatcgggaggatttttctatcgtacagcggagcattctgcacagcagtcggcaaatttactgaagcaatatgaaacctactttaaggctggtaaagttaatgtcttaaactgctcgacgaccatggaaatgggggttgatattggagggatatcaacagtggtaatgaataatgtaccaccgcatcctgccaattatttacaacgtactggacgagcaggtcgtggtaatcaatcacgtgctatttcttatacgatttgtaaaaataatcctcatgatcagcaagtgtttaagcaaccattatgggcttataccacagcaattcaggcacctcacgttagctttaattcacaacgattgattcagcgccatatcaatgcacagttgcttgccatctttttaatcaaagaggttggagatactgatattgatagacctagcttagacctgaaatggttttacattaagcaagatggtcaatctgattcgatttgtgacacttttgaaaagtggttagtgggtaaagtaatacaagattatcaatatgtattggaatttttgaaaaaaggcacagcattaaaagatattgataatgcagcaatcatagatgcttgcttgacaaaaattcgtgagctcaaaacagaatggctggaagaatatgtcattattgaaagagagtatcaacaagagctagttacgaatcctaatagtagctatctacatcgtctaacatgtgaaagggatcgattaacacaagcatatttattgtctgagttggcgatgcgtaatttcttaccaagctatgggttcccaactgatgtgattacttttgataacaccaataagatcgagagagatcattggaaaaagctttcaaaacgccgaaaaaagagggatttggaaagtagtattgatcgcgaagataatttatcgcgaataaaaggcctaccaagccgaaatattgccattgccattcgtgaatatgcaccgggtgccgaagtgattgttgatggtcgagtctatacgtccaaaggaatatcacttgcctggcgaaatattcataatgaacacgataagaaaccacaaaaatttgattatgcatggatgtgtcatcattgtggtcagacaggtttaacttctggtgttttatcgaatgaaaatgagttgacctgtacaaatattgaatgtgaggaaactattactgatataaaaaaggtattacgtccaaatggttttagtgtcgattatcatgataaacctaacaatgatgtaactacgcaaaaatacatacctgtccaaaaaccttgggtaggtctttcaaaaagtgctgaaacttggccattgccacatgctaatttgggatattttaacttagatcctaatggacatgtattccaatatagttcagggttgaacggcacagggtatgccatatgtatgcagtgtggtcgtgccgactcaatggaagaaagttatgatggggaagtgaagtttccaagtactttaactccagatcgtccacatcagtctcttaaggctcaaaaagatggcgataaatttaagcaccatgattgtggtggctcaagtgtcgtaaaatctaatattcatttaggttgtcaaattaaaacagatgtattagagattgttttaagacatccgactcataatgaatatattttaaactctgaagaaggtcgagtaattgccacaacattggtcgtagctttacgtcaggcgatagcgagtgaattgggaattgccacagatgaactcggctacgcaattaaagtgaaaagaattgataatcaatcggttctaattttacaaatttatgatgatctaagtggtggtgctggtttttcaacaacggcagccaattttattgctgaagttttaagttcgttgatagagaaactcaattgtgtagatgaaagttgttcttcagtgtgtggcaaatgcttgcttgatagtcaaacaagacatgatagtgaatatttagatcgaactttagccttaagttggttagggagtgattttttaacttacttagagtctccaattcctggaacaaaatttatttctggtaccccattttcgatcattgaacagtatgtaaactatggagcaacacaggttacattcaacttaacgggaaacagtgaagattgggatgttttatgtactgcaaatagaaaaaaactatttaagttattgaacactaatattaagttagtgattgtagtttcaccaactttaaatttgaatgcacaaatacagcaagaaatgttggctctcgaaaaaattggcctttcatttgcagtaaatatcaatctcaattctgaatacttatacgctcagattgtaggtcaagataaaataactactttatatagtcagtcaccagaggtgagttgttttaatgaatactggttggaaagccaaagcccaagttataaatcaacctctgatccagaattgcaattacaaaaatttagttttgattttaaggctattgaatcttatgaaaatgagtttcaccagctaaaaattagtaaagattttgatagtgatctggtggatgcttttgcatacaaattctggtctaaaattctacctgtttcaaaattaaataatctcgtgaatgatgaggttgtagagatagaatattctgatcgatatcttcaatctccagccaatatcattttaataagtagcttgtttaaagaaataaagaatttattaggtaatcgtccaaaatttaccataacaactttttttaaaaacaaacaagtacaggaggagaggttatattcagatttcagacaattagatgaatttaataacttctttataaattattttgaagatcaattatctcagaaacttaatttaaatatatcacgatcaaaaatagatcattctcgttactttattttttcattaaaatcaggtaagaaagttgatatccgtttggatcaaggtgttggctattggcagatcaaatatattaattggcgtgaaattcaagagaaaggagattttcctttcttagaaagtatccagaaacaattattatggataaatgggaataataccaatatgtatgtagtgggtgaagatggttttaaaactgatatatatatcacaaaatcttga

SEQ ID NO: 28303 - DNA, 3291 bp, Acinetobacter baumannii
atgtatagtttaaattttagctctagacagtatttagcgcagatattaaaaacaagaggattaacatctgctgatgcacgtgtactttaccaatatcaattgtcttttcctgaatttaaagaaattgagaacattcttaaaacaagttttcaattccaaaatataaatcgtataggcgatgaatgggctaacttatttacgttgtacgctgccgaatggtttagacgtgaatatactgcaaaatgtacatgggatccgattttaactgccttagatattagggatttaccagtaaacactagaaacgaagttgtaattaaggggctgagattttggaaacgcccgattattaaatatagtaaagccaataactatttaggttcgatttttaaagagggtggattcccctcacgcttgttaaaagaagatggaaatcgttatattgcgattttccaaaaagtgacctctttatatttagaaaataaatctcatattgatgagttaagagctgaggtacaacaagaattaaagactttaccacaagcatttgagcatgatgaaacactatctttagtgcttgatattgtaagattaattatcgaaaaagtggaaaactgtcaattaactgcactccaagacccaattaccactttagatcagcaatctaagcattggcgtaatgaatttccgttgcctattgatgaagaccaaacgatcgtagaggattttttaagaaatttatttaagtcggcctcagaagaaatatctaagcatcatcaattacgccaagcgttaaaatgtactcatagcttatctgaagattttaaatatttatctagtacaatttacttgccagaagaactttcatttacactaaatgaagatgttgagttgcgacgcacacgcggtaatttagtcattaaagaagggtggaatcataaaagccaatttttatgtacgacttatctttctcagcaaaataataaagtcattgcagaaattaatagaggttttttaaaagacatatatcgtcaattccacaacgaagctttatatctatgtttagaggtggatggggtagtactcagtcatattgaattagaagatacggctctcgattttgaaaccttacctatagcttttgaaatacaagaaaaaccaaaatatattgcccaaggtgctttaaaaaccaaagcacctgaaatattcattagtctgccaactggtgcaaggtttaccagtgtagaatcagcagaactttttgaatctgtaggtcagtttttaacatttaaactgtataaaattagggggcagcaacagatattgacacaagatggtgatcaaataataatcaaatgtggacattctgatattgaatttgagcagttattgtttagaaaaaataatatcagccaattagagacttccccaagtttagcatttatgggtaagccagcattaaaaacttatggcacacataccttatttcgtgggaatgatcagatcgagactacccctttgcatttacttttagggcagcaaatgctgactttaaaaaatagaaaaggtgaaagtttattaaaaaagaaagtggttattttgccaaaacattttaaggtcatggtacaagcaggtgtgacactagatcaggctatacttgatattgaatcggatgcagaaattcacattgaagtatcgaattctcactcaagcttagtgtatgaaaagataggaatatcctataagtgccaagtgaaatgtgcggtagtacctttagcattaaacttaaaaataacctttaaatttggtggagagtgtattgttactgttccgttccctgcaagaggttttaaactaattaatgagcaaaaagaagtaacatcaaaagatttagtaattcacgacttattgaatactgaactgcaagtgtactcctatgaccgcgcggctaagttgaattttgatattgtattaaaaactaaaataaatcagggacatgctgtacctttttatcgtaagaaaataaaggttaaacaaggcatttcttctattaatttatatgagctagtagaagatgtgaaaggcgttttagccttagatgatgatttagatagttttgttgaatgcgcaattagttatcatcacagcgaaaaaaaatggaacattcggcattatgcacaccaacttaattggggtaaaagtattaaggcttattataacaatgaagctttattatcctttaagccacaggctatgtcactagtgcaaccacaagttgcacctctcgttttacttgaaaaaaatgaatggataggtaaggtttttcaagttccggaattggatatgagtcttgcaccttatttattaatacctacaaaaaattctacattgtttagagccaagcttattccagaatttgattatcctcaagatagtgaaatagaagcattaaccgaggcaacacgtagttttggtcagaataaacaatcgattaagcagtttatacggacgttaaattatgacaataatgaggtattttgggattatgtgaaaaccttattacatgattatgaccatttgcctctaaatacttttgaagtcttaaagggtctagcgacaaattatgatcaattggctattactgtatttaaacttgatctatctctcgatattttacgtcgttttgaaactgaattatctgtactatggtttttaatacctgtttcatcttggcagaatgcaaccttacaagttattcaatactggcagaaaatgcttggtgatgaaggtacttatggtcgtgtaaaggcagaaaatattttaaaaaaagtaaagaatttaacacctttattggctgaatcatttcattcattctatttaagcaaccaacgtgaatttgggcctgagtttaattttcactttttaaatgactggatatttaagggtgaatttttgggaggagtagaaaacactgagtatcaacgaatgttgcaaagaaatcatagtgcgacagaagaccaagcttggcccacggcactttcgcagaataaatggggctactttgaatgtatgcagaagctcccttttagttgtcaattggcaagtaaatggaataaagatgtggtgtatttaccattttgtttagcatatatgaatgttaagtatcactctaaactccaattaagtgcctacgatttattgcaacttaaacaaattattgcatttgacgagcaatggtttaatcaaatttttagttcaactgttaaatatttaattttagaagcgaagtaa

SEQ ID NO: 28304 - DNA, 6318 bp, Acinetobacter baumannii; identical to SEQ ID NO: 28302

SEQ ID NO: 28305 - DNA, 3291 bp, Acinetobacter baumannii; identical to SEQ ID NO: 28303

SEQ ID NO: 28306 - DNA, 6318 bp, Acinetobacter baumannii; identical to SEQ ID NO: 28302

SEQ ID NO: 28307 - DNA, 3291 bp, Acinetobacter baumannii; identical to SEQ ID NO: 28303

SEQ ID NO: 28308 - DNA, 6318 bp, Acinetobacter baumannii; identical to SEQ ID NO: 28302

SEQ ID NO: 28309 - DNA, 3291 bp, Acinetobacter baumannii; identical to SEQ ID NO: 28303

SEQ ID NO: 28310 - DNA, 6318 bp, Acinetobacter baumannii; identical to SEQ ID NO: 28302

SEQ ID NO: 28311 - DNA, 3291 bp, Acinetobacter baumannii; identical to SEQ ID NO: 28303

SEQ ID NO: 28312 - DNA, 6324 bp, Acinetobacter baumannii 1542444
atgtataaatattttagttctttaacacaagaaagtatccaaaaaaataaagaagcgactctgagtatattggggatttcgcatcctgaactacgtgatgttctaggtcagcaaatgtctcaagctatgggtgaagatcaatcatttttatcttcacctgtaatcgaacagatgtttgcatggaagaaaggccagcctactttagaagatttggggggacaactacttcatgcaaatgtgattcatgctttagatcacaaagaaaatggagcctatcgttttaatcgtcactaccagccttatgtgcatcaattacagagctggaatgctttgttagaagatcacaaatcgattgtggtcacttcagggactggttcaggtaaaacagaatgttttatggtgcctattttaaatgacttatatgaggagttcattcgggaaggacaatctttaacaggtgtgcatgcattatttttatatccgctcaatgcactgattaactcgcaacaagaacgtttagatgcttggacgcgacatttcctaccatcgaatgctattcgttattgtttatataatggtaatacaccagagcataaatcacagaaaactggagaacaaaatcttcatccgaatcaagtgttcacacgtgaagaactaagatcaaatccggcgcctattttggtgaccaatggcaccatgttggaatatatgatggtacgccaaatcgatgcgcctattttgcaaaaatctcaagaaaaattgcgttggatcgtattggatgaagctcatagttatatgggctcacaagcagctgaactagcgatgcaactacgtcgtgttctacatgcatttggtgtggaagcgaaagatgttcgttttgttgcaacttctgcaacaattgcaggtgctgatgcagaagaaaaactaaaacagtttttatcagagatttcaggtcaaagtactgaaaatattttggtgattggtggtcaacgtgaagtaccgccattggcatctgttgaaaataaccttctaactttagatgaattggtgtctattgatgaaggacaagaggtttcctctgaacgttatcataaattgtctggacacccaattgcactaacattacgtgaatgtatttgctcggaacgtgctttaacacttgaagatttattcaaaaaaacacaagaaaaagattttaagctatctcagcaagagattttaaaatggttagatttattaacctttacaaaaccttctcatgcagaacaagcttttcttaagatacgagtcaactattatcagcgtgtaactcatggattatggagttgtattaatgataagtgtgatcaaaaatctgaagatctaaaaaactggaactttggccaagtttatgcgacacatcaagaaaactgtgcgtgtggggcacctgtattagaattaacattctgtaagagctgtaaggaaccacatttattaggtttattgggtagggatgatgttcttaaacaatggactgttgaagttgaagatgaatttgcattacttattgataatgaagcagaagagcaagaagaaaaagaatttaaaaaggcgataaagaatcgtttagtcgtattttcttcaaatgaaaataaagagaaaaactatcgtcgagaccaactgaacttagataatttaaaacttgggcaaatttctaaaaatacgttaaatgtgcattattttgagccttatagcagtggtgatgcagttgaatgtagcaattctgaatgtggttcaaaaggaacaaaatatgacttgccatttagacgtgcgattttaggtgcaccttactatattacccagactgttccacatcttttacaatattgtccagatattgatcaggaggatattgaagaagtaagcaaaaattttaatgatccagaatttattgaaggtgaattcaaagagctgaaagactgcacaacatgggatatgccagctaagggtaaacgcttaattacctttacggatagtcgtcaaggcaccgcacgcttatctgtcaaaatgcaacaagaagcagagcggtctcgtttacggggggcagtagttggtgcattaatagaacatacaaaaaatacaagtcaacaacaaaccctaaatcctgcagtggtgacattcactcagctattgagtaaagcagaagaagaaggaaatacggccttaatcaatatttgcaaagcagaattagagaagttaaatacaaatgatacaaaatttgaacttcctgagataccttgggaggacctatgtaaacgtatcgcaaaagattttgattttcaaaatggtattttactcgcaaatcgtcatatcgcaggtgaagtttttgctgatgccggaccacttaaactggcacagatgttactcacacgcgagttttcacgtcgacctaagaatgccaacagcttagaaactttaggattggtaaaaattggttatcagggcttaaacaacttaaatgatctgccgaactattggaaagactctggcttaggtaatcaagattggcaagattttattaaagttgttctagattactatattcgtgagaatacagtgatagatcttgctgatgattggcagcaatggttaggcgggcgtgtacgtcctaagcatgttgtgagttttgaactagtaaatcaatttaaatacagagatgatggttcgaaaaataatagtattttggcatggccactagcatcagtgtctaaaaatcaccgcatagtcaaacttctagtattaggtgcaaaattagatttaagcttgcaagcacatcgaaatatggctgatgattggctaaaaaaagcatggcaagtattaaaagctgaatttctagttgaagatgggaattcaaaatatcatcttagaaaggaaaaattaacttttagtttggtggataaagtctttttatgcccaattacgcatcgcttgatggataccacattcaaagggttcacgccttatttaccaatcagtttgccgcataatattgataaatataaaacagaagaaatggtttttccaaagctgtggcagtttgattatgaaaatctcactgcacttcatcaagatttagcagtgagcaagctaagatcactaaatttatggacagacttgtcggatagcgcagtattgggaggattcttctaccgtacagcggagcactcggcgcagcagtcggcaaatttactcaagcagtatgaaacttactttaaggcaggtaaggttaatgtcttaaattgttcgacgaccatggaaatgggtgttgatattggagggatatcaactgtggtgatgaacaatgttcctccacatcctgccaattatttacaacgtacagggcgagcaggacgtggtagccaatcacgtgctatttcttacacgatttgtaaaaataatccacatgatcagcaagtctttaagcaaccattatgggcttatacaactgcaattcaggcaccccatgtgagctttaattcacaaaggttaattcaacgacatatcaatgcacagttactagccatctttttaatcaaagaaattggggatactgatattgatcgacctaaactggatttaaaatggttttatcttaaacaacatggtcaatctgattcaatttgtgacacctttgaaaaatggttggtaggaaaagcagtaaaagattataaacatgtattagagtttttgaaaaaaggtacagcattaaaagatattgataatgtagaaatcatagatgcttgcttgacaaaaatacgtgaactcaagacagagtggatagaagaatatgcgattgttgaaagagagtatcaacaagaactggctacgaatcctaacagcagttatctctatcgattaacatgcgaaaaatatcgtttaacccaagcatatttattatctgagttggcgatgcgtaactttttaccgagttatggtttcccaacagacgtgattacctttgataatacaaataagctagagaaagatcgttgggataagctttcaaagaaccaaaaaacaaaagatttggaaagtcatcttgatcgagaggataatttatctcgtgttaaaggcttgccaagccgcaatattgctattgcgattcgtgaatatgcaccgggtgcagaagtcatcgttgatggtcgcgtctatacttcgaaaggcatatcacttgcatggcaaaatgttcataatgaacacgataagaaatcccagaaatttgattatgcttggatgtgccatcactgtggtcaaacagggctgacatcaggtgttttgctgaatgaagaacagttgatatgtacaaatgctaaatgtggagaaattataaaagatgttaaaaaagtattacgtcctaacggttttagcgtagattattatgataaacctaataatgatgtcacgacgcaacaatatatccctgttcagaaaccttgggtaggtctttcagaaacggctttgaggtggtcattgccacatgcaaatttgggatatttaaatgtagatccaaatgggcatgtatttcaatatagttcaggtttgaatggcacaggatttgctatttgtctacaatgtggtcgagcagattctatggaagagagttacgatggtgaagccaagtttccaaatactttaactcccgatcgtccacataaggcacttaaagctcaaaaagatggtgataaatttaaacgaccagattgtggtggttcaagcgtcgttcaatctaatattcatttaggctgccaaataaaaaccgatgtgttggaaattattttaaaacacccgacccgtaatgaatatattttaaataatgaagatggtcgaattattgcaacaacattagttgtagctttacgtcaggctatagcaactaaattgggtattgctactgatgaattaggttatgcagtaaaagttaagaagattgatgataaagcagttttagttttacaaatatttgatgatctaagtggtggtgctggtttttcgacaacagctgcaaattatattactgaggtattaagattactcatagaaaaactgcaatgtatagaccacacttgtaattcagtctgtggtaaatgcctactagatactcaaacaagacatgatatagaaaatttagatcgtaatttggctttggaatggttaggagatgattttttaaattatctagattccccaattccggaaacagaatttattgcaggtactccattttcaattattgagcaatatgtaaatcatggtgcaacaaagatcacatttaacctcactggtaatagtgaagattgggatattttatgtcctgtaatcagaagaaaattatttaacttgttgaatagtaatattgaaatagtatttttgctttcatcaaatgtgaaattgacaccacacatacagcaagaaatgttgacgttggaaaaaattggtatttcatttacggtgaatagcaatgttacctctgaatatttatatactcagattttaagtaaggagaaagtaatctccttatacaatcagtcggcagaagtaagttgttttaatgagttatggttggagggtcaaagcccaagttataaatcaactatatccccaaagttgcaattacaaaaatttagttttgattttaaagctattaaatcttatgaaaatgagtttcaacgacttaaagttggcaaagattttgacggtgaatcagtaaatgatttttctcaaaaattttgggctaaagttttaccaatatctaagctacatgatttagtaaatgatgaggttatagaaatagaatactcagatcgatatctgcagtccccagcaaatatcattttaataattggtttgttgaaagaaatcaaaaaaatattatgtattcgccctcgattatctataataacgtgttttagaaataaacaaatacaggatgaaaaattatattcagatttcagccaacgtgaagtttttgagatattctttgtaaattattttgaagatcaattatctcagaaacttaatttaaatatatcacgatcaaaaatagatcattctcgttactttattttttcattaaaatcaggtaagaaagttgatatccgtttggatcaaggtgttggctattggcaggtcaaatatattaattggcgtgcaattcaagagaaaggagattttcctttcttagaaagtatccagaaacaattattatggataaatggaaataataccaatatgtatgtagagggtgaagatggttttaaaactgatatatatatcacaaaatcttga

SEQ ID NO: 28313 - DNA, 3291 bp, Acinetobacter baumannii 1542444
atgtatcgtttaaattttagctctagacagtatttagcgcagatattaaaaacaagaggattaacatctgctgatgcacgtgtactttaccaatatcaattgtcttttcctgaatttaaagaaattgagaacattcttaaaacaagttttcaattccaaaatataaatcgtataggcgatgaatgggctaacttatttacgttgtacgctgccgaatggtttagacgtgaatatactgcaaaatggacatgggatccgattttaactgccttagatattagggatttaccagtaaacaccagaaacgaagttgtaattaagggactgagattttggaaacgcccgattattaaatatagtaaagctaataactatttaggttcgatttttaaagagggtggattcccctcacgcttgttaaaagaagatggaaatcgttatattgcgattttccaaaaagtgatctctttatatttagaaaataaatctcatattgatgagttaagagctgaggcacaacaagaattaaagactttaccacaagcatttgagcatgatgaaacactatctttagtgcttgatattgtaagattaattatcgaaaaagtggaaaactgtcaattaactgctctccaagacccaattatcactttagatcagcaatctaagcattggcgtaatgaatttccgttgcctattgatgaagaccaaacgatcgtagaggattttttaagaaatttatttaagtcggcctcagaagaaatatctaagcatcatcaattacgccaagcgttaaaatgtactcatagcttatctgaagactttaaatatttatctagtacaatttacttgccagaagaactttcatttacactaaatgaagatgttgagttgcgacgcacacgtggtaatttagtcattaaagaagggttgaatcataaaagccaatttttatgtacgacttatctttctcagcaaaataataaagtcattgcagaaattaatagaggttttttaaaagacatatatcgtcaattccacaacgaagctttatatctatgtttagaggtggatggggtagtactcagtcatattgaattagaagatacggctctcgattttgaaaccttacctatagcttttgaaatacaagaaaaaccaaaatatattgcccaaggtgctttaaaaaccaaagcgtctgaaatattcattagcctgccagttggtgcaaggtttacccatgtagaatcgacagaactttctgaatttgtaggtcagtttttaacatttaaattgtacaaaattagggggcagcaacagatattgacacaagatgatgatcaaatcattatcaaatgtggtcattctgatattgaatttgagcagttattgtttaagaaaaataatatcagccaattagagacctgcccaagtttagcatttatgggtaagccagcattaaaaacttatggcacacataccttatttcgtgggaatgatcagatcgagattacccctttgcatttacttttagggcagcaaatgctgactttaaaaaatagacaaggtgaaagcttattaaaaaagaaagtggttattttaccaaaacattttaagattatggtacaagcaggtgcaacactagatcaggctatacttggtattgagtcggatgcagaaattcacattgaagtatcgaattctcactcaagcttagtttatgaaaagactggaatatcctataagtgtcaagtgaaatgtgcggttgtacctttagcattaaatttaaaaataacctttaaatttggtggggaatgtattgttactgttccgttccctgcaagaggctttaaactgattaatgagcaaaaagaagtaacatcaaaagatttagtaattcacgacttattgaatactgaactgcaagtgtactcttatgaccgcgcggctaagttaaattttgatattgtattaaaaacaaaaaaaaatcagggacatgatgtacctttttatcgtaagaaaataaaggttaaacaaggtatttcttctattaatttatatgagctagtagaagatgtgaaaggcattttagccttagatgatgatttggatagtttcgtcgaatgtactgtcaattatcatcatagcgaaaaaaaatggaatatacggcattatgcgcatcaactgaattggggtaaaaacgttcagggttattataacgataaaactactttagtttttaagccacaagcaatgtcgttagtgcaaccacaagtggaaccactcgatttacttgaaaaaaatgaatggataggcaaagttttccaagttccagaattggatatgaatcatgcaccatatttattaatacctgcaaaagattcgacattgtttagagccaagcttattcaagaatttaactatcctgaagatactgaactagatgtattaaccactgctacacgtaattttggtcagaataaactcttgattaagcagtttattcgtgcagtaaattatgaaaataatgaggtattctgggatcatgtgaaagcattattacagaattataatcatttaccactaaatacttttgaagttttaaagggtctagcaagtaattatgatcaattggctatcgcaatatttaaacttgatttgtctctcgatattttacgtcgtttcgaaaccgaattatcggtgatgtggtatttgattccagttgcttcatggcagaaggcaactcatcaagtgattcaatattggcagaagatacttggtgatgatggtgggtacggtcgaggaaaggcagaaaatatcttaaaaagattgaggaattttacacctttattggctgaatcatttcattcatattacctaaataatcaatactcatttggaccagaatataattttcagattttaaatgattatatttttgagggtaagtgttggggtggagttgaaaactcagaatatcagagaatgctacaacgcaaccacggtgcaacagaagatcaagcatggccaactgcactttcgcaaaataaatggacttactttgactgtatgcagaagctcccttttagctgtcaattggcaagtcaatggaataaagatgtggtgtatttaccattttgtttggcttatatgaatgttaaacatcaatctctattgcaattgagtgcctatgaggtactgcagcttaaacaaatcattgcatttgatgagcaatggttcaatcaaatttttagttcaattgttaaatatttaattttagaagcgaagtaa

SEQ ID NO: 28314 - DNA, 6300 bp, Acinetobacter baumannii 99063
atgcaaccttattattccgatttattagaacaagcatgtcagcgtacaaaagaatcaacgttaagcgtattagggatcaacgatcctgagttaagagaacaccttgctgaacaaatgtctcagcttccgggaagcaaattttcatttttagctccacctgtttttgagcatacttttgcttggaaacaagcacctgtgacgatgacagaattaagtggaaaattattagcgaagtcagttgtaagtgctttggattcgcagagtaatggtcgctatcgctttggggcagaatttaagccttttgaacatcaactaaaaagttggaaaaacttattagcggataaaaaatcaattgttgtcacatctggtacaggttcaggtaaaacagaatgttttatggtaccaattctgaatgatttatttgaattaagcgaaaatatcaatgcgccgttggaaggtgtgcatgctctattcttatatccgcttaatgcgttgattaattctcaagaagagcggttaagtgcttggactcaacattttggcggaaaacttagatattgtttgtataacgggaatacccccgaatcagagagttcaaatagaacattacaaaaggaccgtccttatcaagttttatcacgagaattgatgagaaaaagtcctgctccaatcttggtgaccaacgggacgatgttggaatatattatggtgcgtcaaattgatgcaccgattattgaaaaatctagagcaaagaaaagcctgcgttggattgttttagatgaagctcatagctatgttggatcacaggcagcagagcttgccttgcagttacgacgtgttttagaggcctttggtgttgaggccaaagatgtaagatttgtcgcaacttctgcaaccattgctgacagtaatgcagaacaacaattaaagacctatttatctcagttggctggtattgaggaaagtcaaatcgaagtgataggtggccagcgtgcagtcccacaattaaaacttgaaactaatcacaataaactcagtttaaaagaattatctgaaattgagagtgatttagaagttagtgctaaacgttttgaagcattagaatcgaatcaaacagcacgagcaattcgggaaatcattgttcaacaaggtagagaaagttataagccattaacatctttggaaattaaagaaaaattaaatgccgactatgctatttcagtgaatcaagtcgaaattattgcttggattgacttactaacaaatacaaaagcacaagaaaaagaagaggctttcctaaaagtacgagctcacttcttacaaagaattacgcatggcttgtggagttgtattaatcctcattgtaatcaaaaagagggtacagcattaaaaaaatggccatacggtaatgtatatgcgacgtgtgaacaaaagtgtaaatgtgaatcaccagtcttggagctgacattttgtaaagaatgtaattcaccacatttattagggcaactcgttgacgctaatgatggtattcgtcagcttaaacaagttggggaagtcaaaattgatgagttttcgctgctaactgaagaagatgaaattgaagaagccgacattaataatagctcgaacaagttaatagattacaatcaatcaatattgctaagtgtaaatgataacggggagatgctgaatctagatcgtggaggctttgaaaaatatccaggggaagaggaattcaatctttttgcgacatcaaataaatgccactactgtgagctagagacgcaagaaggttatttgcctgtaaatagaagcattcttggtgcacctttttatgttactaaagcaatcccgactattttagaattttgtcctgatattacgattaaagagttagaagaaaatggtgttacgaacatttcacctcaaagcttaccttcatttggacgtcgtttaattacatttacggatagtcgccaaggcaccgcaagaatgtccgtacagatgcaacaggaggcgcagcgttcacgattaagaggtgctgtggtggaaatgttaaaaaaaatacctgatctatcgggtggggagatgtctcgagaggaaattgaggagcaaattgaacaaataaaacatgatccaaagatgaagatgtttctgacattgcttcaacaggaactattgaaattagacacctcagacgaaagttcgatttcatggaaagagatgatcgagaagcttacagctttatccgattttaacttttcaatactgaacgcaatgaagtattactctccggaagtttttggagatcaaactgaagggtcacatagattgatctcaatgttattgttgagtgaatttagcagacgtccacgtaatcgaaatagtactgaaacgttgggattagtaaaagttggttatagtggtttagaaaaagttagcagtgttcctttatattgggaatctaaaggccttaacttacaagactggaaggactttttaaaagtcgttctagatttctatgtgcgagagtattactacattcatatagatagaagtatttcaaattggatggggaggaaaattgttacaaaacgactatttggacctgattcaaaattaacagaagataaaattagtaaacaatggcctttagcttctaagcgaaagaataatcgtttagtgaaactattagcattaggtgggcaattagatttaaatgctccaattgatatagatatcgccgatgaatggctaaaatgcgcttggaaagttttgactcaagatatagctattttagaaagtgataatggtcaatttttcattagaccacaaaagttcaaattttcattgaatgaacacgtatttatttgtcccgtcactcatagattaattgatactaccttcaaaggtattacgccatatctaccgacgggtattccaaagagtaaagaggctttcatttgtcaaaagacaaaaatgccgaatttgaaggtgtttagttccaataaagatcatcatgacaacattcaatacatccgtgaattaattgctaatgatgagacaattaaggagctacgctctttaaatttgtggaatgatctttgtgatcgaattattgaaggtggcatgtattatcgagttgcagaacattcggcacagcaagcaagtgagcgattacaagactacgaaaagcgatttaaatcaggcgaagtgaatgtaatgaactgttcaactactatggaaatgggggttgatattggcggtatttcagcagtggtgatgaataacgtaccaccacatcctgcaaactatctgcaacgtgcgggtcgtgcgggtcgtagtaaagaatctagagcactttcttacacaatctgtaagtcaaatccacatgatcaacaagtatttcataaccctaaatgggcttttgagaccagtattccggcaccttatgtcgctttaaactccaagagattgatccaaaggcatgtcaattccatgtatctctctttctttttaaaaaatgagattggaaatacagatgctgagaaaactaaattaaatttgaagtggttttatttagcaaatggtgacgaagatatttctgtttgcaatcgatttattaattggataaaagccaatatttatacatattcttatgcgctagaaaaattaatcaaaggtaccgatttatcttttgattccgttgaaagtattttagggaacactatccaaaaaatcactgaaatgcgtgatcaatggttaagagaatacctgcgactagaaacacagatgagtgaggcagtgaaaggtagtgcttacgcttatagattaagtattgaaatgcgtagacttagtgatgaatatttattaagagaacttgctgctaaatgctttctaccagggtatggcttcccaactgatattgcatcatttgaaacgaccaatgtcattgactacatacgtcaaaagcaagatagagatgctgaaaagcaacgaaagtctagagaagataatgtgtctttattacgtgatatgccaagtcgaaatttagctgtcgctattcgagaatatgcgccgggttcagaaattgtattggatggaagggtttttaaatccaaagggatatcattagcttggcataatattcatagttctgatgcaaaagaagcacagaaatttgatttggcatggcgctgtgtacattgcggtcaaaatggatttaatacagatagtgcagtcgatattaataatgtttactgtgataatccaagttgcggtgaaaaaattcgcataaatgagcaacgtaaagttctgcagccaactggtttcgttcatgatttttatgaagaacctagtaacgatgtaacaacacaaactttcatacctgtccaaaccccttggatcgctggaaagggggcaagattaagcttgccgaatagtgccttaggatttatggttgccgatacatcggggcatgtatttaattatagttcaggtttatacgggcatggttatgctgtgtgccttgaatgtggtcgagcagaatcccaaaaggaaaaggaaaaatttccattgtctctttcaccagagcagaaacattatccattaaaaccatctaaacatgatcgagaaaatgggcaaagaaagttctgtgaaggcagtgagcgtttaatcaaagatttacatctaggtagctatatgactacagatatctttgaattggtgttacatcaccctgaacgtaatgaatatcttacagatagtaaagaaaatgaaagtatagcatttactttggctgtggctttcagaaaagcattagcgaaaaagttaggtatatcagctaatgaattgggatatggtaagcgtccaatattattagatggtaatcatcagattacagctattcaggtgtatgacttcattagtggtggagcaggatttgcgagttcagctcctcgtcacattgagtcgttattatctagtatggtcgatgagcttgaatgtccgaaatattgtgagtctgtatgtgctcattgtcttttggattcacagtcacgacatcattacagtttgttaaatcgtcatgatgttaaaaagtggttaggtgcaaactataaaaactttatttctactgaagaattgtcattcttctctggtgcacaatattggccatatagcttgaaagaatgcattgaacaccatgtatcattaggggctaagaaactaattttgaattggggtggagaatctgatagttgggagttgttatctcctagtgttaaaaaaacaattgctagatgggcagaggatacaagtttagaaatcgatatttctctaccacaaactatcatagattctaaagcatatttggctgagctgaaatttttacaaacacactttaatgtacaatttgtcgatggtgacaatattcatcaatctattgtggcacaactatatttgacagatcgtattgttacagttgttagtcctgatatgaatagtcgtataccaaatgaagagtggttgaatacaaatgccatagttggagttagtgaaacttataagttactgagtgagaaagtcataacattaccaactttagtggaaaaaaatcaaagctcgattgtgggattagatcttcttgatcaattgaatgttgatttatgtagctttggtcgtaagttctggaatttggttgctgaaagtactagtgagttcggagaaatttgccagaatgaaactataaaaagtattgagtattcagatcgttatatcaagtcagctagcaatatgttgttaattgttagttggttaaaggggcttgaggatcaagttggaaatattggtcagttgaagattaagacagttatttctgatgatgagacaaaagatttaccaacgatccttcatcatgattaccatagtgtgaaacaatttgagaaggtttttgaaaaactattaactgataatttagatatatcccaaaaagaaatagatttaatgacctatgaaaatggtaaggctctgtatcacaagcgaaatttaactataacttttgagtcggggactatatttgatattcagctcgatcaggggcttggctattggagattatttgagagtcataaattgtcacaacgaaatgtctattttaatgctcaaagggacttcgtaagtgtggctaaagggcttactgatttacaaaaatttattgtcgttagaaatggagaacagaatccaacgagcatttatgtgaaaaggagagtggctgatttagtcgcagttgtttctaaataa

SEQ ID NO: 28315 - DNA, 3369 bp, Acinetobacter baumannii 99063
atggagttgttagcatctgatatattaggggagcaattgagtgctagacatattcttaagcgaatttttgagtcgcgtaaacttactgagccaacaagtcatccactgtatagctatcatattaccctagaagaatatcaagacctaaagcgtacgctgagatatagccaacaagatcaaaaaagccataaacctggtcgtgaatggtgtgcagtttttacactatttgtttcggaatggtttcgtcgagaatataagagtggttggagttgggggcctgtatatgatgaactgggctttcaacctttggatgatattcgctatgtggttcagcaaggcttagagggtttttggaagcgtccgatccttaaatttgaaggttcaaatcataccaactatctgggttctgcatttaaagaagggggattcccttcaaatcttttaatggaaaaaggcaatcattatcagactgtatttaaacgtattgtggcgcagtttagtcactatagacattataaccctgaaataaatgaccaactgattcaagcttatactcgttatctgccacaggcattcaaggagcatgaaacgcgagtgcttatttcagatatggcagaacatcttgttcatttggttgaaacgcatcaattagacaatacagataatccagcagcttatttatctaacaatttcccgaagtggagggaagcatttcctctaccattagaaagtagtgtggcggagcagtttttaaatcagttactcgttacttctagtactgaattgaagcaaatgaagacaaaacaggatgctttatcctgtgcgagtttttttaaccgcaattctaatcaaatcttaactgaagttttcctaccaaattccttagaaattactttggaggacgttaaagggattcctcctcgagtagaaattgtattgtatgaagcacatgaacccttagcaaaacttggcacagcaacgtttatggcaaggcctgaggctaagaagccagtgaatatacgtataggtgcacaaacgcgcattattactagaaagcattatcaacatggattgattctggcactacaaaataaagatcagattctttatcaaaaagaattacctcaaacttgtttagaaatcggtagtgttcctgttgcatttgcgcaggatgagggtgagctttgtccatttattgggcaggcttcatttaagacagcagaatcagaaattattttactattaccgccatcatatcgatttacttctcaggagtgtgtcactgggcacttgtcgaatgcttttggccagcatgtttacaaggtaaaaggtgatattgaagttattggtgataatcaagaacaatatcagattcaatgctctaaatattttgacaaatcagaacttgtagatcttgttggtaagaagttttcttggcctacagtacctgcattggcttttttaggaagacctaaggcacgttatatagaaacgggtttgcagtcaaaaaatgatagtttagctatttatgcagaacaaaagcttttagctcatcatatgggttctgcagcatatggcgtaaagactttaaccattaaaaattcatctcaaaatgtggtgttacgtcgcaaggttgtaatttttcctgaagacctgcaaattgaattactggcgggtgatacgcctaatgaagcaaatattcgtcttctaacaaaaagtaatatcatttgcttaggaatcactactgatcatcaagcagtgagttttaagtcgcgtaaactgaatgatgatatatatgggcaatatggttatgaatatcatctaaaatgcaatgagcatccacctgaaaatataaaactgaatttgatgctgaatttgggagatcaagtagatttattactaccatttccatcacatggtgcaacgctctacaacggaaatcatcagccgattaaacaaaaagtattaactgtagatgatttacttggttcaagattatgtttatatgcgccagagaataagccaaccaattttcggatgacaatcagactgaagagcattcatattcgagatgtagatgcgccttactacaaatggcaatttttggtgagtggaaaaccacatcaagaatcacttattcattatcgagctgaaatagaagaattattagcattaacaaaagacttagatgcacggattattctcgaagtcactggtgggaaacaatctttaaattatgagattaaacattatcaaaccgagtttgaaatagatgaacaaggtcattattttttaaatggtttgaatctttcaggttcacaagtggttgatccagtcatcatggttttaaaccaacctgaacaggctgttttaccactcgaaccagttacaactgaaggtgttgaaacaggtaagtataaattgccaagattgagcaatgtgggtccttgtttaattattcctagagatgaacaatcgattaaatttagaccgaaattcatatcgcagcagataaaagaagattcattgtcttttgaaactgcggataccttacatactgccgtacgtgattatcatccaacatttaacccaaatagtattgcagattacttagaacttatggcgagtgatttgcaaaactctggatggctgtatctttaccacttatattcgaagtacaaccatttaccgttggtcacatttcaagtgtggaaggatttggtaagaaatccatcatgtttggcactggcgatatggttacttgattttgaacatgatatttatcaacgcttcgaacgagaattcgatttagtatgggaattaatccctgctaaagcttggaaaaatgcaatctctaaaacttttgaactttatgtgagtcaaggtatccctgaggccattgttaaaaaaacgctgaaagcgagatatgcaaagttatctcaagacatttcaacgctaaatcaaagtttagaagcttattattttgatgagccggttctaaatggattaacgcagaatcagttgaataatattgttaacggtcattatcttcagaatttattgagataccagcctgaaggtgaattgtggccaatgtggttccagcaacaactcacagcgtggtttgaaaaagataatctaaatcttccattaaaacctatggtcagtttgccacagcatgcatcagttattcttttgccaatttatcttgcgctaaaaaatgtaggtctaaccagttttgtgcttgaagataaatcaaatagtttaactcatcataagattcgtcagatccgtgattttgaccagtcttggtttaactcaatttttgaaataacaacatcttatttattaaatttaaaggctcactaa

SEQ ID NO: 28316 - DNA, 6324 bp, Acinetobacter baumannii AA-014
atgtataaatattttagttctttaacacaagaaagtatccaaaaaaataaagaagcgactctgagtatattggggatttcgcatcctgaactacgtgatgttctaggacagcaaatgtctcaagctatgggtgaagatcaatcatttttatcttcacctgtaatcgaacagatgtttgcatggaagaaaggccagcctactttagaagatttagggggacaactacttcatgcaaatgtgattcatgctttagatcacaaagaaaatggagcctatcgttttaatagtgactaccagccttatgtacatcaattacagagctggaatgctttgttaaaagatcacaaatcgattgtagtcacttcagggactggttcaggtaaaacagaatgttttatggtgcctattttaaatgacttatatgaggagttcattcgggaaggacaatctttaacaggtgtgcatgcattatttttatatccgcttaatgcactgattaactcgcaacaagaacgtttagatgcttggacgcgacatttcctaccatcgaatgctattcgttattgtttatataatggtaatacaccagagcataaatcacagaaaactggagaacaaaatcttcatccgaatcaagtgttcacacgtgaagaactaagatcaaatccggcgcctattttggtgaccaatggcaccatgttggaatatatgatggtacgccaaatcgatgcgcctattttgcaaaaatctcaaggaaaattgcgttggatcgtattggatgaagctcatagttatatgggctcacaagcagctgaactagcgatgcaactacgtcgggttctacatgcatttggtgtggaagcgaaagatgttcgttttgttgcaacttctgcaacaattgcaggtgctgatgcagaagaaaaactaaaacagtttttatcagagatttcaggtcaaagtactgaaaatattttggtgattggtggtcaacgtgaagtaccgccattggcatctgttgaaaataaccttctaactttagatgaattggtgtctattgatgaaggacaagaggtttcctctgaacgttatcataaattgtctggacacccaattgcactaacattacgtgaatgtatttgctcggaacgtgctttaacacttgaagatttattcaaaaaaacacaagaaaaagattttaagctatctcagcaagagattttaaaatggttagatttattaacctttacaaaaccctctcatgcagaacaagcttttcttaagatacgagtcaactattatcagcgtgtaactcatggattatggagttgtattaatgataaatgtgatcaaaaatctgaagatctaaaaaactggaactttggccaagtttatgcgacacatcaagaaaactgtgcgtgtggggcacctgtattagaattaacattctgtaagagctgtaaggaaccacatttattaggtttattgggtagggatgatgttcttaaacaatggactgttgaagttgaagatgaatttgcattacttattgataatgaagcagaagagcaagaagaaaaagaatttaaaaaggcgataaagaatcgtttagtcgtattttcttcaaatgaaaataaagagaaaaactatcgtcgagaccaactgaacttagataatttaaaacttgggcaaatttctaaaaatacgttaaatgtgcattattttgagccttatagcagtggtgatgaagttgaatgtagcaattctgaatgtggttcaaaaggaacaaaatatgacttgccatttagacgtgcgattttaggtgcaccttactatattacccagactgttccacatcttttacaatattgtccagatattgatcaggacgatattgaagaagcaagcaaaaattttaatgatccagaatttattgaaggtgaattcaaagagctgaaagactgcacaacatgggatatgccagctaagggtaaacgcttaattacctttacggatagtcgtcaaggcaccgcacgcttatctgtcaaaatgcaacaagaagcagagcggtctcgtttacggggggcagtagttggtgcattaatagaacatacaaaaaatacaaggcaacaacaaaccctaaatcctgcagtggcgacattcactcagctattgagtaaagcagaagaagaaggaaatacagccttaatcaatatttgcaaagcagaattagagaagttaaatacaaattatacaaaatttgaacttcctgagataccttgggaaggcctatgtaaacgtatcgcaaaagattttgattttcaaaatggtattttactcgcaaatcgtcatatcgcaggtgaagtttttgctgatgccggaccacttaaactggcacagatgttactcacacgcgagttttcacgtcgacctaagaatgccaacagcttagaaactttaggattggtaaaagttggttatcagggcttaaacaacttaaatgatctgccgaactattggaaagactctggcttaggtaatcaagattggcaagattttattaaagttgttctagattactatattcgtgagaatacagtaatagatcttgctgatgattggcagcaatggttaggcgggcgtgtacgtcctaagcacgttgtgagttttgaactagcaaatcaatttaaatacagagatgatggttcgaaaaataatagtattttggcatggccactagcatcagtgtctaaaaatcaccgcatagtcaaacttctagtattaggtgcaaaattagatttaggcttgcaagcacatcgaaatatggctgatgattggctaaaaaaagcatggcaaatattaaaagctgaatttctagttgaagatgggaattcaaaatatcatcttagaaaggaaaaattaacttttagtttggtggataaagtctttttatgcccaattacgcatcgcttgatggataccacattcaaagggttcacgccttatttaccaatcagtttgccgcataatattgataaatataaaacagaagaaatggtttttccaaagctgtggcagtttgattatgaaaatctcactgcacttcatcaagatttagcagtgagcaagctaagatcactaaatttatggacagacttgtcggatagcgcagtattgggaggattcttctatcgtacagcggagcattcggcgcagcagtcggcaaatttactcaagcagtatgaaacttactttaaggcaggtaaggttaatgtcttaaattgttcgacgaccatggaaatgggggttgatattggagggatatcaactgtggtgatgaacaatgttcctccacatcctgccaattatttacaacgtacagggcgagcaggacgtggtagccaatcacgtgctatttcttacacgatttgtaaaaataatccacatgatcagcaagtctttaagcaaccattatgggcttatacaactgcaattcaggcaccccatgtgagctttaattcacaaaggttaattcaacgacatatcaatgcacagttactagccatctttttaatcaaagaaattggggatactgatattgatcgacctaaactggatttaaaatggttttatcttaaacaacatggtcaatctgattcaatttgtgacacctttgaaaaatggttggtaggaaaagcagtaaaagattataaacatgtattagagtttttgaaaaaaggtacagcattaaaagatattgataatgtagaaatcatagatgcttgcttgacaaaaatacgtgaactcaagacagagtggatagaagaatatgcgattgttgaaagagagtatcaacaagaactggctacgaatcctaacagcagttatctctatcgattaacatgcgaaaaatatcgtttaacccaagcatatttattatctgagttggcgatgcgtaactttttaccgagttatggtttcccaacagacgtgattacctttgataatacaaataagctagagaaagatcgttgggataagctttcaaagaaccaaaaaacaaaagatttggaaagtcatcttgatcgagaggataatttatctcgtgttaaaggcttgccaagccgcaatattgctattgcgattcgtgaatatgcaccgggtgcagaagttatcgttgatggtcgcgtctatacttcaaaaggcatatcacttgcatggcaaaatgttcataatgaacacgataagaaatcccagaaatttgattatgcttggatgtgccatcactgtggtcaaacagggctgacatcaggtgttttgctgaatgaagaacagttgatatgtacaaatgctaaatgtggagaaattataaaagatgttaaaaaagtattacgtcctaacggttttagcgtagattattatgataaacctaataatgatgtcacgacgcaacaatatatccctgttcagaaaccttgggtaggtctttcagaaacggctttgaggtggtcattgccacatgcaaatttgggatatttaaatgtagatccaaatggacatgtatttcaatatagttcaggtttgaatggcacaggatttgctatttgtctacaatgtggtcgagcagattctatggaagagagttacgatggtgaagccaagtttccaaatactttaactccagatcgtccacataaggcacttaaagctcaaaaagatggtgataaatttaaacgaccagattgtagtggttcaagcgtcgttcaatctaatattcatttaggctgccaaataaaaaccgatgtgttggaaattattttaaaacacccgaaccgtaatgaatatattttaaataatgaagatggtcgaattattgcaacaacattagttgtagctttacgtcaggctatagcaactaaattgggtattgctactgatgaattaggttatgcagtaaaagttaagaagattgatgataaagcagttttagttttacaaatatttgatgatctaagtggtggtgctggtttttcgacaacagctgcaaattatattactgaggtattaagattactcatagaaaaactgcaatgtatagaccacacttgtaattcagtctgtggtaaatgcctactagatactcaaacaagacatgatatagaaaatttagatcgtaatttggctttggaatggttaggagatgattttttaaattatctagattctccaattccggaaacagaatttattgtaggcactccattttcgattgttgagcaatatgcacatcatggtgtaacacagatcatattccaccttactggtgatagtgaaaattgggatattttatgttctgcaattagaaaaaaactatttaagttattgaatactgatattaagttagtgattgtagtttcaccaactttaaatttgaatgcacaaatacagcaagaaatgttggctctcgaaaaaattggcctttcatttgcagtaaataccaatctcaattctaaatatttatacgctcagattgtaggtcaagacaaaataactagtttatatagtcagtcaccagaggtgagctgttttaatgaatattggttggaaagccaaagcccaagttataaatcaacttcttatccagaattaaaattacaaaaatttagttttgattttaaggctattgaatcttatgaaaatgagtttcatcagctaaaaattggtaaagattttgatggagggctggtagatgcttttgcatataaattttggtctaaaattctacctgtttcaaaattaaataatctcgtgaatgatgaagttgtagagattgaatattctgatcgatatcttcaatctccagccaatatcattttaataagtagtttgtttaaagaaataaagaatttattaggtaatcatccaaaatttaccataataacttcctttaaaaataaacaaacacaagaggagaagttgtattctgattttagacaattagatgagtttaagagcttctttataaattattttgaagatcaattatctaaaaaactaaatttatatatatctaaatcaaaaatagatcatcctcgttactttatttttacattaaaatcaggtaagaaagttgatattcgtttagatcaaggtgttgggtattggcagatcaaatattttaattggcgtgaaattcaaaagaaaggagattttcctttcttagagagtatccagaaacaattattatggataaaaagaaataatactaatatgcatgtagtaggtgaagaggattttaaaacggacatatatatcgcaaaatcttga

SEQ ID NO: 28317 - DNA, 3291 bp, Acinetobacter baumannii AA-014
atgtatagtttaaattttagctctagacagtatttagcgcagatattaaaaacaagaggattaacatctgctgatgcacgtgtactttaccaatatcaattgtcttttcctgaatttaaagaaattgagaacattctgaaaacaagttttcaattccaaaatataaatcgtataggcgatgaatgggctaacttatttacgttgtacgctgccgaatggtttagacgtgaatatactgcaaaatggacatgggatccgattttaactgccttagatattagggatttaccagtaaacaccagaaacgaagttgtaattaaggggctgagattttggaaacgcccgattattaaatatagtaaagccaataactatttaggttcgatttttaaagagggtggattcccctcacgcttgttaaaagaagatggaaatcgttatattgcgattttccaaaaagtgacctctttatatttagaaaataaatctcatattgatgagttaagagctgaggtacaacaagaattaaagactttaccacaagcatttgagcatgatgaaacactatctttagtgcttgatattgtaagattaattatcgaaaaagtggaaaactgtcaattaactgcactccaagacccaattaccactttagatcagcaatctaagcattggcgtaatgaatttccgttgcctattgatgaagaccaaacgatcgtagaggattttttaagaaatttatttaagtcggcctcagaagaaatatctaagcatcatcaattacgccaagcgttaaaatgtactcatagcttatctgaagattttaaatatttatctagtacaatttacttgccagaagaactttcatttacactaaatgaagatgttgagttgcgacgcacacgtggtaatttagtcattaaagaagggttgaatcataaaagccaatttttatgtacgacttatctttctcagcaaaataataaagtcattgcagaaattaatagaggttttttaaaagaaatatatcgtcaattccacaacgaagctttatacctatgtttagaggtagatggggtagtactcagtcatattgaattagaagatactgctctcgattttgaaaccttacctatagcttttgaaatacaagaaaaaccaaaatatattgcccaaggtgctttaaaaaccaaagcatctgaaatatttattagcctgccagttggtgcaaggtttacccatatagaatcgacagaactttctgaatttgtaggtcagtttttaacattcaaactgtacaaaattagggggcagcaacagatattgacacaagatgatgatcaaatcattatcaaatgtggtcattctgatattgaatttgagcagttattgtttaggaaaaataatatcagccaattagagacctgcccaagtttagcatttatgggtaagccagcattaaaaacttatggcacacataccttatttcgtggtaatgatcagatcgagattacccctttgcatttacttttagggcagcaaatgctgactttaaaaaatagacaaggtgaaagcttattaaaaaagaaagtggttattttaccaaaacattttaaggttatggtacaagcaggtgcaacactagatcaggctatacttgatattgagtcggatgcagaaattcacattgaagtatcgaattctcactcaagcttagtttatgaaaagactggaatatcctataagtgccaagtgaaatgtgcggttgtacctttagcattaaatttaaaaataacctttaaatttggtggggaatgtattgttacggttccgttccctgcaagaggctttaaactgattaatgagcaaaaagaagtaacgtcaaaagatttagtaattcacgacttattgaatactgaactgcaagtgtactcttatgaccgcgcggctaagttaaattttgatattgtattaaaaacaaaaaaaaatcagggacatgatgtacctttttatcgtaagaaaataaaggttaaacaaggtatttcttctattaatttatatgagctagtagaagatgtgaaaggcgttttagccttagatgatgatttggatagtttcgtcgaatgtactgtcaattatcatcatagcgaaaaaaaatggaatatacggcattatgcgcatcaactgaattggggtaaaaacgttcagggttattataacgataaaactactttagcttttaagccacaagcaatgtcgttagtgcaaccacaattggaaccactcgatttacttgaaaaaaatgaatggataggcaaagttttccaagttccagaattggatatgaatcatgcaccgtatttattaatacctgcaaaagattcgacattgtttagagccaagcttattcaagaatttaactatcctgaagatactgaactagatgtattaaccactgctacacgtaattttggtcagaataaactctcgattaagcagtttattcgtacagtaaattatgaaaataatgaggtgttctgggatcatgtgaaagcattattacagaattataatcatttaccactaaatacttttgaagttttaaagggcctagcaagtaattatgatcaattggctatcgcaatatttaaacttgatttgtctctcgatattttacgtcgtttcgaaaccgaattatcggtgatgtggtatttgattccagttgcttcatggcagaaggcaactcatcaagtgattcaatattggcagaagatacttggtgatgatggtgggtacggtcgaggaaaggcagaaaatatcttaaaaagattgaggaattttacacctttattggctgaatcatttcattcatattacctaaataatcaatactcatttggaccagaatataattttcagattttaaatgattatatttttgagggtaagtgttggggtggagttgaaaactcagaatatcagcgaatgctacaacgcaaccacagtgcaacagaagatcaagcatggccaactgcactttcgcaaaataaatggatttactttgactgtatgcagaagctcccttttagctgtcaattggcaagtcaatggaataaagatgtggtgtatttaccattttgtttggcttatatgaatgttaaacatcaatctcgattgcaattgagtgcctatgaggtactgcagcttaaacaaatcattgcatttgatgagcaatggttcaatcaaatttttagttcaattgttaaatatttaattttagaagcgaagtaa

SEQ ID NO: 28318 - DNA, 6318 bp, Acinetobacter baumannii NIPH 201
atgtataaatattttagttctttaacacaagaaagtattcaaaaaaataaagaagctacattgagtatattgggtatttcgtatccagaactacgtgatgttctaggacagcagatgtctcaagctgcgggcaaagatcaatcatttttatcttcaccggtgattgaacaaatgttcgcatgggaaaaaggtcaacccacattagatgctttgggtggtgaattacttcataagaaattaatcgatgctttagatcactcagaaaatggcgcatatcgttttaatcgtaattatcagccttatgtacatcaattacaaagctggaatgctttattaaaagacaagaaatctatagtggttacttcaggaacgggttcaggtaaaactgaatgttttatggtacctattctaaatgatttatacgaagagtttattcaagcagggcaatccttaacaggtgtgcatgccttatttttatatccactcaatgcactgattaactcgcaacaagagcgattagatacttggactcgccatttttcacaatctaatgccattcggtattgtttgtataatggcaatacaccagagcataaatcacaggaaacaggaaaacaaaaacttcatcccaaccaagtgctcacacgtgaagaactgagattaaatccatctcctattttagtgactaatggcaccatgttggaatatatgatggtgcgccaaattgatgcacctattttgcaaaaatctcaaggaaaattgcgttggattgtattagatgaagcacatagttatatgggctcacaagctgcagaacttgcgatgcagttacgtcgggttctgcatgcttttggtgtggaagcaaaagacgttcgttttgtagcgacctctgcaaccattgcaggtgcagatgcagaagaaaagcttaaacaatttttatctgaaatctcaggtcaaagcacagagaatattttggtcattggtggtcagcgcgaagtccctgtattacctgtagttgaaaatcatcagcaatcttttgatgagttagtagcaattgatgctcaacacgaaatatcttatgagcgttatcaacaattagcagggcatccaattgcatgtgttttaagagaaagtatttgctcgcaacgtgctttaaccttagatgatttattaaaaattacccgagaaaagggtttccaactttctcaacatgaaattttggaatggttagatctattaacctatacaagaccatctgatgaagaacaagcttttcttaagattcgtgttaattattatcagcgtgtgactcatggtctatggagttgtacaaatgacaagtgtgataaaaaagacgatggtttaaaaaattggagctttggtcagatatatgcgacacatcaagaaaaatgtgattgtggggctcctgtattagaattaacgttctgtcacagctgtaaggaaccacatttaatcggttcattaggcaaggaagatgtgctgaaacagtggaccgttgaaattgaagatgaatttgcattacttcttgataatgaaacggaagaacaagaagaggttgaatataaaaatactatcaagaatcgtttagtagtattttctgtcaatgagaataaagaaaaaaactaccgccgagaccaactgaatttagaaaatttaaaactcggagaaatttctaaaaataccctgaacgtacattattttgaacctcataacagcagtgatccaattttatgtagtcatcctgaatgtggtgcaaagggttcgaagtttgatttgccatttaatcgtgcaattttaggtgcgccttactatattacacaaactgttccacagcttttacaatattgtccggatattgaacaaaaagaaattaatgaggcaagcaaaaattataatgacccagaatttattgaaggtgagtttaaagatttaaaggattgtgcaccggaggatatgccagctaagggtaagcgtttaatcacctttactgatagccgtcaagggactgcgcgtttatccgtaaaaatgcaacaagaggcggaacgatcacgcttacgtggtgctgtgcttaaagcaataatacaacatacaaaagctcaagccaaaaccatagatccgatggaagtgctattacgtcagagattaaatgaagcagagcaagaaggtaatattgctagaataaagttctttcaagaagaattaaataatttaagtgctaataatacgccaatgacacttcctgaaatgaattgggaagagttatgtcgagaattagcgaaagatttcgattttagaacaggtattttgctcgccaatcgccatattgcaggtggaatttttgacgatgctggatcgcttaaacttgcacaaatgttactaacacgagagttttcacgtcgtcctaaaaatgcaaatagtttagaaacgttggggttggtgaaagttagttatcaaggcttaaaagacttaaatgatctgcctaactattggaaggagcaagggttaaccggtcaggattggcagaattttattaaagttattttggattactttattcgtgaaaatacagtgattgaacttgctgaggattggaaacaatggctaggaggcccagttctgcctaaacatgttgtcagtcctgaattgaaagagcaatttaagaaaagagaagatgggtcaaaaaataatagtgtactggcatggccactcgcctcagtatctaaaaatcatcgtttggtgaagcttttagtattaggggcaaaattagatttgaatttgattcaacatcgcaatatggctgatgattggttgaaaaaagcatggcaagttttaaaagctgaatttttagttgaagatggtaattcaaaatatcatcttagaaaggaaaaactgacttttagtttagttgatcaagtgtttttatgcccaatcacacatcgtttaatagatatcaccttcaaaggttttacaccttatttacctagaagtttgccacaagatattgataaatataaaacccaagaaatggattttccaaagctatggaactttgatgttgaagatctaactgaacttcatcaagattcagcagtgcaaaagctaagatcactaaatttatggacagacttgtcggatagcgcagtatcgggaggatttttctatcgtacagcggagcattctgcacagcagtcggcaaatttactgaagcaatatgaaacctactttaaggctggtaaagttaatgtcttaaactgctcgacgaccatggaaatgggggttgatattggagggatatcaacagtggtaatgaataatgtaccaccgcatcctgccaattatttacaacgtactggacgagcaggtcgtggtaatcaatctcgtgctatttcttatacgatttgtaaaaataatcctcatgatcagcaagtgtttaagcaaccattatgggcttataccacagcaattcaggcacctcacgttagctttaattcacaacgattgattcagcgccatatcaatgcacagttgcttgccatctttttaatcaaagaggttggagatactgatattgatagacctagcttagacctgaaatggttttacattaagcaagatggtcaatctgattcgatttgtgacacttttgaaaagtggttagtgggtaaagtaatacaagattatcaatatgtattggaatttttgaaaaaaggcacagcattaaaagatattgataatgcagcaatcatagatgcttgcttgacaaaaattcgtaagctcaaaacagaatggctggaagaatatgtcattattgaaagagagtatcaacaagagctagttacgaatcctaatagtagctatctacatcgtctaacatgtgaaagggatcgattaacacaagcatatttattgtctgagttggcgatgcgtaatttcttaccaagctatgggttcccaactgatgtgattacttttgataacaccaataagatcgagagagatcattggaaaaagctttcaaaacgccgaaaaaagagggatttggaaagtagtattgatcgcgaagataatttatcgcgaataaaaggcctaccaagccgaaatattgccattgccattcgtgaatatgcaccgggtgccgaagtgattgttgatggtcgagtctatacgtccaaaggaatatcacttgcatggcgaaatattcataatgaacacgataagaaaccacaaaaatttgattatgcatggatgtgtcatcattgtggtcagacaggtttaacttctggtgttttatcgaatgaaaatgagttgacctgtacaaatattgaatgtgaggaaactattactgatataaaaaaggtattacgtccaaatggttttagtgtcgattatcatgataaacctaacaatgatgtaactacgcaaaaatacatacctgtccaaaaaccttgggtaggtctttcaaaaagtgctgaaacttggccattgccacatgctaatttgggatattttaacttagatcctaatggacatgtattccaatatagttcagggttgaacggcacagggtatgccatatgtatgcagtgtggtcgtgccgactcaatggaagaaagttatgatggggaagtgaagtttccaagtactttaactccagatcgtccacatcagtctcttaaggctcaaaaagatggcgataaatttaagcaccatgattgtggtggctcaagtgtcgtaaaatctaatattcatttaggttgtcaaattaaaacagatgtattagagattgttttaagacatccgactcataatgaatatattttaaactctgaagaaggtcgagtaattgccacaacattggtcgtagctttacgtcaggcgatagcgagtgaattgggaattgccacagatgaactcggctacgcaattaaagtgaaaagaattgataatcaatcggttctaattttacaaatttatgatgatctaagtggtggtgctggtttttcaacaacggcagccaattttattgctgaagttttaagttcgttgatagagaaactcaattgtgtagatgaaagttgttcttcagtgtgtggcaagtgcttgcttgatagtcaaacaagacatgatagtgaatatttagatcgaactttagccttaagttggttagggagtgattttttaacttacttagagtctccaattcctggaacaaaatttatttctggtaccccattttcgatcattgaacagtatgtaaactatggagcaacacaggttacattcaacttaacgggaaacagtgaagattgggatgttttatgtactgcaaatagaaaaaaactatttaagttattgaacactaatattaagttagtgattgtagtttcaccaactttaaatttgaatgcacaaatacagcaagaaatgttggctctcgaaaaaattggcctttcatttgcagtaaatatcaatctcaattctgaatacttatacgctcagattgtaggtcaagataaaataactactttatatagtcagtcaccagaggtgagttgttttaatgaatactggttggaaagccaaagcccaagttataaatcaacctctgatccagaattgcaattacaaaaatttagttttgattttaaggctattgaatcttatgaaaatgagtttcaccagctaaaaattagtaaagattttgatagtgatctggtggatgcttttgcatacaaattctggtctaaaattctacctgtttcaaaattaaataatctcgtgaatgatgaggttgtagagatagaatattctgatcgatatcttcaatctccagccaatatcattttaataagtagcttgtttaaagaaataaagaatttattaggtaatcgtccaaaatttaccataacaactttttttaaaaacaaacaagtacaggaggagaggttatattcagatttcagacaattagatgaatttaataacttctttataaattattttgaagatcaattatctcagaaacttaatttaaatatatcacgatcaaaaatagatcattctcgttactttattttttcattaaaatcaggtaagaaagttgatatccgtttggatcaaggtgttggctattggcagatcaaatatattaattggcgtgaaattcaagagaaaggagattttcctttcttagaaagtatccagaaacaattattatggataaatgggaataataccaatatgtatgtagtgggtgaagatggttttaaaactgatatatatatcacaaaatcttga

SEQ ID NO: 28319 - DNA, 1215 bp, Acinetobacter baumannii NIPH 201
gtgaaaggcgttttagccttagatgatgatttggatagtttcgtcgaatgtactgtcaattatcattatagcgaaaaaaaatggaatatacggcattatgcgcatcaactgaattggggtaaaaacgttcagggttattataacgataaaactactttagcttttaagccacaagcaatgtcgttagtgcaaccacaattggaaccactcgatttacttgaaaaaaatgaatggataggcaaagttttccaagttccagaattggatatgaatcatgcaccgtatttattaatacctgcaaaagattcgacattgtttagagccaagcttattcaagaatttaactatcctgaagatactgaactagatgtattaaccactgctacacgtaattttggtcagaataaactctcgattaagcagtttattcgtacagtaaattatgaaaataatgaggtgttctgggatcatgtgaaagcattattacagaattataatcatttaccactaaatacttttgaagttttaaagggcctagcaagtaattatgatcaattggctatcgcaatatttaaacttgatttgtctctcgatattttacgtcgttttgaaaccgaattatcggtgatgtggtatttgattccagttgcttcatggcagaaggcaactcatcaagtgattcaatattggcagaagatacttggtgatgatggtacttatggtcgtgtaaaggcagaaaatattttaaaaaaagtaaagaatttaacacctttattggctgaatcatttcattcattctatttaagcaaccaacgtgaatttgggcctgagtttaattttcactttttaaatgactggatatttaagggtgaatttttgggaggagtagaaaacactgagtatcaacgaatgttgcaaagaaatcatagtgcgacagaagaccaagcttggcccacggcactttcgcagaataaatggggctactttgaatgtatgcagaagctcccttttagttgtcaattggcaagtaaatggaataaagatgtggtgtatttaccattttgtttagcatatatgaatgttaagtatcactctaaactccaattaagtgcctacgatttattgcaacttaaacaaattattgcatttgacgagcaatggtttaatcaaatttttagttcaactgttaaatatttaattttagaagcgaagtaa

SEQ ID NO: 28320 - DNA, 6318 bp, Acinetobacter baumannii NIPH 335
atgtataaatattttagttctttaacacaagaaagtattcaaaaaaataaagaagctacattgagtatattgggtatttcgtatccagaactacgtgatgttctaggacagcagatgtctcaagctgcgggcaaagatcaatcatttttatcttcaccggtgattgaacaaatgttcgcatgggaaaaaggtcaacccacattagatgctttgggtggtgaattacttcataagaaattaatcgatgctttagatcactcagaaaatggcgcatatcgttttaatcgtaattatcagccttatgtacatcaattacaaagctggaatgctttattaaaagacaagaaatctataatggttacttcaggaacgggttcaggtaaaactgaatgttttatggtacctattctaaatgatttatacgaagagtttattcaagcagggcaatccttaacaggtgtgcatgccttatttttatatccactcaatgcactgattaactcgcaacaagagcgattagatacttggactcgccatttttcacaatctaatgccattcggtattgtttgtataatggcaatacaccagagcataaatcacaggaaacaggaaaacaaaaacttcatcccaaccaagtgctcacacgtgaagaactgagattaaatccatctcctattttagtgactaatggcaccatgttggaatatatgatggtgcgccaaattgatgcacctattttgcaaaaatctcaaggaaaattgcgttggattgtattagatgaagcacatagttatatgggctcacaagctgcagaacttgcgatgcagttacgtcgggttctgcatgcttttggtgtggaagcaaaagacgttcgttttgtagcgacctctgcaaccattgcaggtgcagatgcagaagaaaagcttaaacaatttttatctgaaatctcaggtcaaagcacagagaatattttggtcattggtggtcagcgcgaagtccctgtattacctgtagttgaaaatcatcagcaatcttttgatgagttagtagcaattgatgctcaacacgaaatatcttatgagcgttatcaacaattagcagggcatccaattgcatgtgttttaagagaaagtatttgctcgcaacgtgctttaaccttagatgatttattaaaaattacccgagaaaagggtttccaactttctcaacatgaaattttggaatggttagatctattaacctatacaagaccatctgatgaagaacaagcttttcttaagattcgtgttaattattatcagcgtgtgactcatggtctatggagttgtacaaatgacaagtgtgataaaaaagacgatggtttaaaaaattggagctttggtcagatatatgcgacacatcaagaaaaatgtgattgtggggctcctgtattagaattaacgttctgtcacagctgtaaggaaccacatttaatcggttcattaggcaaggaagatgtgctgaaacagtggaccgttgaaattgaagatgaatttgcattacttcttgataatgaaacggaagaacaagaagaggttgaatataaaaatactatcaagaatcgtttagtagtattttctgtcaatgagaataaagaaaaaaactaccgccgagaccaactgaatttagaaaatttaaaactcggagaaatttctaaaaataccctgaacgtacattattttgaacctcataacagcagtgatccaattttatgtagtcatcctgaatgtggtgcaaagggttcgaagtttgatttgccatttaatcgtgcaattttaggtgcgccttactatattacacaaactgttccacagcttttacaatattgtccggatattgaacaaaaagaaattaatgaggcaagcaaaaattataatgacccagaatttattgaaggtgagtttaaagatttaaaggattgtgcaccggaggatatgccagctaagggtaagcgtttaatcacctttactgatagtcgtcaagggactgcgcgtttatccgtaaaaatgcaacaagaggcggaacgatcacgcttacgtggtgctgtgcttaaagcaataatacaacatacaaaagctcaagccaaaaccatagatccgatggaagtgctattacgtcagagattaaatgaagcagagcaagaaggtaatattgctagaataaagttctttcaagaagaattaaataatttaagtgctaataatacgccaatgacacttcctgaaatgaattgggaagagttatgtcgagaattagcgaaagatttcgattttagaacaggtattttgctcgccaatcgccatattgcaggtggaatttttgacgatgctggatcgcttaaacttgcacaaatgttactaacacgagagttttcacgtcgtcctaaaaatgcaaatagtttagaaacgttggggttggtgaaagttagttatcaaggcttaaaagacttaaatgatctgcctaactattggaaggagcaagggttaaccggtcaggattggcagaattttattaaagttattttggattactttattcgtgaaaatacagtgattgaacttgctgaggattggaaacaatggctaggaggcccagttctgcctaaacatgttgtcagtcctgaattgaaagagcaatttaagaaaagagaagatgggtcaaaaaataatagtgtactggcatggccactcgcctcagtatctaaaaatcatcgtttggtgaagcttttagtattaggggcaaaattagatttgaatttgattcaacatcgcaatatggctgatgattggttgaaaaaagcatggcaagttttaaaagctgaatttttagttgaagatggtaattcaaaatatcatcttagaaaggaaaaactgacttttagtttagttgatcaagtgtttttatgcccaatcacacatcgtttaatagatatcaccttcaaaggttttacaccttatttacctagaagtttgccacaagatattgataaatataaaacccaagaaatggattttccaaagctatggaactttgatgttgaagatctaactgaacttcatcaagattcagcagtgcaaaagctaagatcactaaatttatggacagacttgtcggatagcgcagtatcgggaggatttttctatcgtacagcggagcattctgcacagcagtcggcaaatttactgaagcaatatgaaacctactttaaggctggtaaagttaatgtcttaaactgctcgacgaccatggaaatgggggttgatattggagggatatcaacagtggtaatgaataatgtaccaccgcatcctgccaattatttacaacgtactggacgagcaggtcgtggtaatcaatcacgtgctatttcttatacgatttgtaaaaataatcctcatgatcagcaagtgtttaagcaaccattatgggcttataccacagcaattcaggcacctcacgttagctttaattcacaacgattgattcagcgccatatcaatgcacagttgcttgccatctttttaatcaaagaggttggagatactgatattgatagacctagcttagacctgaaatggttttacattaagcaagatggtcaatctgattcgatttgtgacacttttgaaaagtggttagtgggtaaagtaatacaagattatcaatatgtattggaatttttgaaaaaaggcacagcattaaaagatattgataatgcagcaatcatagatgcttgcttgacaaaaattcgtgagctcaaaacagaatggctggaagaatatgtcattattgaaagagagtatcaacaagagctagttacgaatcctaatagtagctatctacatcgtctaacatgtgaaagggatcgattaacacaagcatatttattgtctgagttggcgatgcgtaatttcttaccaagctatgggttcccaactgatgtgattacttttgataacaccaataagatcgagagagatcattggaaaaagctttcaaaacgccgaaaaaagagggatttggaaagtagtattgatcgcgaagataatttatcgcgaataaaaggcctaccaagccgaaatattgccattgccattcgtgaatatgcaccgggtgccgaagtgattgttgatggtcgagtctatacgtccaaaggaatatcacttgcctggcgaaatattcataatgaacacgataagaaaccacaaaaatttgattatgcatggatgtgtcatcattgtggtcagacaggtttaacttctggtgttttatcgaatgaaaatgagttgacctgtacaaatattgaatgtgaggaaactattactgatataaaaaaggtattacgtccaaatggttttagtgtcgattatcatgataaacctaacaatgatgtaactacgcaaaaatacatacctgtccaaaaaccttgggtaggtctttcaaaaagtgctgaaacttggccattgccacatgctaatttgggatattttaacttagatcctaatggacatgtattccaatatagttcagggttgaacggcacagggtatgccatatgtatgcagtgtggtcgtgccgactcaatggaagaaagttatgatggggaagtgaagtttccaagtactttaactccagatcgtccacatcagtctcttaaggcacaaaaagatggcgataaatttaagcaccatgattgtggtggctcaagtgtcgtaaaatctaatattcatttaggttgtcaaattaaaacagatgtattagagattgttttaagacatccgactcataatgaatatattttaaactctgaagaaggtcgagtaattgccacaacattggtcgtagctttacgtcaggcgatagcgagtgaattgggaattgccacagatgaactcggctacgcaattaaagtgaaaagaattgataatcaatcggttctaattttacaaatttatgatgatctaagtggtggtgctggtttttcaacaacggcagccaattttattgctgaagttttaagttcgttgatagagaaactcaattgtgtagatgaaagttgttcttcagtgtgtggcaaatgcttgcttgatagtcaaacaagacatgatagtgaatatttagatcgaactttagccttaagttggttagggagtgattttttaacttacttagagtctccaattcctggaacaaaatttatttctggtaccccattttcgatcattgaacagtatgtaaactatggagcaacacaggttacattcaacttaacgggaaacagtgaagattgggatgttttatgtactgcaaatagaaaaaaactatttaagttattgaacactaatattaagttagtgattgtagtttcaccaactttaaatttgaatgcacaaatacagcaagaaatgttggctctcgaaaaaattggcctttcatttgcagtaaatatcaatctcaattctgaatacttatacgctcagattgtaggtcaagataaaataactactttatatagtcagtcaccagaggtgagttgttttaatgaatactggttggaaagccaaagcccaagttataaatcaacctctgatccagaattgcaattacaaaaatttagttttgattttaaggctattgaatcttatgaaaatgagtttcaccagctaaaaattagtaaagattttgatagtgatctggtggatgcttttgcatacaaattctggtctaaaattctacctgtttcaaaattaaataatctcgtgaatgatgaggttgtagagatagaatattctgatcgatatcttcaatctccagccaatatcattttaataagtagcttgtttaaagaaataaagaatttattaggtaatcgtccaaaatttaccataacaactttttttaaaaacaaacaagtacaggaggagaggttatattcagatttcagacaattagatgaatttaataacttctttataaattattttgaagatcaattatctcagaaacttaatttaaatatatcacgatcaaaaatagatcattctcgttactttattttttcattaaaatcaggtaagaaagttgatatccgtttggatcaaggtgttggctattggcagatcaaatatattaattggcgtgaaattcaagagaaaggagattttcctttcttagaaagtatccagaaacaattattatggataaatgggaataataccaatatgtatgtagtgggtgaagatggttttaaaactgatatatatatcacaaaatcttga

SEQ ID NO: 28321 - DNA, 3294 bp, Acinetobacter baumannii NIPH 335
atgatgtatagtttaaattttagctctagacagtatttagcgcagatattaaaaacaagaggattaacatctgctgatgcacgtgtactttaccaatatcaattgtcttttcctgaatttaaagaaattgagaacattcttaaaacaagttttcaattccaaaatataaatcgtataggcgatgaatgggctaacttatttacgttgtacgctgccgaatggtttagacgtgaatatactgcaaaatgtacatgggatccgattttaactgccttagatattagggatttaccagtaaacactagaaacgaagttgtaattaaggggctgagattttggaaacgcccgattattaaatatagtaaagccaataactatttaggttcgatttttaaagagggtggattcccctcacgcttgttaaaagaagatggaaatcgttatattgcgattttccaaaaagtgacctctttatatttagaaaataaatctcatattgatgagttaagagctgaggtacaacaagaattaaagactttaccacaagcatttgagcatgatgaaacactatctttagtgcttgatattgtaagattaattatcgaaaaagtggaaaactgtcaattaactgcactccaagacccaattaccactttagatcagcaatctaagcattggcgtaatgaatttccgttgcctattgatgaagaccaaacgatcgtagaggattttttaagaaatttatttaagtcggcctcagaagaaatatctaagcatcatcaattacgccaagcgttaaaatgtactcatagcttatctgaagattttaaatatttatctagtacaatttacttgccagaagaactttcatttacactaaatgaagatgttgagttgcgacgcacacgcggtaatttagtcattaaagaagggtggaatcataaaagccaatttttatgtacgacttatctttctcagcaaaataataaagtcattgcagaaattaatagaggttttttaaaagacatatatcgtcaattccacaacgaagctttatatctatgtttagaggtggatggggtagtactcagtcatattgaattagaagatacggctctcgattttgaaaccttacctatagcttttgaaatacaagaaaaaccaaaatatattgcccaaggtgctttaaaaaccaaagcacctgaaatattcattagtctgccaactggtgcaaggtttaccagtgtagaatcagcagaactttttgaatctgtaggtcagtttttaacatttaaactgtataaaattagggggcagcaacagatattgacacaagatggtgatcaaataataatcaaatgtggacattctgatattgaatttgagcagttattgtttagaaaaaataatatcagccaattagagacttccccaagtttagcatttatgggtaagccagcattaaaaacttatggcacacataccttatttcgtgggaatgatcagatcgagactacccctttgcatttacttttagggcagcaaatgctgactttaaaaaatagaaaaggtgaaagtttattaaaaaagaaagtggttattttgccaaaacattttaaggtcatggtacaagcaggtgtgacactagatcaggctatacttgatattgaatcggatgcagaaattcacattgaagtatcgaattctcactcaagcttagtgtatgaaaagataggaatatcctataagtgccaagtgaaatgtgcggtagtacctttagcattaaacttaaaaataacctttaaatttggtggagagtgtattgttactgttccgttccctgcaagaggttttaaactaattaatgagcaaaaagaagtaacatcaaaagatttagtaattcacgacttattgaatactgaactgcaagtgtactcctatgaccgcgcggctaagttgaattttgatattgtattaaaaactaaaataaatcagggacatgctgtacctttttatcgtaagaaaataaaggttaaacaaggcatttcttctattaatttatatgagctagtagaagatgtgaaaggcgttttagccttagatgatgatttagatagttttgttgaatgcgcaattagttatcatcacagcgaaaaaaaatggaacattcggcattatgcacaccaacttaattggggtaaaagtattaaggcttattataacaatgaagctttattatcctttaagccacaggctatgtcactagtgcaaccacaagttgcacctctcgttttacttgaaaaaaatgaatggataggtaaggtttttcaagttccggaattggatatgagtcttgcaccttatttattaatacctacaaaaaattctacattgtttagagccaagcttattccagaatttgattatcctcaagatagtgaaatagaagcattaaccgaggcaacacgtagttttggtcagaataaacaatcgattaagcagtttatacggacgttaaattatgacaataatgaggtattttgggattatgtgaaaaccttattacatgattatgaccatttgcctctaaatacttttgaagtcttaaagggtctagcgacaaattatgatcaattggctattactgtatttaaacttgatctatctctcgatattttacgtcgttttgaaactgaattatctgtactatggtttttaatacctgtttcatcttggcagaatgcaaccttacaagttattcaatactggcagaaaatgcttggtgatgaaggtacttatggtcgtgtaaaggcagaaaatattttaaaaaaagtaaagaatttaacacctttattggctgaatcatttcattcattctatttaagcaaccaacgtgaatttgggcctgagtttaattttcactttttaaatgactggatatttaagggtgaatttttgggaggagtagaaaacactgagtatcaacgaatgttgcaaagaaatcatagtgcgacagaagaccaagcttggcccacggcactttcgcagaataaatggggctactttgaatgtatgcagaagctcccttttagttgtcaattggcaagtaaatggaataaagatgtggtgtatttaccattttgtttagcatatatgaatgttaagtatcactctaaactccaattaagtgcctacgatttattgcaacttaaacaaattattgcatttgacgagcaatggtttaatcaaatttttagttcaactgttaaatatttaattttagaagcgaagtaa

SEQ ID NO: 28322 - DNA, 6297 bp, Acinetobacter baumannii NIPH 67
atgcaacgttattattcagatttattagaacaagcatgtcagcgtacaaaagaatcaactttaagtgtgttgggtattagtgatcctgagttgagagaacaccttgctgaacaaatgtctcagcttccaggaggtaagttttcatttcttgctccccctgtttttgagcacacttttgcttggaagcaggcacaggtgacgatgtctgacttaagtggaaaattactagcaaagtcggttgtagatgctttagatgcagaaaataatggccgataccgctttgggaaagaatttaagccctttgaacatcaattaaaaagttggaaaaatttattatctgataaaaaatctgttgttgtcacatctggtactggttcgggtaaaactgaatgttttatggtgccaattcttaatgatttatatgagttaagcgaaaatataaatacgccgttggaaggcgtacatgctctatttttatatcctctcaatgcattgattaattcacaagaggagcgcttaagtgcttggactcaacacttcggtgggaagctacgatactgtttatataacggtaatacacctgaatcagaaagttcaaaaagaacattgcaaaaggagcgcccttatcaagtcttatcgcgagaattgatgagaaaaagccctgctccaatcttggtaaccaacgggacgatgttggaatatattatggtgcgtcaaattgatgcgccaatcattgaaaagtctcgagcaaagaaaagtttacgttggattgttttagatgaagcgcatagttatgtcgggtcacaggcagctgaacttgctttacagttaagacgtgttttagaagtttttggggttgaagcaaaagatgtacgatttgttgcaacctctgcaacaattgcagatagcaatgctgagcaacaactgaagacttatttatctcaattggctggtatagatgaaagccaaattgaagtgattggtggtcaacgagctgtcccacaattaaaaattgaatctcatcagaataaactgagtttaaaagaactggctgaaattgatggtgatttagaggttagtgctaaacgttttcaagctctggagtcgaatcaaactgcacgtgcaatcagagaaattattgttcaacaaggagcagaaaattataaacccttcacctccttagaaatcaaagataaattaaatgctgaatatgctatttcagtggatcaagtcgaaattataagttggattgatctacttacaaatacgaaagcccatgaaaaagaagaggcctttttaaaggtaagagcgcattttcttcaaagaatcacacatggtttgtggagctgtataaatcctaattgtgaccaaaaagaaggaacagcattaaaaaaatggccatacggtaatgtatacgcaacgtgtgaacaaaaatgtaaatgtgaatcaccagtacttgagctaactttctgtaaagaatgtaattcaccacatttattagggcaactagttgactcaaccaatggacgccaattgaagcaagttggagaagctaaaattgatgagttttctctgcttacagatgaacatgaagttgatgaggctgatcttatggataactcgaatcaattacttgattacaattcattattgctcactataaacggttatggggagatgcttagccttgatcaaaagggctttgaaaaatttcctggggaagaagactttaatctttttgctacatcaaatgaatgtcataactgtggatcagtaacacaagaaggttatttacctgtaaatagaagtattcttggagctccgttctatgttactaaagcagtgccgacagttttagaattttgtccagatattacgattaaagaattagaagaaaatggtgtaactaatatttcacctcaaagcctcccttcttttggacgtcgcttaattacatttactgatagccgacaaggcacagcgagaatgtctgtacagatgcaacaggaagcccagcgttcaagattaaggggagctgtggtggaaatgttaaagactttacctgaagcatctagtgaagagatgactagagaggaattgttggatcaaatcgaaaaaattaaaaaagatccaaagatgaagatgtttttgacgctactgcagcagcaactccatagattagataattcagccgaaagctccatctcatggaaagagatgattgagaagcttacagctttatctgattttaatttttcaatactgaatgctatgaaatattactctccagaagtattcggagatcagattgaagggtcatataaattgatctcaatgttattgttgagtgaatttagtagacgccctcgtaataggaatagtactgaaacattaggattggtaaaggttggttatattggtttagagaaagttgctagggtacctttatattgggaatctaagggcctgaatttacaagattggaaggactttttaaaagtcgttctagatttctatgtgcgtgattattattacattcatatagataaaagtatttcaaactggatgggtcgaaagattgttacaaaacgactattcggaccagaatcaaaattaatagaagataaaatcagtaagcagtggcctttagcatctaagcgcaaaaataatcgtttggtgaagttattagcgttgggtgcgcaattggatttaaatgctcctattgatatagatatcgctgatgaatggctaacaagtgtctggaaagctttaactcaagacacaggtattctagaaagcgataacggtcaatttttcgttagaccacaaaaatttaaattttctttaaatgaacaagtatttatttgcccaattactcataggttaatggatactactttcaaaggtattacgccgtatctaccgacgggtattccaaagagtaaagatgctttcatttgtcagaagacaagaatgcctgatttgaaggcttttaattctaataaagaccatcatgccaatatccaatatatccgtgatttaattgctaatgatgagacgattaaggagttgcgctctttaaacttatggaatgacctttgtgatcgtattattgaaggaggaatgtattatcgtgttgcagaacattctgcacagcaagcaagtgagcgtctacaagattacgaaaaacgatttaaatcaggtgaagtcaatgtaatgaactgttcaacaaccatggaaatgggggttgatatcggtggtatttcagcagttgtgatgaacaacgtaccacctcatcctgcaaattatcttcaacgtgctggtcgtgctggtcgtagtaaagagtctagagcactttcttatacgatctgtaaatccaatccacacgatcaacaagtatttaataatccaaagtgggcttttgagactagtattccagcaccttatgtggctttaaattccaagagattgattcaaaggcatgtgaactccatgtatctatctttctttttgaaaaatgagattggagatacagatgcagagaaaaccaaattaaacttaaagtggttttatttagaaaatggtgcggaagatatatcagtatgtaatcgatttattacttggataaaagcaaatatttatacatattcacatgccctagataaattaatcaaaggtaccgatttatcattcgactccattgaatgcatcttaggtaataccatccaaaaaattactgagatgcgtaatcattgggtaaaagaatataaacgtcttgaaacacagttgagtgaagcagaaaaaggtagtgcttatgcttatagattaactattgaaatgcgtagactatgtgatgaatatttattaagagaacttgctgctaaatgtttcctaccaggatatggcttcccaacggatatcgcatcatttgaaacaacaaatattattgactatatacgccaaaagaaagatagagatgctgaaaagcaaagaaagtctagagaagataatgtttctttattgcgtgatatgccaagtcgaaatttagctgtcgctattcgggaatatgcaccaggttctgaaattgtattagatggacgggtatttaaatctaaagggatatctttagcttggcataatattcatagttctgatacaaaagaagcacagaaatttgatttggcttggcgctgtgtacattgtggacaaaatggattcaatacggatagtgcagtagacgctaataatctttattgtgataaccctagttgcggtgaaaaaatacgtttaagtgagcaacgtagagtattgcagccaacggggtttgttcatgatttttatgaagaaccaagcaatgatgtaacaactcaaacatttatcccagttcaaacaccttggatagcaggtaaagggacaagattaagtttaccgaatagtgccttaggattcatggttgctgatacatcagggcatgtatttaattatagttcgggtttatatgggcatggttatgctgtatgccttgaatgtggtcgcgctgaatcacaaaaggaaaaggataaatttcctgtatatctttcacctgagcaaaaacattatccgttaaaaccatctaaacatgatcgagaaaatggacaaagaaagttctgcgaaggtagtgaacgcctgatcaaagatttacatctaggtagttatatgactacggatatctttgagttggtattacaccacccagagcgtaacgagtatattgcagataaaaaggaaaatgacagtattgcactgacattagctgttgcgtttagaaaagctctatctaaagagttaggtatttcaactaatgaattgggatatggtaagcgtccaattctattagattgtcatcagcaaattactgcgattcaagtctatgacgttataagtggtggagcgggatttgcaagctcagcacctcgtcatatagagtctttattatcaaacatgattgatgagctagagtgtccaaaggattgtgaatctgtttgtgcacattgtcttttagactcgcaatcaagacatcattacagtttgttaaatcgtcatgctgctaaagcatggttaggttcaaactataaaaaatttatttctacagaggagttatcctttttccaaggagcgcaatattggccatatagcctaaaagaatgtattgaacatcatgtatctttaggtgctaaaaagctaattttaaattggggaggagtagatgatagttgggagctattatcttctagtgtaagaaaaaatatagcgagatgggcagatgatacaaccttgagtatcgagattgctatcccaaaagccattatggattctgatcagcatttggctgagcttagatttctagaaaaacatttcaatatacaatttgttgaaggcgatgacattcatcaatctattgttgcacaattacatttgatagataggattatcacggttgtcagcccagatatggatagtcgtattccaaatgaagagtggttgagtacgagtgcgatagttggagtaagtgaaagttataaattgctgactgagaatgtcattacactaccaattctagaggcaacgcatcaaagttcgattgtggggttagatcttcttgatcaattgaatgttgatttatatagttttggccgtaaattctgggacttggtggttgaaagcagtagtgatttcgggaaaatttgcaagaatgagacaataacaagtattgagtattcagatcgttatatcaaaacagctagcaatatgatgttaattgtcagttggttaaaaggtcttgaagagcaagtaagttctttaggtcgcgtgaagataaaaactatcatttctaatgatgaaacaaaaggtttaccaatgtaccttcatcatgattatcacaatgctattgaattcgagaggatttttgaaaaactattgattgataatttaaatctatcaaaaaaagaggtaggtttaatgatctatgataatactaaagcgctttatcataaaagaaatttaaccgtagtttttgaatctggaactatatttgatattcaactcgatcaaggtctaggctattggagattgttcgaaagtcataagttatctcagagaaatgtccattttaatgcacaaaaggactttgccagtgttgctaaaggacttactgatttacagaaatttcttgtcgttagaaatggagaacataatccaacgaacatttatgtgaaaaggagagaggcagatttagtagtagctacttcagtatattaa

SEQ ID NO: 28323 - DNA, 3369 bp, Acinetobacter baumannii NIPH 67
atggaatttttggtttcagaaacactgaggacacaatcgagttcaagacttcttttaaagcaaatttttgaagcacgtaaaattaaagagccaacaagccatcccttatatacctatcatattacattagaagaatacgaagacttaaagcatatgcttaagtccagccagcaagatcaaaaaagccataaaccaagtctggaatggtgtgcggtttttactttatttgtctctgaatggtttcgtcgtgagtataaaagtggttggagttgggggcctgtatatgatgcgcttagctttcaacctttggatgacatccgttatgttgttcagcaaggactagagaacttttggaagcgccgcattcttaaatttgaaagttcaaatcataccaattatttaggatctgcattcaaagaggggggatttccttcaaatcttttaatggaaaaggggaacaactatcagactgtattcaaacgtattgtggcgcagtttagtcactatagacattataaccctgaaattaatgaccaattaattcaatcctatactcgatatttaccacaagcatttaaggaattcgaaacgcgagtccttatttcggatatggcagaacatcttgttcatttagtagaaacgcatcaattagacaatacagataatcctgcggcttatttatctgcaaatttccctaaatggagagaagcatttcctctaccgttagaaagtagtgtagcggaacaatttttaaatcagttactactgacttcaagtactgaattaaagcaaatgaaaactaaacaggatactttatcctgtgtgagtttttttaaccgaaactctattcaaatattaactgagattttcctgccaaacttattagaaatcgctttagaggatgttaagggcattcctcctcgagtagaaattgtattgtatgaagcatatgaacccctagctaaactcggcacagcaacgtttatgacaaggcctgagattggcaaaccagtgaatatacgtataggtgcacaaacgcgcattattaccagaaaaaattatcaacatggattgattctggcgctacaaaataaagatcaaattatttatcaaaaagaattaccccaaacttgtttagaaataggcagtgttcctgtggcatttgcacaggatgatggggagctttgtccatttattggtcaggcttcattcaagacagcagaatcagacattattttactcttaccaccatcgtatcaatttacttctcaggactgtgtaactgggcatttatcgaatgcttttggtcagcatgtctacaaggtaaaaggtgatattcaaattattggagataatcaagaacaatatcagattcaatgctctaaatatcacgataagtcggaacttgtagatctttttggtaagaagtttccttggtctactgtaccagtcttggcttttttaggaagacctaaggcttgttatatagaaactggtttgcaatcaaaaaacgatagtttagctatttatgcagaacaaaagcttttggttcatcatgtgggttctgctggatatggtgtaaagactttaaccgttaaaaatgttgctcaaaatgtggtattgcgtcgcaaggttgtgatttttcctgaagacctaaaagtagaattgttggcaggagatacacccaatgaagctgatattcgtcttctaaccaacagtaatatcatttgtttagggatcactgctgatcatcaagcagtgagctttaagtcgcgaaaactgaataatgatatacatgggcaatatggttatgaatatcatctaagttgtaatgagtatccaccggaaaatataaaacttaatttgatgctgaatttgggagatcaagtagatgtatcgctaccatttccatctcatggtgcaatgctctataacgggaatcaccagccgattaaacaaaaaatattaacttcggatgatttgctcggttcgagattatgtttatatgcgccagagaataagccgaccaattttcggatgacaatcaggttgaaaagcattcatattcgtgatgtagatgcgccatactataaatggcaatttttggtgagtggaaaaccacatcaagaatcgcttattcattatcgagctgaaatagaagaattattggcattaacaaaagatttagatgcacggattattctcgaagtcactggtggaaaacaatccttgaattatgagattaaacattatcaaaccgagtttgaaatagatgaacaaggtcattactttttaagtggtctgaatctttcaggctcacaagtggctgatccagtcattatggttctcaatcaacctgaacaagctgttttaccactccaaccaattagtacggaaggcgttgagacaggtaaatataaattaccgagattgagtaatgttggtccatgtttaattattcctagagatcaaaaatcaattaaatttagaccgaaattcatagtgcagcaggtaagagcagattctttttctcttaaatctgtggatacgctacatactgctgtacgtgattatcatccaacattcaactcaaatagtattgtggattacttagagattatggcgagtgatttgcagaactctgggtggttgtatctttactacttatattcgaaatacaaccatctacctttggtaacatttcaagtgtggaaggatttagtacgaaatccatcatgtttggcattggctatatggttgcttgatttcgaacatgatatttatcaacgctttgagcgagagtttgatttagtctgggaattaatccctacagaagcttggaaaaatgccatctttaaaacctttaaactctatgtgagtcaaggtattcctgaggctattgttaaaaaaacgctgaaagcgagatatgtaaagttatctcaagatatttcaacgctaaatcaaagtttagaagcttattattttgatgagtcagttctaaatggattaacgcaaaatcagttgaatagcatcgttaatggttattatcttcagaatttattgagataccagcctgaaggtgaaatgtggccaacgtggttccagcaagaactcacagcatggtttgaaaaagaaaaccagaatcttccattaaaacctattgtaagtttgccacagcattcatctgtaattctgttgccaatttatcttgcaatgaaaaatgtagggcttacaagcttcgtacttgaagataaatctaacagtttaactaatcataaaattcgtcagttacgtgattttgaccagtcttggtttatctcaatttttgaaataacaatctcttatctattaaattcacaggctcattaa

SEQ ID NO: 28324 - DNA, 6297 bp, Acinetobacter baumannii OIFC035
atgcaacgttattattcagatttattagaacaagcatgtcagcgtacaaaagaatcaactttaagtgtgttgggtattagtgatcctgagttgagagaacaccttgctgaacaaatgtctcagcttccaggaggtaagttttcatttcttgctccccctgtttttgagcacacttttgcttggaagcaggcacaggtgacgatgtctgacttaagtggaaaattactagcaaagtcggttgtagatgctttagatgcagaaaataatggccgataccgctttgggaaagaatttaagccctttgaacatcaattaaaaagttggaaaaatttattatctgataaaaaatctgttgttgtcacatctggtactggttcgggtaaaactgaatgttttatggtgccaattcttaatgatttatatgagttaagcgaaaatataaatacgccgttggaaggcgtacatgctctatttttatatcctctcaatgcattgattaattcacaagaggagcgcttaagtgcttggactcaacacttcggtgggaagctacgatactgtttgtataacggtaatacacctgaatcagaaagttcaaaaagaacattgcaaaaggagcgcccttatcaagtcttatcgcgagaattgatgagaaaaagccctgctccaatcttggtaaccaacgggacgatgttggaatatattatggtgcgtcaaattgatgcgccaatcattgaaaagtctcgagcaaagaaaagtttacgttggattgttttagatgaagcgcatagttatgtcgggtcacaggcagctgaacttgctttacagttaagacgtgttttagaagtttttggggttgaagcaaaagatgtacgatttgttgcaacctctgcaacaattgcagatagcaatgctgagcaacaactgaagacttatttatctcaattggctggtatagatgaaagccaaattgaagtgattggtggtcaacgagctgtcccacaattaaaaattgaatctcatcagaataaactgagtttaaaagaactggctgaaattgatggtgatttagaggttagtgctaaacgttttcaagctctggagtcgaatcaaactgcacgtgcaatcagagaaattattgttcaacaaggagcagaaaattataaacccttcacctccttagaaatcaaagataaattaaatgctgaatatgctatttcagtggatcaagtcgaaattataagttggattgatctacttacaaatacgaaagcccatgaaaaagaagaggcctttttaaaggtaagagcgcattttcttcaaagaatcacacatggtttgtggagctgtataaatcctaattgtgaccaaaaagaaggaacagcattaaaaaaatggccatacggtaatgtatacgcaacgtgtgaacaaaaatgtaaatgtgaatcaccagtacttgagctaactttctgtaaagaatgtaattcaccacatttattagggcaactagttgactcaaccaatggacgccaattgaagcaagttggagaagctaaaattgatgagttttctctgcttacagatgaacatgaagttgatgaggctgatcttaaggataactcaaatcaattacttgattacaattcattattgctcactataaacggttatggggagatgcttagccttgatcaaaagggctttgaaaaatttcctggggaagaagactttaatctttttgctacatcaaatgaatgtcataactgtggatcagtaacacaagaaggttatttacctgtaaatagaagtattcttggagctccgttctatgttactaaagcagtgccgacagttttagaattttgtccagatattacgattaaagaattagaagaaaatggtgtaactaatatttcacctcaaagcctcccttcttttggacgtcgcttaattacatttactgatagccgacaaggcacagcgagaatgtctgtacagatgcaacaggaagcccagcgttcaagattaaggggagctgtggtggaaatgttaaagactttacctgaagcatctagtgaagagatgactagagaggaattgttggatcaaatcgaaaaaattaaaaaagatccaaagatgaagatgtttttgacgctactacagcagcaactccatagattagataattcagccgaaagctccatctcatggaaagagatgattgagaagcttacagctttatctgattttaatttttcaatactgaatgctatgaaatattactctccagaagtattcggagatcagattgaagggtcatataaattgatctcaatgttattgttgagtgaatttagtagacgccctcgtaataggaatagtactgaaacattaggattggtaaaggttggttatattggtttagagaaagttgctagggtacctttatattgggaatctaagggcctgaatttacaagattggaaggactttttaaaagtcgttctagatttctatgtgcgtgattattattacattcatatagataaaagtatttcaaactggatgggtcgaaagattgttacaaaacgactattcggaccagaatcaaaattaatagaagataaaatcagtaagcagtggcctttagcatctaagcgcaaaaataatcgtttggtgaagttattagcgttgggtgcgcaattggatttaaatgctcctattgatatagatatcgctgatgaatggctaacaagtgtctggaaagctttaactcaagacacaggtattctagaaagcgataacggtcaatttttcgttagaccacaaaaatttaaattttctttaaatgaacaagtatttatttgcccaattactcataggttaatggatactactttcaaaggtattacgccgtatctaccgacgggtattccaaagagtaaagatgctttcatttgtcagaagacaagaatgcctgatttgaaggcttttaattctaataaagaccatcatgccaatatccaatatatccgtgatttaattgctaatgatgagacgattaaggagttgcgctctttaaacttatggaatgacctttgtgatcgtattattgaaggaggaatgtattatcgtgttgcagaacattctgcacagcaagcaagtgagcgtctacaagattacgaaaaacgatttaaatcaggtgaagtcaatgtaatgaactgttcaacaaccatggaaatgggggttgatatcggtggtatttcagcagttgtgatgaacaacgtaccacctcatcctgcaaattatcttcaacgtgctggtcgtgctggtcgtagtaaagagtctagagcactttcttatacgatctgtaaatccaatccacacgatcaacaagtatttaataatccaaagtgggcttttgagactagtattccagcaccttatgtggctttaaattccaagagattgattcaaaggcatgtgaactccatgtatctatctttctttttgaaaaatgagattggagatacagatgcagagaaaaccaaattaaacttaaagtggttttatttagaaaatggtgcggaagatatatcagtatgtaatcgatttattacttggataaaagcaaatatttatacatattcacatgccctagataaattaatcaaaggtaccgatttatcattcgactccattgaatgcatcttaggtaataccatccaaaaaattactgagatgcgtaatcattgggtaaaagaatataaacgtcttgaaacacagttgagtgaagcagaaaaaggtagtgcttatgcttatagattaactattgaaatgcgtagactatgtgatgaatatttattaagagaacttgctgctaaatgtttcctaccaggatatggcttcccaacggatatcgcatcatttgaaacaacaaatattattgactatatacgccaaaagaaagatagagatgctgaaaagcaaagaaagtctagagaagataatgtttctttattgcgtgatatgccaagtcgaaatttagctgtcgctattcgggaatatgcaccaggttctgaaattgtattagatggacgggtatttaaatctaaagggatatctttagcttggcataatattcatagttctgatacaaaagaagcacagaaatttgatttggcttggcgctgtgtacattgtggacaaaatggattcaatacggatagtgcagtagacgctaataatctttattgtgataaccctagttgcggtgaaaaaatacgtttaagtgagcaacgtagagtattgcagccaacggggtttgttcatgatttttatgaagaaccaagcaatgatgtaacaactcaaacatttatcccagttcaaacaccttggatagcaggtaaagggacaagattaagtttaccgaatagtgccttaggattcatggttgctgatacatcagggcatgtatttaattatagttcgggtttatatgggcatggttatgctgtatgccttgaatgtggtcgcgctgaatcacaaaaggaaaaggataaatttcctgtatatctttcacctgagcaaaaacattatccgttaaaaccatctaaacatgatcgagaaaatggacaaagaaagttctgcgaaggtagtgaacgcctgatcaaagatttacatctaggtagttatatgactacggatatctttgagttggtattacaccacccagagcgtaacgagtatattgcagataaaaaggaaaatgacagtattgcactgacattagctgttgcgtttagaaaagctctatctaaagagttaggtatttcaactaatgaattgggatatggtaagcgtccaattctattagattgtcatcagcaaattactgcgattcaagtctatgacgttataagtggtggagcgggatttgcaagctcagcacctcgtcatatagagtctttattatcaaacatgattgatgagctagagtgtccaaaggattgtgaatctgtttgtgcacattgtcttttagactcgcaatcaagacatcattacagcttgttaaatcgtcatgctgctaaagcatggttaggttcaaactataaaaaatttatttctacagaggagttatcctttttccaaggagcgcaatattggccatatagcctaaaagaatgtattgaacatcatgtatctttaggtgctaaaaagctaattttaaattggggaggagtagatgatagttgggagctattatcttctagcgtaagaaaaaatatagcgagatgggcagatgatacaaccttgagtatcgagattgctatcccaaaagccattatggattctgatcagcatttggctgagcttagatttctagaaaaacatttcaatatacaatttgttgaaggcgatgacattcatcaatctattgttgcacaattacatttgatagataggattatcacggttgtcagcccagatatgaatagtcgtattccaaatgaagagtggttgagtacgagtgcgatagttggagtaagtgaaagttataaattgctgactgagaatgtcattacactaccaattctagaggcaacgcatcaaagttcgattgtggggttagatcttcttgatcaattgaatgttgatttatatagttttggccgtaaattctgggacttggtggttgaaagcagtagtgatttcgggaaaatttgcaagaatgagacaataacaagtattgagtattcagatcgttatatcaaaacagctagcaatatgatgttaattgtcagttggttaaaaggtcttgaagagcaagtaagttctttaggtcgcgtgaagataaaaactatcatttctaatgatgaaacaaaaggtttaccaatgtaccttcatcatgattatcacaatgctattgaattcgagaggatttttgaaaaactattgattgataatttaaatctatcaaaaaaagaggtaggtttaatgatctatgataatactaaagcgctttatcataaaagaaatttaaccgtagtttttgaatctggaactatatttgatattcaactcgatcaaggtctaggctattggagattgttcgaaagtcataagttatctcagagaaatgtccattttaatgcacaaaaggacttcgccagtgttgctaaaggacttactgatttacagaaatttcttgtcgttagaaatggagaacataatccaacgaacatttatgtgaaaaggagagaggcagatttagtagtagctacttcagtatattaa

SEQ ID NO: 28325 - DNA, 3369 bp, Acinetobacter baumannii OIFC035
atggaatttttggtttcagaaacactgaggacacaatcgagttcaagacttcttttaaagcaaatttttgaagcacgtaaaattaaagagccaacaagccatcccttatatacctatcatattacattagaagaatacgaagacttaaagcatatgcttaagtccagccagcaagatcaaaaaagccataaaccaagtctagaatggtgtgcggtttttactttatttgtctctgaatggtttcgtcgtgagtataaaagtggttggagttgggggcctgtatatgatgcgcttagctttcaacctttggatgacatccgttatgttgttcagcaaggactagagaacttttggaagcgccgcattcttaaatttgaaagttcaaatcataccaattatttaggatctgcattcaaagaggggggatttccttcaaatcttttaatggaaaaggggaacaactatcagactgtattcaaacgtattgtggcgcagtttagtcactatagacattataaccctgaagttaatgaccaattaattcaatcctatactcgatatttaccacaagcatttaaggaattcgaaacgcgagtccttatttcggatatggcagaacatcttgttcatttagtagaaacgcatcaattagacaatacagataatcctgcggcttatttatctgcaaatttccctaaatggagagaagcatttcctctaccgttagaaagtagtgtagcggaacaatttttaaatcagttactactgacttcaagtactgaattaaagcaaatgaaaactaaacaggatactttatcctgtgtgagtttttttaaccgaaactctattcaaatattaactgagattttcctgccaaacttattagaaatcgctttagaggatgttaagggcattcctcctcgagtagaaattgtgttgtatgaagcatatgaacccctagctaaactcggcacagcaacgtttatgacaaggcctgagattggcaaaccagtgaatatacgtataggtgcacaaacgcgcattattaccagaaaaaattatcaacatggattgattctggcgctacaaaataaagatcaaattatttatcaaaaagaattaccccaaacttgtttagaaataggcagtgttcctgtggcatttgcacaggatgatggggagctttgtccatttattggtcaggcttcattcaagacagcagaatcagacattattttactcttaccaccatcgtatcaatttacttctcaggactgtgtaactgggcatttatcgaatgcttttggtcagcatgtctacaaggtaaaaggtgatattcaaattattggagataatcaagaacaatatcagattcaatgctctaaatatcacgataagtcggaacttgtagatctttttggtaagaagtttccttggtctactgtaccagtcttggcttttttaggaagacctaaggcttgttatatagaaactggtttgcaatcaaaaaacgatagtttagctatttatgcagaacaaaagcttttggttcatcatgtgggttctgctggatatggtgtaaagactttaaccgttaaaaatgttgctcaaaatgtggtattgcgtcgcaaggttgtgatttttcctgaagacctaaaagtagaattgttggcaggagatacacccaatgaagctgatattcgtcttctaaccaacagtaatatcatttgtttagggatcactgctgatcatcaagcagtgagctttaagtcgcgaaaactgaataatgatatacatgggcaatatggttatgaatatcatctaagttgtaatgagtatccaccggaaaatataaaacttaatttgatgctgaatttgggagatcaagtagatgtatcgctaccatttccatctcatggtgcaatgctctataacgggaatcaccagccgattaaacaaaaaatattaacttcggatgatttgctcggttcgagattatgtttatatgcgccagagaataagccgaccaattttcggatgacaatcaggttgaaaagcattcatattcgtgatgtagatgcgccatactataaatggcaatttttggtgagtggaaaaccacatcaagaatcgcttattcattatcgagctgaaatagaagaattattggcattaacaaaagatttagatgcacggattattctcgaagtcactggtggaaaacaatccttgaattatgagattaaacattatcaaaccgagtttgaaatagatgaacaaggtcattactttttaagtggtctgaatctttcaggctcacaagtggctgatccagtcattatggttctcaatcaacctgaacaagctgttttaccactccaaccaattagtacggaaggcgttgagacaggtaaatataaattaccgagattgagtaatgttggtccatgtttaattattcctagagatcaaaaatcaattaaatttagaccgaaattcatagtgcagcaggtaagagcagattctttttctcttaaatctgtggatacgctacatactgctgtacgtgattatcatccaacattcaactcaaatagtattgtggattacttagagattatggcgagtgatttgcagaactctgggtggttgtatctttactacttatattcgaaatacaaccatctacctttggtaacatttcaagtgtggaaggatttagtacgaaatccatcatgtttggcattggctatatggttgcttgatttcgaacatgatatttatcaacgctttgagcgagagtttgatttagtctgggaattaatccctacagaagcttggaaaaatgccatctttaaaacctttaaactctatgtgagtcaaggtattcctgaggctattgttaaaaaaacgctgaaagcgagatatgtaaagttatctcaagatatttcaacgctaaatcaaagtttagaagcttattattttgatgagtcagttctaaatggattaacgcaaaatcagttgaatagcatcgttaatggttattatcttcagaatttattgagataccagcctgaaggtgaaatgtggccaacgtggttccagcaagaactcacagcatggtttgaaaaagaaaaccagaatcttccattaaaacctattgtaagtttgccacagcattcatctgtaattctgttgccaatttatcttgcaatgaaaaatgtagggcttacaagcttcgtacttgaagataaatctaacagtttaactaatcataaaattcgtcagttacgtgattttgaccagtcttggtttatctcaatttttgaaataacaatctcttatctattaaattcacaggctcattaa

SEQ ID NO: 28326 - DNA, 6318 bp, Acinetobacter baumannii OIFC098; identical to SEQ ID NO: 28302

SEQ ID NO: 28327 - DNA, 3291 bp, Acinetobacter baumannii OIFC098; identical to SEQ ID NO: 28303

SEQ ID NO: 28328 - DNA, 6300 bp, Acinetobacter guillouiae NIPH 991
atgcaacgttattattcagatttattagaacaagtatgtcagcgtacaaaagaatcaactttaagcgtgttgggtatcagtgattctgagttgagagaacatcttgctgaacaaatgtctcagcttccaggagataaattttcatttttagctccgcctgtttttgagcacacttttgcttggaagcaggcacaagtgacgatgtctgacttaagtggaaaattattagccaagtcagttgtcgaagctttagatgctgaaaataatggtcgttatcgttttgggaaagaatttaatccttttgaacaccaattaaaaagctggaaaaatttattagttgataaaaagtctattgtcgtcacatctggtactggttcgggtaaaacagaatgttttatggtgccaattcttaatgatttatatgagttaagcgaggatataaatacgccgttggaaggcgtacatgcactattcttatatcctctcaatgcactgattaattcgcaagaggagcgcttaagtgcttggactcaacactttggtaggaagttacgatattgtttgtataacggtaatacacctgaatcagagagttcaaaaagaacattgcaaaaggagcgtccttatcaaatcttatcacgagaattgatgagaaaaagccctgctccaatcttagtgaccaacgggacgatgctggaatatattatggttcgtcaaattgatgcaccgattattgaaaaatctcgagcaagtaaaagtttgcgttggattgttttagatgaagctcatagttatgtcggatcacaggcggcggaacttgctttgcagttacgacgtgttttagaggtttttggtgttgaagcgaaagatgtacgatttgtggcaacctctgcaaccatagcggacagcaacgcagagcaacaattaaagatctatttatctcaattagctggtatcgaggaaagccaaatcgaagtgataggtggccgacgcgctgtcccacaattaaaacatgaaactcatcagaataaactgagtttaaaagaattagctgaaattgagggtgatctagaagtcagtgctaaacgttttcaagctttagaatcgaatcaaactgcacgtgcaattagggaaattattgttcaacaaggtgcagaaagttataagcctttaacatctttagaaatcaaagacaaattaaatgctgaatatgctatttcagtcgatcaagtcgaaattatcagttggattgacctactgacaaatacaaaagcccaagaaaaagaacaggcttttttgaaggtaagagcacatttcctccaaaggatcacacatggtttgtggagctgtatcaatcccaattgtgaccaaaaggtaggaacagcattaaaaaaatggccgtacggtaatgtatatgcaacgtgtgaacaaaaatgcaaatgtgaatttgaatcaccaatactagaacttactttttgcaaagaatgcaattcgccacatttattggggcaattggtagattccatccatgggcgccaattgaaacaagttggagaggctaaaattgatgagttttctctactaacagatgacgatgagcttgatgagggtgatcttaagggtaactcgaataaattactggattacagttcattattgctcactgttaacggttgtggggagatgctgagccttgatcagaagggcattgaaaaatttccaggggaagaagactttaatctctttgccacatcaaatgaatgtcataactgtggatcagtaacacaagagggctatttacctgtaaatagaagcattcttggcgccccgttctatgttactaaagcagtgccgacagttttagagttttgtacagatattacgattaaagaattagaagagaataatatcactaatatttcaccacaaagtcttccgtcctttggccgtcgattaataacatttacggatagtcgccaaggcacagcgagaatgtctgtacagatgcaacaggaagcacagcgttcaagactaaggggagctgtggtagaaatgttaaaaactttgcccgagacatcgagtggaggaatgaatcgagaggaagttgaggatcaaattgaaaaaataaaacatgatccaaagatgaagatggttttaacgttgcttcaacaggaactattgagattagatagttcagaagacagtttcatttcatggaaagagatgatcgaaaagcttacagctttatctgattttaacttttcaatactgaatgcaatgaaatattactctccagaagtatttggagatcagactgaaggaccacacaaattgatatcaatgttattattgagcgaatttagtagacgtcctcgtaatagaaatagtacggaaactttggggttggtgaaggttggttatagcggtttagagaaagttaatagcgtaccttcatactgggaagcaaaggctctcaatttacaagattggaaggactttttaaaagttgttttagacttttatgtacgtgaatattattacattcatatagaaaaaagtatttcgaattggatgggaagaaaaattgttacaaaacgactgttcggaccagagtcaaaattaatagaagataaagtcagtaaacagtggcctctggcatctaagcgaaagaataatcgcttggtgaagttgttagctttgggtgcacaactggatttaaatagtcctgttgatatagatatcgcagatgaatggctaaaatttgcttggaaagttttaacccaagatacaggtattctagaaagcgataacggtcaatttttcattagacctcaaaagttcaatttttctttgaatgagcaagtatttatttgcccagttacacataggttaattgatactacatttaaaggtattacgccgtatctaccgacaggtatgccaaaaagtaaagatgccttcatttgtcagaagacaaaaatgcctaatttgaagacttttagttctaataaagatcatcataccaatattcaatacatccgcgacttaattactaatgatgaggcaattaaggagttacgctctttaaatttatggaatgacctttgtgatcgtattgttgaaggggggatgtattatcgagttgcagagcattcagcacagcaagcaagtgagcgtctacaagattatgaaaagcgatttaaatcaggcgaagttaacgtaatgaattgttcaacaaccatggaaatgggggttgatattggtggtatttcagcagttgtgatgaataacgtaccaccgcatcccgcgaactatctgcaacgtgctggtcgtgctggtcgtagtaaagagtctagagcactttcttacacaatttgtaagtcaaatccacatgatcaacaagtattttataatcctaaatgggcttttgaaaccagtattccagcaccttatgtagctttgaattccaagagattgatccagaggcatgtaaattcaatgtatctatctttctttttaaagaatgaaattggcgatactgatgcagagaaaactaaattaaatttgaaatggttttatttagaaaatggtgccgaagagatttccatttgcaatcgatttattaattggataaaagcaaatatttatacatatttgaatgctctaaataaattaattaaaggcaccgatttatcttttgattctgttgaaagcattttagctaacacagtccaaaaaataacggagatgcgtgaacattggatgaaagaatatgaacgtcttgaaacacagttgagtgaagcagagaaaggtagtgcttacgcttatagattaagtattgaaatgcgtagattatgtgatgaatatttattaagagaacttgcagcgaaatgtttcctacctggatatggattcccaacagatattgcatcatttgaaacgactaatgtcattgactacatacgtcaaaagaaagatagagatgctgaaaagcagcgcaagtccagagaagataatgtgtcattattacgagatatgccaagtcgcaatttagctgtcgctattcgcgaatatgcaccaggttcagaaattgtattggatggaagggtgtttaaatcgaaagggatatccttagcttggcataatattcatagttccgatgccaaagaagcacagaaattcgatttggcctggcgatgtgtacactgtggtcaaaatggattcaatacagacagtgcagtcgatattaataatgtttactgtgataacccaagttgcggtgagaaaatacgcttaaatgagcaacgtaaagtgttacagccaacaggatttgttcatgatttttatgaagaaccaagtaatgatgtgacaacacaaacatttattcctgttcagacgccttggatagctggtaaaggtgaaagattaagtttgccgaatactgccttaggattcatggttgcggatacatcgggacatgtatttaactatagttcaggtttatatgggcatggttatgctgtctgccttgaatgtggacgtgctgaatcccaaaaggaaaaagacaaatttcctttgtatctgtcacctgagcagaaacattatccattaaaaccatctaaacatgatcgagaaaatgggcaaacaaagttctgcgaaggtagcgaacgtttaatcaaagatttacatttaggtagttatatgactacagatatctttgagttggtattacatcatcctgaacgtaatgaatatctggcagatctaaaagaaaatgaaagtgtagcatttactttagcggtggcattaagaaaagcattatctaaaaagctaggtatatcaaccagtgagttgggatatggcaaacgtccaatattattagatgggcatcatcaaattacagctattcaagtttatgacgttattagtggtggagcgggatttgcgagttcagcacctcgtcacattcaatcattattatccagtttgattgatgaactggaatgtccaaatcattgtgagtctgtatgtgctcattgtcttttggattcacagtcacgacatcattacagtttattgaatcgtcacgatgctaaagagtggttaggtgcaaactataaaaatttcatttctactgaggagctatcatttttctctggagcacaatattggccatttagtttaaaagaatgtattgaacatcatgtgtcattaggtgctaagaagctaattttgaattggggtggaacatttgataattgggaaatattatccgctagtgtcagaaaaaatattgctagatgggcagaagatacaaccttaaaaatcgagatttctataccacaaactatcattgattctgatacacatttggctgagttgaggtttttagaaaaacatttcaatgtgcaatttattgaaagtgatgatattcatcaatctattgtggcacaacttcaattgacagataggattgttacggtggttagcccagatatgaatagtcgtattccaaatgaagaatggttgagtacgagtgcaatagtcggagtaagtgaaagttataaattgctgactgagaatgtctttacactaccaattctagaggcaacgcaccaaagctcaattgtcgggttagatcttcttgatcaattgaatgttaatttatatagttttggctgtaaattctgggaattagtagttgaaagctgtagtgatttcgcgaagatttgcaagaatgagacaataacaagtattgagtattcagatcgttatatcaaatcagctagcaatatgatgttaatagtcagttggttaaaaggtcttgaagagcaagtaagttctttaggtcgtgttaagatcaaaactgttatttgtgatgatgaaacaaaagatttaccaatctaccttcatcatgactaccacaatgctaatcaatttgagagggtttttgaaaaactattgactgataatttagatctatccaaaaaagagatagacttaatgatctatgataatagtaaagctctttatcataagcgaaatttaacgataacttttgaatctggagctatatttgacattcagctcgaccaaggtctaggttactggagattatatgagagtcataagttatctcagagaaatgtctattttaatgctcaaaaagatttcacaagtgtagctaatggacttactgatttacagaaatttattattgttagaaatggtgaacagaatccaacgaacatttatgtgaaaaggagagtggctgatttagtcgtagctgtttctacataa

SEQ ID NO: 28329 - DNA, 3363 bp, Acinetobacter guillouiae NIPH 991
atggaattgttagcttcagatatattaggagaacaattgagtgctaggtatattataaggcgaatttttgaatcgcgtaaacttactgagccaacaagtcatcccctatatacttatcatattaccttagaagaatatcaggatctaaagagtacgctgagatctagtcaacaagatcaaaaaagccataaacctggtcgtgaatggtgtgcagtttttactttatttgtttcagagtggtttcgtcgtgagtataaaagcggttggagttgggtgcccgtatatgatgcacttggttttcaacctttgaatgatattcgctatgtggttcagcaaggcttagaaagtttttggaaacgtccgatccttaaatttgaaggttcaaatcatactaactatttaggctctgcatttaaagaggggggattcccttcaaatcttttaatggagcaaggtaatcattatcaggctgtatttaaacgtattgtagctcagtttagtcactatagacattataaccacgaaataaatgaccaattaattcaagcttatactcgttatctgccacaagcattcaaggaacacgaaacgcgagtacttatttctgatatggcagaacatcttgttcatttagtagttacacatcaattagacaatacagataatcctgcagcttatttatctgtaaatttccccaagtggagggaagcatttcctctaccattagaaagtagtgtagcagaacaatttttaaatcagttgctacttacctctagtactgaattgaagcaaatgaaaaccaaacaagatgctttatcctgtgtgagtttttttaaccgtaattctaatcaaatattaactgaaattttcctaccaaattcattagaaattactttggaggatgttaaggggattcctcctcgagtagaaattgtgttgtatgaagcacatgaacccctagctaaactcggcacagcaacgtttatggcaaggcctgaggctgataagctagtgaatatacgtataggtgcacaaacgcgcattattaccagaaaaaattatcaacatggattgattctggcgctacaaaataaagatcaaattatttatcaaaaagtattaccccaaacttgtttagaaataggcagtgttcctgtggcatttgcacagaatgaaggggagctttgtccatttattggacaggcttcattcaagacagcagaatcagaaattattttactcttaccgccatcgtatcaatttacttctcaggactgtgtaactgggcatttatcgaatgcttttggtcagcatgtctacaaggtaaaaagtgatattggagttattggagataatcaagaacaatatcagattcaatgttctaaatattacgataagtcggaacttgtagatctttttggtaagaagtttccttggtctaccgtaccagtcttggcttttttaggaagacctaatgcttgttatatagaaactggtttgcaatcaaaaaacgatagtttagctatttatgcagaacaaaagcttttggctcatcatgtgggttctgctggatatggtgtcaagactttaaccgttaaaaatgctgctcaaaatgtggtgttgcgacgtaaggttgtgatttttcctgaagacctaaaaattgaattattggtaggagatacccctaatgaagctgatattcgtcttctaaccaaaagtaatatcatttgtttaggaatcactgctggtcatcaagcagtgagcgttaagtcacgaaaactgaatgatgatataaatgggcaatatggttatgaatatcatttaaaatgcaatgagtatccacctgaaaatataaaacttaatttgatgctgaatttgggtgatcaagttgatttattattaccatttccatcacatggtgcaacactttacgacggaaatcaccagccgattaaacaaaaaatattaacggtggatgatttgctcggctcaagattatgtctatatgcaccagagaataagccgaccaattttcggatgacaattaggttgaaaagcagtcatattcgtgatgtagatgcgccttactacaaatggcagtttttggtgagtggaaaaccacatcaagaatcactcattcattatcgaactgaaatagaagaattattggcattaacaaaagacttggatgcacggattattcttgaagtcactggtagtaaacaaggtctaaattatgagattaaacactatcaaaccgagtttgaaatagatgaacaaggtcattattttttaagtggtctgcatctttcaggctcacaagtggttgatccagtcatcatggttctaaatcaacctgaacaagccgttttaccactcgaaccaattacaactgaaggcgttgagacaggtaagtataaattacctcgattgagtaatgttggtccatgtttaattattcctagagatcaaaaatcaattaaatttagaccaaaattcatattacagcaggtaagtgcagattctttgtctcttgaatctgcggatacgctacatactgctgtacgtgattatcatccaacatttaactcaaatagtattgcggattacttagcgcttatggtgagtgatttgcagaactctgggtggttgtatctttaccacttatattcgaagtacaaccatctaccattggtaacatttcaagtgtggaaggatttagtacgaaatccatcatgtttgacattggctatatggttgctggattttgaacacgatatttataaaagatttgagcgtgagtttgatctggtttgggagcttttaccaattgaggcttgggaaaaggcaatctctgaaaccttcaaactttacgttaatcaaggtatccctgagtctacagctaaaacaatgttgaaagcgagatatataaagttatctcaagaaatttcaaccttaagtattagttttcaagattattactttgaggaacgtatccaaaatattgttccaaagccagctttagattatttagttaatgaaattcatcttcaaaatttattgagatatcagtcagaaggtgaaatgtggccaacatggttccaacatgagctcaagatatggtttgaaaataacaagcttcaagtaaggcctaaagtcagcttgccacaacaagcttctgtaattttgctgccaatttatcttgcaatgaaaaatttaggtcttactagcttcgtgcttgaagacaaatcaaatagtttaactaatcataaaattcgtcagttacgagactttgaccagtcttggtttaactcaattttcgaaataacaatatcttatttattaaattcacaggctcattaa

SEQ ID NO: 28330 - DNA, 6318 bp, Acinetobacter sp. CIP 102136
atgtataaatattttagttctttaacacaagaaagtattcaaaaaaataaagaagctacactgagtatattgggtatctcgcatcctgaactacgtaatgttctagaacagcagatgtctcaagctgtgggtgaagatcaatcatttttatcttcacctgtaattgaacagatgtttgcatggaagaaaggtcagcctactttagaagatttgggtggtgaattacttcatgcaaatgtgattgatgctttagatcataaagaaaacggcgcatatcggtttaatcgtaactatcaaccttatgtacatcaattacagagctggaattctttgttagaagataaaaaatcgattgttgtgacttcaggaacgggttcaggtaagacggaatgttttatggtgcccattctaaatgacttgtatgaagaatttattcaagcagggcaatccttaactggtgtgcatgcattgtttttatatccactcaatgcactgattaactcacaacaagaacgtttagatgcttggacgcggcatttcctaccatcgaatgctattcgttactgtttatataatggtaatacaccagagcataaatcacagaaaactggagaacaaaatcttcatccgaatcaagtattcacacgtgaagaactaagatcaaatccagctcctattttggtgacaaatggcaccatgttggaatatatgatggtgcgccaaatcgatgcgcctattttgcaaaaatctcaaggaaaattgcgttggatcgtattggatgaagctcatagttatataggctcacaagcagctgaacttgcgatgcaactacgtcgtgttctacatgcatttggtgtagaagcaaaagacgttcgttttgtcgcaacatctgcaacgattgcaggtgcagatgcggaagaaaaactgaaacaatttttatcagagatttcaggtcaaagtattgagaatattttggtgattggtggtcaacgtgaagtacctccattagcttcggtagagagtaatcttctgtcttttgatgaattagtgtctattgatgaaggacaagaaatttcttttgagcgttatcataaactgtctggacacccaatcgcactgactttacgtgaatgtatttgctcagaacgtgctttgacactaaaagatttattcaaaaaaacactagaaaaagattttcagctatctcaacaagagattttaaaatggttagatctattaacctttacaaaaccttctagtacggaacaagcttttctcaagattcgagttaactattatcaacgtgtaactcatggattgtggagttgtataaatgataaatgtgatcaaaaaactgaagatctaaaaaactggagctttggccaggtctatgcgacacatcaagaaaactgtgcgtgtggagcacctgtattggaattaacgttctgtaagagttgtaaggaaccacatttattaggtttattgggtagggaagatgttcttaaacaatggactgttgaagttgaagatgaatttgcattacttattgataatgaaacggaagagcaagaagaacgtgaatttaaaaatgctataaagaatcgtttagtggtattttctgcaaatgaaaataaagagaaaaactatcgtcgacaacaactgaatctagataatttaaaacttgggcaaatttctaaaaatgcgttaaatgtgcattattttgagcctcataacagcggtgatccagttgaatgtaacaatcctgaatgtggttcgaagggaacaaaatatgacttaccattcagacgtgcgatcttaggtgcaccttactatattacacaaactgttccacatcttttacaatattgtccagatattgatcaggatgagattgatgaagcaagcaaaaattttaatgatccagaattttttgcaggtgaattcaaagatctaaaagactgcacaccatgggacatgccagctaagggcaagcgcttaattacctttacggatagtcgtcaaggcactgcgcgtttatctgtcaaaatgcaacaagaagcagaacggtcgcgcttacgtggtgctgtacttaaagctttaatacaacatacaaaagcacaaactataactatggatccgacggaggtatttttacgtcagaaggtagaagaagcagaaaaatcaggaaatgactttttaattaatctatttcaaaaagaattagatggttttatgaataataaagccccagtagtgctacccgaaataagttgggaagagctatatcgagtcttagcaaaagattttgatttccaaaatggtattttactcgcaaatcgtcatatcgcaggtgatatttttgatgatgccggaccacttaaactggcacagatgttactaacacgcgagttttcacgtcgacctaaaaatgccaatagcttagaaactttgggattggtaaaagttagttatcaggggttaaacaacttaaatgatctgccgaactattggaaagaatctggcttaggtaatcaagattggcaagattttattaaagttgttctagattactatattcgtgagaatacagtgattgatcttgcagatgattggcaacaatggttaggcggacgtgtacgtcctaagcacgttgtgagttttgaactagcagatcaatttaaacacagagatgatggttcgaaaaataatagtattttggcatggccactggcatcagtgtctaaaaatcaccgcatagtcaaacttttagtgttaggtgcaaaattagatttaagcttgcaagcacatcgaaatatggctgatgattggctaaaaaaagcatggcaagtattaaaagctgaatttctagttgaagctgggaattcaaaatatcatcttaaaaaggaaaaattaacttttagtttggtggataaagtctttttatgcccaattacgcatcgcttgatggatactacattcaaagggttcacgccttatttaccaatcagtttgccgcacaatattgataaatataaaacagaagaaatggcttttccaaagctgtggcagtttgatcctgaaaatttgatagagatacatggtgattcaaacgttggtaagctcagatcattaaatttatggacagacctatcagatagcgcagtattgggaggtttcttctatcgtacagcagaacattctgcacagcagtcagcaaatttactcaagcaatatgaaacttactttaaggcaggtaaggttaatgtcttaaattgttcgacaaccatggaaatgggtgttgatattggagggatatcaacagtggttatgaacaatgttcctccacatcctgccaattatttacaacgtacagggcgagcaggacgtggtagtcaatcacgtgctatttcttatactatttgtaaaaataatccacacgatcagcaagtgtttaagcaaccattatgggcttataacacagcaattcaggcacctcatgtgagctttaattcacaacggttgattcagagacatatcaatgcacagttacttgccatatttttaatcaaagaaataggggagactgatattgatcgacctaaactagatttgaaatggttttatcttaaacaagatggtcaatctgattcaatttgcgacacctttgaaaaatggttagtgggcaaagcagtaaaggattatcaacaagtattagaatttttgaaaaaaggcacagcattaaaagatattgataatgcagaaatcatagatgcttgtgtgacaaaaatccgagaactcaagatagaatggttggaagaatatgtcatcattgaaagagagtatcaacaagaactagctaggaatcctaatagcagttatctctatcgattaacatgcgaaaaataccgtttaacccaagcatatttattatctgagctagcgatgcgtaactttttgccaagttatggtttcccaacagatgtgattacctttgataatacgaataagctagagaaagatcgttgggataagctttcaaagaacagaaaaacaaaggatttggaaagtcgccttgatcgcgaggataatttatcacgagtaaaaggtttaccaagccgcaatattgctattgctatacgtgaatatgcaccaggtgcagaagttattgttgatggtcgtgtctatacatcgagagggatatcacttgcatggcaaaatattcataatgaacatgacaagaaaccacagaaatttgattatgcttggatgtgtcatcactgtggtcagacagggctaacatcgggtgttttgtcgaatgaagagcagttgatatgtacaaatattgaatgtggcgaaattattaaagatgttaaaaaggtattacgtccgaatgggtttagtgtcgatttttatgataaacctaataatgatgttactacgcaaaaatatattcctgttcagataccttgggtaggtctttcagaaacggctttaagttggtcattgccacatgctaatttgggatatttaaatgtagatccaaatgggcatgtatttcaatatagttcaggtttgaacggtacagggtttgccatttgtatgcagtgtggtcgagccgattcaatggaagaaagttatgatggtgaagcgaagttcccaagtaccttaactccagatcgtccacataaggcacttaaagctcaaaaagatggtgataaatttaagcgacctgattgcggtggttcaagcgtcgttaaatctaatattcatttaggctgtcaaattaaaacagatgtattagaaatagttttaaaacatccgactcgtaatgaatacattttaaaatctgaagaaggtacaatcattgcgaccacattggttgtggctttacgtcaggcaatagcgactaaattgggtattgctgctcatgaattgggttatggaataaaagttaagaaaattgatgataaagcagttttagttttacaaatttttgatgatctaagtggcggtgctggtttttctactacagcggtcaattatattactgaggttttaagattactcatagaaaaactgcagtgtgtagatgatagttgtaattcagtttgtggcaaatgcttgctcgatactcaaacaagacatgacattgaaaacttagatcgtacattggcattggcatggttaggagatgattttttaacttacttagattctccaattgctaatacagattttatcgccggtactccattttcgatcattgagcaatatgtaaatcatggtgcaacacaaatcacattcaacctcaccggtaatagtgaagattgggatgttttgtgtactgcaatcagaaaaaaactatttaaatttttgaatagtaatatgaagctagtgggggtggtctcattagatatgagtttgacaccacaaatacagcaagaaatgttggcgttggaaaaaatcggtatttcattcacggtaaatagcaatattacccctgaatatttgtatgctcagattgtaagtcaggagaaagtaatcaccttatacaatcagtcggcagaagtaagttgttttaatgagttctggttggagggtcaaagcccaagctataaatcaattacttccccagagttgcaattacaaaaatttagttttgattttaaagctattgaatcttatgaaaatgagtttcaacaaatcaaagttggtaaagattttgatggtgaatcagtaaatgattttgctgaaaaattttgggctaaagttttaccaatatctaagctacacgatttggtgaatgatgaggttatagaaatagaatattcagatcgatatttgcaatctccagcaaatattattctgataaccagtttgttaaaaggaataaagaaattattaggtattcgccctcgattaacgataacaacttgttttagaaacaaacaaatacaagatgaaaaattatattcagattttagcaagcgtgaagtatttgatagtttctttataaattattttgaagatcagttatctcagaagctgaatttgcagatacccgactcaaaaattgatcatgcgagatttttactttttagattgaaatctgggaagaaaattgagcttcgattagatcaaggagttggattctggcagataaaatacattgagtggccaaaagtgaaagaagacagggattttccatttaatgaaagtttccaaaaacaattgttgtgggtaaaacgacaagagacgaatctatgtgtaagaagtgaagagaatttcaagactgatttatatataactaaatcttaa

SEQ ID NO: 28331 - DNA, 3294 bp, Acinetobacter sp. CIP 102136
atgagcaatttaaattttagtccaagaaaatatttagagcagatattaacaacacgaggattaacatctgctgatgggcgggtactttatcaatatcaattatcagttggtgaatttaaagaaattgaaaacattcttaaaaaaagtttcccatttcaaaatttaaaccgtataggcgatgaatgggcaaggttgttcacactgtatgctgccgagtggtttagacgtgaatatactgcaaaatggacatgggatccgattttaactgcattaaatatcgtcgatttacccgtaaataccagaaatgaagttgtaattaaagggctgagattctggaagcgcccgattataaaatatagtaaagccaataactacctgggttcgatttttaaagagggtgggttcccggcacgcctgttaaaagaggatggcaatcgctatatttcgatttttcaaaaagtgacctcattatatttaaacaataaatatgatattgatgaattaagagctgaaattcagcaagaattaaaaacgctgccccaagcatttgagcatgatgagacattatctttagtaattgatattgtaaaattaatcatcgaaaaagtggaaaagtatggattaaatgtacagcaagatccaattaccattttagatcaagaatcaaggagttggcgtaaagaatttccattgccaattgatgaagatcaaaccattgtagatgatttcttaaggcatttatttaaatctaccactgaagaaatttctaaacatcaccaattacgccaggctttcaaatgtacacatagcttgtctgaggattttagagagctatttagtacggtttatttgcctgaagaactttcttttacattgaaagagaacactgagttacttcgaacacggggtcatttggtgattaaagaaggcttgaataataaaagccactttttatgcattgcttatctttctttgcaagggagccaacaagtcattgcagaaattaaccgagggttttcaaaagacattcgccgacaatcctgcaatgaaaccttatatttgtgtctagaggtagatggggtagtacttagctataaggaattagaagacagttccctagattttgaaactttacctgtagcttttgaaatacaggataaaccaaagtatattgcacaaggtgcgctaaaaaccaaggcatctgaagtcttgcttagtttgccggctggcgcaaagtttatccatacagaatcagaagactcaccacagtatataggacaatttttagcatttgatctgtataaaattagtggccaacaacggattctgacacaagatggtgatcaaattttcattaaatgcggtcactctcaagttgaatttgaacagttattatttagaacaaataatatcagcgcattacaaacttcacccagtttagcattcacaggaaaaccagtattaaaaacatttggtacacatactttattttgcggcaaagagccgattgaaagtatccctttgcatcggttacttggagaacagatgctaactttaaaaaatagacagggtgaaagtctattaaaaaagagagtaattgttttaccaaaacattttgaagtgaatgtaagagcaggtgctgtacttaatcaagctatacttgatattgaatcagatgcagaaattcaaattgaagtcttgaatcttcattcaagcttagtctatgaaaagactggaatatcgtataaatgccaagtggaatgtgcagttgtacctttagcattaaacttaaaaataacctttaaatttggtggagagtgtattgttactgttccgttccccgcaagaggctttaaactgattaatgagcagaaagaagtaacatcaaaagatttagtaattcacgacttattgaataccgaactgcaagtgtactcctatgaccgcgcggctaagttgaattttgatattgttttaaaaacaaaaaaaaatcaggggtatgatgtccctttttatcgtaagaaaataaaggttaaacaaggcatttcttctattaatttatatgagctagtcgaagatgtgaaaggcgttttggccttagatgatgatttagatagttttgttgaatgcaccgttagctatcatcacagcgaaaaaaaatggaacatccgccattatgcgcatcagcttaattggggtaaaaatattaaggcttattataatgacaaagcttctttatcttttaagccacaagctatgtcattagtgcaaccgcaagttacatctttagatttaattgagaaaaaagaatgggttgagcaagcttttcaacttcctgaattggatatgagtcttgcaccgtatttattaatacccgtaaaagattctacattgtttagagccaagcttattccagaatttaactatcctgaagatactgaaatagatgaattgaccgaagcaacacgtaattttggtcagaataaactatcgattaagcagtttatacgtacagtaaattatgaaaataatgaggtgttttgggaacatgtgaaagctttattacataattatgagcatttgcctttaaatacttttgaagtgttaaaggggctagctgcaaattatgatcaattggctatttcagtatttaaacttgatttgtctcttgatcttttacgacgttttgaaactgaattatcagtattgtggtatttaatcccagtttcatcatggcagaatgcaatcaaccaattgattcagtattggcagaaaattctgatggatgatggaacatatggtcgagcaaaggcagaaaatatcttaaaaagattgaagaattttactcctttattggctgaatcatttcatacattctatttgagcaatcaacgttcatttgggcctgagtttaattttcactttttaaatgactggatatttgaaggtaactttataggtggtttagaaaactctgagtatcaacgtatgttgcaacgaaatcatagtgcaacagaagatcaagcgtggccaacggcactttcgcagaataaatgggcttactttgactgtatgcagaagctcccttttagttgtcaattggcaagtcagtggaataaagatgtggtctatttaccattttgtttagcatatatgaacgttaagcatcattctaaactgcaattgagtgcctacgatatattgcaacttaagcaaatcattgcatttgatgagcaatggtttaatcaaatttttagttcaattgttaaatatttaattttagaagcgaagtaa

SEQ ID NO: 28332 - DNA, 6300 bp, Acinetobacter sp. CIP 102637
atgcaaccttattattccgatttattagaacaagcatgtcagcgtacaaaagaatcaacgttaagcgtattagggatcaacgatcctgagttaagagaacaccttgctgaacaaatgtctcagcttccgggaagcaaattttcatttttagctccacctgtttttgagcatacttttgcttggaaacaagcacctgtgacgatgacagaattaagtggaaaattattagcgaagtcagttgtaagtgctttggattcgcagagtaatggtcgctatcgctttggggcagaatttaagccttttgaacatcaactaaaaagttggaaaaacttattagcggataaaaaatcaattgttgtcacatctggtacaggttcaggtaaaacagaatgttttatggtaccaattctgaatgatttatttgaattaagcgaaaatatcaatgcgccgttggaaggtgtgcatgctctattcttatatccgcttaatgcgttgattaattctcaggaggagcgcttaagtgcttggactcagcacttcggtgggaagttacgatactgtttgtataacgggaatacacctgaatcagagagttcaaaaagaacattgcaaaaggagcgtccttatcaagtcttaacacgagaattgatgaggaaaagccctgctccaatcttggtgaccaacgggacgatgttggaatatattatggtgcgtcaaattgatgcaccgattattgaaaaatctagagcaaagaaaagcctgcgttggattgttttagatgaagctcatagctatgttggatcacaggcagcagagcttgccttgcagttacgacgtgttttagaggcctttggtgttgaggccaaagatgtaagatttgtcgcaacttctgcaaccattgctgacagtaatgcagaacaacaattaaagacctatttatctcagttggctggtattgaggaaagtcaaatcgaagtgataggtggccagcgtgcagtcccacaattaaaacttgaaacgaatcacaataaactcagtttaaaagaattatctgaaattgagagtgatttagaagttagtgctaaacgttttgaagcattagaatcgaatcaaacagcacgagcaattcgggaaatcattgttcaacaaggtagagaaagttataagccattaacatctttggaaattaaagaaaaattaaatgccgactatgctatttcagtggatcaagtcgaaattattgcttggattgacttactaacaaatacaaaagcacaagaaaaagaagaggctttcctaaaagtacgagctcacttcttacaaagaattacgcatggcttgtggagttgtattaatcctcattgtaatcaaaaagagggtacagcattaaaaaaatggccatacggtaatgtatatgcgacgtgtgaacaaaagtgtaaatgtgaatcaccagtcttggagctgacattttgtaaagaatgtaattcaccacatttattagggcaactcgttgacgctaatgatggtattcgtcagcttaaacaagttggggaagtcaaaattgatgagttttcgctgctaactgaagaagatgaaattgaagaagccgacattaataatagctcgaacaagttaatagattacaatcaatcaatattgctaagtgtaaatgataacggggagatgctgaatctagatcgtggaggctttgaaaaatatccaggggaagaggaattcaatctttttgcgacatcaaataaatgccactactgtgagctagagacgcaagaaggttatttgcctgtaaatagaagcattcttggtgcacctttttatgttactaaagcaatcccgactattttagaattttgtcctgatattacgattaaagagttagaagaaaatggtgttacgaacatttcacctcaaagcttaccttcatttggacgtcgtttaattacatttacggatagtcgccaaggcaccgcaagaatgtccgtacagatgcaacaggaggcacagcgttcacgattaaggggtgctgtggtggaaatgttaaaaaaaatacctgatctatcgggtggggagatgtctcgagaggaaattgaggagcaaattgaacaaataaaacatgatccaaagatgaagatgtttctgacattgcttcaacaggaactattgaaattagacacctcagacgaaagttcgatttcatggaaagagatgatcgagaagcttacagctttatccgattttaacttttcaatactgaacgcaatgaagtattactctccggaagtttttggagatcaaactgaagggtcacatagattgatctcaatgttattgttgagtgaatttagcagacgtccacgtaatcgaaatagtactgaaacgttgggattagtaaaagttggttatagtggtttagaaaaagttaccagtgttcctttatattgggaatctaaaggccttaacttacaagactggaaggactttttaaaagtcgttctagatttctatgtgcgagagtattactacattcatatagatagaagtatttcaaattggatggggaggaaaattgttacaaaacgactatttggacctgattcaaaattaacagaagataaaattagtaaacaatggcctttagcttctaagcgaaagaataatcgtttagtgaaactattagcattaggtgggcaattagatttaaatgctccaattgatatagatatcgccgatgaatggctaaaatgcgcttggaaagttttgactcaagatatagctattttagaaagtgataatggtcaattttttattagaccacaaaagttcaaattttcattgaatgaacacgtatttatttgtcccgtcactcatagattaattgatactaccttcaaaggtattacgccatatctaccgacgggtattccaaagagtaaagaggctttcatttgtcaaaagacaaaaatgccgaatttgaaggtgtttagttccaataaagatcatcatgacaacattcaatacatccgtgaattaattgctaatgatgagacaattaaggagctacgctctttaaatttgtggaatgatctttgtgatcgaattattgaaggtggcatgtattatcgagttgcagaacattcggcacagcaagcaagtgagcgattacaagactacgaaaagcgatttaaatcaggcgaagtgaatgtaatgaactgttcaactactatggaaatgggggttgatattggcggtatttcagcagtggtgatgaataacgtaccaccacatcctgcaaactatctgcaacgtgcgggtcgtgcgggtcgtagtaaagaatctagagcactttcttacacaatctgtaagtcaaatccacatgatcaacaagtatttcataaccctaaatgggcttttgagaccagtattccggcaccttatgtcgctttaaactctaagagattgatccaaaggcatgtcaattccatgtatctctctttctttttaaaaaatgagattggaaatacagatgctgagaaaactaaattaaatttgaagtggttttatttagcaaatggtgacgaagatatttctgtttgcaatcgatttattaattggttaaaagccaatatttatacatattcttatgcgctagaaaaattaatcaaaggtaccgatttatcttttgattccgttgaaagtattttagggaacactatccaaaaaatcactgaaatgcgtgatcaatggttaagagaatacctgcgactagaaacacagatgagtgaggcagtgaaaggtagtgcttacgcttatagattaagtattgaaatgcgtagactcagtgatgaatatttattaagagaacttgctgctaaatgctttctaccagggtatggcttcccaactgatattgcatcatttgaaacgaccaatgtcattgactacatacgtcaaaagcaagatagagatgctgaaaagcaacgaaagtctagagaagataatgtgtctttattacgtgatatgccaagtcgaaatttagctgtcgctattcgagaatatgcgccgggttcagaaattgtattggatggaagggtttttaaatccaaagggatatcattagcttggcataatattcatagttctgatgcaaaagaagcacagaaatttgatttggcatggcgctgtgtacattgcggtcaaaatggatttaatacagatagtgcagtcgatattaataatgtttactgtgataatccaagttgcggtgaaaaaattcgcataaatgagcaacgtaaagttctgcagccaactggtttcgttcatgatttttatgaagaacctagtaacgatgtaacaacacaaactttcatacctgtccaaaccccttggatcgctggaaagggggcaagattaagcttgccgaatagtgccttaggatttatggttgccgatacatcggggcatgtatttaattatagttcaggtttatatgggcatggttatgctgtgtgccttgaatgtggtcgagcagaatcccaaaaggaaaaggaaaaatttccattgtcgctttcaccagagcagaaacattatccattaaaaccatctaaacatgatcgagaaaatgggcaaagaaagttctgtgaaggcagtgagcgtttaatcaaagatttacatctaggtagctatatgactacagatatctttgaattggtgttacatcaccctgaacgtaatgaatatcttacagatagtaaagaaaatgaaagtatagcatttactttggctgtggctttcagaaaagcattagcgaaaaagttaggtatctcagctaatgaattgggatatggcaagcgcccaatattattagatggtaatcatcagattacagctattcaggtgtatgacgtcattagtggtggagcaggatttgcgagttcagcccctcgtcacattgagtcgttattatctagtatggtcgatgagcttgaatgtccgaaacattgtgagtctgtatgtgctcattgtcttttagattcacagtcacgacatcattacagtttgttaaatcgtcatgatgctaaaaagtggttaggtgcaaactataaaaactttatttctactgaagaattatcattcttctctggagcacaatattggccatatagcttgaaagaatgcatcgaatatcatgtttcattaggggctaagaaactaatgttgaattggggtggagtttctgatagttgggagttgttatctgctagtgttaaaaaaacaattgctagatgggcagaggattcaaatttagaaatcgatatttctgtaccccaaactatcataggttctaaagcatatttggctgagctgaaatttttacaaacacacttcaatgtacaatttgttgaaggtgacaatattcatcaatctattgtggcacaactacatttgacagatcgtattgttacagttgttagtccagatatgaatagtcgtataccaaatgaagagtggttgaatacaaatgcgatagttggagttagtgaaacttataagttgatgaatgagaaagtcataacactaccaactttagtagaaaaagatcaaagctcgattgtgggattagatcttcttgatcaattgaatgttgatttatgtagttttggtcgtaaattctggaatttggttgctgaaagtactagtgggttcggagaaatttgccggaatgaaactataaaaagtatcgagtattcagatcgttatatcaagtcagctagcaatatgttgttaattgttagttggttaaaggggcttgaggatcaagttggaaatattggtcagttgaagattaagacagttatttctgatgatgagacaaaagatttaccaacgatccttcatcatgattaccatagtgtgaaacaatttgagaaggtttttgaaaaactattaactgataatttagatatatcccaaaaagaaatagatttaatgacctatgataatggtaaggctctgtatcacaagcgaaatttaactataacttttgagtcggggactatatttgatattcagctcgatcaggggcttggctattggagattatttgagagtcataaattgtcacaacgaaatgtctattttaatgcccaaaaggacttcataagtgttgcgaatggacttacagatttacagaagtttttagttgttaaaaatggtgagcagaatccaacgaacatttatgtcaaaaagagagagggtgatttagttgtagctgtttcaatataa

SEQ ID NO: 28333 - DNA, 3369 bp, Acinetobacter sp. CIP 102637
atggagttgttagcatctgatatattaggggagcaattgagtgctagacatattcttaagcgaatttttgagtcgcgtaaacttactgagccaacaagtcatcccctgtatagctatcatattaccctagaagaatatcaagacctaaagcgtacgctgagatatagccaacaagatcaaaaaagccataaacctggtcgtgaatggtgtgcagtttttacactatttgtttcggaatggtttcgtcgagaatataagagtggttggagttgggggcctgtatatgatgaactgggctttcaacctttggatgatattcgctatgtggttcagcaaggcttagagggtttttggaagcgtccgatccttaaatttgaaggttcaaatcataccaactatcttggttctgcatttaaagaagggggattcccttcaaatcttttaatggaaaaaggcaatcattatcagactgtatttaaacgtattgtggcgcagtttagtcactatagacattataaccctgaaataaatgaccaactgattcaagcttatactcgttatctgccacaggcattcaaggagcatgaaacgcgagtgcttatttcagacatggcagaacatcttgttcatttggttgaaacgcatcaattagacaatacagataatccagcagcttatttatctaacaatttcccgaagtggagggaagcatttcctctaccattagaaagtagtgtagcggagcagtttttaaatcagttactggttacttctagtactgaattgaagcaaatgaagacaaaacaggatgctttatcctgtgcgagtttttttaaccgcaattctaatcaaatcttaactgaagttttcctaccaaattccttagaaattactttggaggacgttaaagggattcctcctcgagtagaaattgtattgtatgaagcacatgaacccttagcaaaacttggcacagccacgtttatggcaaggcctgaggctaagaagccagtgaatatacgtataggtgcacaaacgcgtattatcactaggaagaattatcaacatggattgattctggcactacaaaataaagatcaaattctttatcaaaaagaattacctcaaacttgtttagaaatcggtagtgttcctgttgcatttgcacaggatgaaggagagctttgtccatttattgggcaggcttcattcaagacagcagaatcggaaattattttactcttaccgccatcatatcaatttacttctcaggactgtgtcactgggcatttgtcgaatgcttttggccagcatgtttacaaggtaaaaggtgatattgaaattattggagataatcaagagcaatatcagattcaatgctctaaatatcacgaaaaatcagaacttgtagatctttttggtacgaagtttacttggcctacggtaccttcgttggcttttttaggaagacctaaggcacgttatatagaaacgggtttgcagtcaaaaaatgatagtttagctatttatgcagaacaaaagcttttaactcatcatgtaggttctagtggatatggtgtaaagactttaactattaaaaataccgcacaaaatgtggtattgcggcgtaaagttgtaatttttcctgaagacctaaaaattgaattgttggcaggagatacccctaatgaagcagatattcgtcttctaaccaaaagtaatatcatttgtttaggaatcactgctgatcatcaagcagtgagctttaaggcgcgtaaactgaatgatgatatacatgggcaatatggttatgaatatcatctaaaatgcaatgagcatccacctgaaaatatcaaacttaatttgatgctgaatttgggagatcaagtagatttattactaccatttccgtcacatggtgcaacgctctataacgggaatcaccagccgattaaacaaaaaatattaactgtagatgatttgctcggttcaagattatgtctatatgcaccagaaaataagccaaccaattttcggatgacaatcaggctaaaaagtagtcatatccgtgatattgatgccccttacttcaactggaagtttttggtgagtggaaaaccacatcaagaatcacttattcattatcgagctgaaatagaagaattattggcattaacaaaagatttagatgcacggattattctcgaagtcactggtgggaaacaagctttaaattatcagattaaacattatcaaaccgagtttgaaatagatgaacaaggtcattattttttaagtggtctgaatctttcaggttcacaagtggttgatccagtcatcatggttttaaaccaacctgaacaggccgttttaccactcgaaccagttacaactgaaggtgttgaaacaggtaagtataaattaccaagattgagcaatgtgggtccatgtttaattattcctagagatgaaagaacaattaaatttagaccgaaattcatagcgcaacagataaaagaagattcattgtcttttgaaactgcggataccttacatactgccgtacgtgattatcatccaacatttaacccaaatagtatcgcagattacttagaacttatggcgagtgatttgcaaaactctggatggttgtatctttaccacttatattcaaaatataaccatctaccgttggtcacatttcaagtgtggaaggatttagtacgaaatccatcatgtttggcattggcgatatggttactggatttcgaacatgatatttatcaacgctttgagcgagagtttgatttagtatgggaattaattcctagtgaagcttggaaaaatgcaatatctaaaacttttgaactctatgtgagtcaaggtatccctgaggccattgttaaaaaaacgctgaaagcgagatatgcaaatttatctcaagacatttcaacgttaaatccaggtttagaagcttattattttgatgagccagttttaaatggactaacctctaatcagttgaataacattgttaacggtcattatcttcagaatttattgagatatcagcctgaaggtgaattgtggccaacgtggttccagcaagaactcaccgcatggatcgaaaaagataacctaaatcttccattaaaacctatggtcagtttgccacagcatgcatcagttattcttttgccaatttatcttgcgctaaaaaatgtaggtctaaccagttttgtgcttgaagataaatcaaatagtttaactcatcataagattcgtcagatccgtgattttgaccagtcttggtttaactcaatttttgaaataacaacatcttatttattaaatttaaaggcttactaa

SEQ ID NO: 28334 - DNA, 6144 bp, Alistipes putredinis DSM 17216
atgaatatgaattatttttcattctacaataaggccaaggaattattaatagattctcttgcctctctttggttcaagggtcaagcccaagaacaagaatatatcaagaggattttgactaaggatgagcctctttttgcagaacctgtattccaatcaatattcccttgggaggagagtgccgacagttttgaggaacattcttctaaactcagattgttaactccttcatttgttaatgcactgagtagcgaaggaattgacaaggatttgagatttccattagacaggcatccttataagcatcaaacagaaagctggagaactatgctttcttctcgaccacaaaccattgttgtgactaccggaacaggatcaggtaaaacagaatgttttatgataccagttttgcaagatttggctaaaaccaatgaaaaaaattgtgttcaggccatattcctttatcctttgaatgcactgatgaaaagccaacagaaacgtattcatgcttggtgcaaagctcttcccgaaaaggttacctatgcgatatataatggagaaaccgacaaagaaaatcggtctgacagatatactacatctcattatccacagctcgtaacaaggcctcaaataaggaaaactccgcctcagattctctttactaatccaactatgctcaactatatgttggtacgagcagaagaccgtgaaatcttggaaaaatccaaaggtaagctcaaatggattcttttagatgaagcacatacttatactggctcttcagccgctgaattatcattgcaaatccgtcgtgtactagatgcttttggcgtaactattgatcaagtaaattttgctgtaacatcagcgactatcggtgatgaaagtgaccccaaaacgacgataaagctaaaaacttttgtgtctcaactcactggaaaaccatttgaagatataaaaataattagtggtaagcgcattattccagaactaaacaagggaattgcagaagatcaattgtccaaaataaacaaaaagtttagtatcgaattgagttattctgacattgagaagttgagaaaaaagcttaactcttcgccggtattgaaagcaaaggaaatcggtcgtatgcttgataaaggaatcgggaaaaatgtggatgcctcattggaaataatagatgctctcggagaaaaagtgaaaggtctaaacaaaggaggcggccttggagctttattgccaacacgtgctcatttatttgttagatcgataagtggagtgtatgtttgcaccaatcctgattgtcaacgtcataagggatatagattatcgataggaagtctgacaacatatcaaaatatgaattgtccagtttgtaaatcaaagatgctggaacttgctacatgttcgtcttgcggctctcccattatagtgggtgaaacaaacacaactaagggatttaggatgcacaccaatgtaattgatcttgacaagagtcttttctatgagcaaaaggaagatctcattgatttggaagatatgggaaatatagaagatgttgagcaaaatgaggcggatggcttttctcgcttctttttcgccattccgaagaaagcatgtttaaggaaaaatgcgaatagaacatatcacatcttcaatcatcagaatggtaaaatagaacttgtccctgaagacaatagaagcaacaagtgttttacttctttaaaaagtgaagaaagtattcctgtaatatatcaatctcttcgacactcaggagataatcatgttctttgtcctcattgtggcaataatctcagcgagtttaaaaaccttgattatctcagaataagtgctactcaaattggacgtactttagcaacattgcttcttgataatgccgaacccattgacagtaatgacgcagacgttgtatatgaaggccgaaagtatataacatttaccgatagccgtcaagggtctgcacgttctgcaatgggacttaatcaggatgtagaacgttcatggattcgagcttccatttttcataaacttgccgatatgcgtttgaatgatgtgaaacctggtggtctgactcctgatgaggaagcagaatacaatgcatatctgagtattcgggaacatcttccgaccttactttttgaaaaatttaaacaacttgaaaaaaaaaagaatggcataccagtaatccccaatccagaggaggtatcatgggggcaaataagccagtctcttgaaaatgactcaaatttcaagaagttgtatgaacatgttgataaagcacgtggcagaaaaaatttcgagaatgcaacggactatctgaaagcacttcttgtcgaccaattcggatggattcctaaacgggcgaactcattggaaacgatgggattcgtacgtcttgtctatccagcacttaaaaatgcgaaatgcccagcactccttcagaaaagatgtacagacaccgactggcagaattttctcaagatctgtatggattatgtcattcgtggaggtcgtcattatatgctttctggagcttataaagattaccttacacaaaataagtactgttctcctatatatccttcaaattcagaactgaggaagaatgggagccctgtatcgaaatggtttaaagtcaatgtaagttcaaaaggtattaatgagaatcagaatagactcgttcttcttctgtgtgcagttctagattatgatgatatttctcaaatcaatcaaataaagattgctgacatcaactcaatacttgatgccgcatgggatttcctgaaacaaaatgttcttgaagcaacagatgtagaaaatcaaggatatatgctcgatctcatgggggataaagttaagctgcaacttatcgaaaaaggttatctctgtcctgttgacaatgttattatagatgcgccgttctgtggctatagcccaagaatgaacggttacatcagtcgtgaaaatttcgatagattcaaaatcaagacggagtttgtaaatccgcttttcccattcaagtctgcggatcagacagaaaagaatgtcatggaatggattgagaagaacttctctgaacaaaaggctgctggtgtgttcggggttatgaactccagagtatttgcttcaaaaccgatttttatatcggctgaacattcagctcagcaatcgtcagaagatcttgaccgatacgaaagagagtttaatgaggggaaaatcaatattctttcttgctcaacaacaatggagatgggggtcgatattggtggtattacagaagtcgtcatgaataatgtgccgccaaaatcgtcaaattaccttcagcgtacgggacgtgcaggacgaagaagtgaaactaaagccttggctttaactgtttgtgctcccaatcctattggaactcatacatggaacaatccagattatccgattacacatgtaacagaaactccattgttaaaattggaaagccgtcagttgattcaacgtcatgttaatgcgatggtattcgcatcctttgtagcagatcaagggggaatcagggttacggcaactcttagggatttttttgtcacggcagaagggatgtctttctttgataagtttctaaattatattgatagtgtaatcagcggaaaggttgaacgtcttcaagaaccatatttaaaattaatcaagggaacaagtctcgctcagataacattggcggatgtcgcacaagtagtcaaaaaagacatagttgctgtttacaatgtctttgatgctcataaaggagctcttgcaaaggcgattgaatctctgaagaatgaatcaggaacgaccaatgctattaaagctatagagaaacaagaggaaaatttttttaagacctcgatgttgtcatatcttgctgaaaattcttttctgccaagtgcaggtttacccttaggactagttgagtgtctgctaggcggtaaggaaaaggttgacggtaactcaccgacattgcatataagtcaggccatctcctcttatgctcccggtaatccagtagtgaaaaacgaatgggtctatgagaccaatggtattcgtctgaagacaaaatacgatgacagcacttcaaggtatatcatacagaattgcactcattgtggttatacaactattatctatggaagtgctaagacggattgtcccaagtgcggtcggcatggaactatgcatggcataaaggacatctcactatcgacagatcagcgttttacagaggtcgttgaacctgctgcgttctccgtagcatgggattcgaccccgactcgaaaaatggactctctcggcagtatgaatttcattcagcctattttgcttgaaatggatgcctggcttctgaagacaaattctgcaaaaatgtctatccgctgttcaacgccaaggtctgagattctcttttataataaaggaacgaatgggtatggatatgctttctgtccttattgcggtagaatgaaatcagaaaaatcaccagacaccacagagcggatgctgtcgcaccataaacatcttctagcttcgacctcttgtcccggtggcgaaaatgacggtgctgcagtaagacgtcatgtgttgttggtcggaagataccagactgactttgttgagatcaagttttatgacaaagacaacaatctggtagaagacactgagacactctattctctcggcgtgattcttagccgtaaactcacggagctgctcggtgtcaacgatggagaaattgaattcggctatgatggcataaatcattctattttcatatatgatactgctctcggtggtgcaggttattcattgctcttccgagaatataaagatgaagtcctaaaaatggctttggagactcttgaaagatgcgactgtgaacggtcttgcacgaagtgccttatagatcgcagatcgcaatggtatacgaactatcttaaccggcctaaggctctagaatggttaagacaggaagtcaaggcccgtgttgccccaaaggaaattatttatttaatgcctgattctcatgttgtgacatcagacatcacgaccgagttttatcagctcacacggaacaaggacatctctggtatcagaatatttgtcaacgacaacatttctcaatgggatgcggaaacattcccatttaaaaaaattctcacagaactatctctagaaggagttgacgttgcctttatactgccaagcgtaccagatgtaaaatcgctctcgtcagcagacagtgcaactttaattgcggaggtatttaaaaccaactttaaatgtcttgaaaacacactgccgacaggattatttccgttgatggtcgtgattatgaatgacggaatcgtcaaaacatactttggaaaaaatattgatacatcctattctaagaattggggaagtggagatgtattcataaccacacagccaaattcattgtcctatgccgacataaatagaatgcaactgttgagcgccttttcatcggacgattcttcctttatgttcgaatatagaataagagaacacagctcgttgggtcgtttttttgattctctgaaagctccggaaactggtaattggaatagaataatatctaacctacgaggcaaggctgtttctattgaatattctgatagatacctaaaaacgcccttaggctgtatgcttttggcaaaaatgatttccagtctgaagaatgaagcagatttagttctggtatcaattaaagttattgtcacaaatatcgtctcaattaatgacccagatatggcagtaaatgctataaaagattttaccaacggtaagaagagaaatcatttcctgaaggatgctatatttgaactgaccgggatagaaccggaaattcaagatacaggttatgttgagcatgaacggtgtctgacggttaaagcggataatgcagaaatctgtatacgtccagacgcaggtatagcaaaaggatgggcaccatttggaagagataacgctgaatgtaccgaccgcgatttcagagaagattggaatatagatctcgaactgttcaacaaacagcagataggaaacggaatactttacaccatctcatataagcaactctaa

SEQ ID NO: 28335 - DNA, 3198 bp, Alistipes putredinis DSM 17216
atggttaatatatgcaatagtgaacagcatgttgttttgatgaggattttggatgctcgtaacagaccgtccataaccccagatatgcccctttggaaacttaaattaaccgaggaagaatatacaaacttaaaggagactcttgcccaaaatgcgtatcgattagaagattttggaattgaggcggccttgtgttacgctgaatggtggagaagagactataatggaggaattccttccagagaagatgttgcagtcggattaggactgcctcattattgttgggagcaactatataaagctgcacgtcatgggcttaaaagtcatggatttgcatttattcactctctcaaggggaatgaatattttagaactttattaaatcaaggaggtcttcctgtaaattacataaagaacggaactaatcttagcgggttttcacgttttctcattggattggttgaagaattgtcttcaataaatattgattgggatgataataatatagatttaatcaagaattttaattgtatagcttatcttgggaaagcattcaaaaatgacaatatttacgatgtttcattacagatcgctcatgcaatcatatccgaagaagaccgctggctaccatatgatgatacggattcctctttgtcggaactgactaaatcattaaaaagagaataccggcgagttaagagtgaacatagaactaaaccactttctctaagttggaaactacgtttgacctcaagtgaaactgcaaatctttttgtcaatttaaatatagtaaaagagatttcatcaaaatctattgaaggtctaaactatcaatcgtgctacaccttcgatgtgtttgtctctggtatacttgttggaaagtatgtaagaaaatccctagttaaagatgacgtaggagaggttatcggtgcgatatattctcgtataactgttggcgtagcaaatgatataaagtggagtggagaacctgtagttgaagttaagatcaggtgtgacaacgatgacagattgtttccaactttatgtggtagttatcctccgaattttgaatgccctcaggttttccaaatgcttgatgataatgtatattctttgaaatcgacagtgaatgctgaaaataatatagcagttttctccactaattggaagtgtgatggtagtcataaactattactaaatggagaactttattcggcgattaagtttactgataaagtagatttacacaattgcatgtcgaatgaggatataaccataaccaatgaattcacgccttatagtgctgaattcagaggtacatatatacaatgggtagagcaatctaattttaagttattgactcgcattccagtaataagcgtttttgaccaaactggcaccagagtcgggaatatcaagcctaaatatcgtattcataatagtaaagctgagtggcggaacttgtccaattcatgccttttgccatttgggcttgttgatatcaaggttgaatttcctgacaataaatacgtgatggaaacattttatttcatagacgatatgacatttgcctctcgcaacgaaacgatgttttccacagaactacacctagattctcgccatgttatctctgcaaaagttgatgagtgcgaaaacttatctgttgaaatgacggataaaaatacctggaggatttccagagatgcctgtgcttctaaatattctcctacgtgtaatttaaaaataattgccgagaataatcctcctttgaaagtatctgttgtagtaccgtttgagggtatagtaatatctgatttggaagggaaaattgtgccatcaggaaaaatcatatcttatgataacctgagatattttaatataatcagtcatggacagtctggtatgatagatgtgacttacaaatctgataaaatagaggatgacgatacaatcaagcatcttaagagtccagtaattgaaggtatagttccattatccgattatcgtgatttgtttgcaagaatgtttcaattatatggtgcaaatacttttgaccgtagtagttccatagaactaaaaatatgtgacaaacgcatctatataagaaaatttgttcttgatagtgagttgagttcagataaaattcgaatcacagattataccagtgaagacacttccgatttcatatatgacggtgatgtatatgcactgccggtttcagaaaatataaaaccagctgaattagtacaaataaagcttgagccgtataaccgacaaatgaacttgtttacaattcctcatgagcttttgaattcggaagcaatccttttctctggtcccgaaagttcgcgcaggcttgttcctaagtattacaattttgaacaagaagattacagttcggaagtacgtggagagatgtctgctgctaacataatactttggagtgaaaggcttagcaaggatgatgtttttgtcggcgagtattgggcaaaaactgtaaaagcattccgtattatttcagagtttaatcttccgtttactacatataatgctttcaaatctataggtcgtgaccctaaattattggtaaacctaatattagcctgttggcttaatggcgcttccgatgttctcattcaagaaattgaccgttttgaagatgaattaaacattgcagtacattggattccgcacactgtatggggagaatgtattgagagtttcatacgtttgcttcccccaacacttattaatataatgaatacaaaattaggtgagattacagaattgataaatgcacttttcaacgctacactatctgcagaagttgcgtctgaacttacccaatatgttgcgggagggaatatcggagatgcccggattttctcaagagctgacattaatcaatttaaatcaaaaatacatggatatacagataacaatatagacctacctataacccgatttgtacttcaaaataaatattatgtagaccaagagatgcacaagtcttatcgtgtaatgatagagtccgcaatgtgtgctgcggaaaatttcgcacaagtaaaaaatcacacaaatctttttttattagaaagtcgagactatgctcgtatcactaatttttaccgaaaatactttaaagaaacctacagtaagatatttatcggaactgtaaaacaaattgtaaacaaatga

SEQ ID NO: 28336 - DNA, 6303 bp, Alteromonas macleodii
atgaagtatttttctgagttagttaatcaatctattgcgagagcgaaagagtcgtctttaagtgtactgggtataactaaccctgcgttacgtcaacatctcgctactcaaatgtcgcaagattgcggagaatctgagtcaatgatggcgacaccgctttttgaacatacattcggatggacagaggccgatagaaccatggggcaattagctgaagatagattgttatcgtcagcagttttggatgcattggataaagagaaaataacggatagccaaggaaaacaagtagaaaatcgctatcagtttaaaaaagagttcaaaccttatactcatcaattaaaaagctggaacacactattagccgataaacctaaatctgttgtagtaaccagtggaactggctctggtaaaaccgagtgttttatggttccagtgctcgaagatctttatagagaatcacagcaaacacaagagcctttgtcgggtgtcagagctatcttcttatatcctctcaatgcgctgattaattcacaacgagaaaggctacacgcctggacacaggactttggtaaagatattcgattctgcttgtataacgggaatacagaagaaaaagccaacaaggtaaaagcacgccaggctcaagtaccaaatgagattctgtcaagagagttaatgcgagatcagcccgcgcccattttggttacaaacggcactatgctggaatatatgcttgtaagaaacgttgactcgccaattatcaacaaatcgaaagaacagaagtctttgagatggatagtattggacgaggctcatacatatgttggctcacaggcagctgaactatcaatgcagttgagacgagttttacacgcttttggtgtggaagctaaagatgttcgtttcgttgctacgtctgcaacaatcggcgacaaggatgctgaaaaacagcttcaaagctatctggccgaccttgccggtgttcctaatgatcatgtagtcgttatcggagggaagcgaaatattcctcagttaacattttctcccaaagacgctcaaacactggaggaattgtctttaataccagctgataaaaaacctggagaaaaagattacgatccagatgtttcgaaaacacgctttgaagcactgacagagtctacggttgcaaagaaaattagagataagttcgtcaatagcaataagccattaaagcttgctgagttaaaaaaatacctagagggggaattcccttctcaaacgtttacgcagaactctgtacttcagtggctagacttactaactggaacgaagctatcgcctaaacatgaagcgttcctaaaggtcagagcgcacttttttcaaagaatgatgaatggaatttggagctgtattgaccctcattgtgcaagtaagaaaagttctgtcttgaaagatagttggccgttcggcatggtgtattcgaagcaaactggcaaatgtaattgtggtgcaccggtattggaagttggcttttgtaacgactgcaatgagccccatttattggctgcagataaaagtggttttattacacaaagagatacagatgttggtgatgagttttcgttgcttatcgatcaggacgatgatgacgatactgagggtgatgaaagcgttaataaaaacaaacctacatcaatttttgtaacgcttagagcagagccggatgacgagctcatttacagcccagtcgatattaatgtgtctacaggaaaattgggtgacatcactgacgctgtacgcttgtactatgcatatgatagagatgagaatagtacctatcaaacaggatgttgtggttataaaggaacatcattcaaaaaaccgattagaagggcaatactcggctctcctttttacgtggccaatgctgttccaaccatacttgaattttgccctgacccaaaagtagacaaagaaacaggacttggtccgaatacgctgccagggcgaggacgcaagctaatcacatttacagacagtaggcagggcactgctcgtatggctgttagaatgcagcaagaagctgaacgcagtaagttacgaggtttaattttcggaatattaaaggataatcaaaatgctgttcaagcagaaatccctgcaattgaaccgaaagagcttgcgaccttaaaagagcgatacaaaaagttaaagaatgcgggtgagcatgactgggcgaatgaagtgtatcagcaaattatcgaaggggaaaagagtctgaattcgagctttaagcctgctgttctttcttggaatagcttggtcaaagagctccagctaaagaacgacattaaagataacatattaacttacaataaatacgcaaaccctgaagtattcggtgattcgactggagctgaaaagctttctgaaatgttgttgattcgcgagtttgctcgacgtccaaagtttcagaacaacatggaaactcaagggattataaaaattggatatcagggattagaaaaagtaaacgctattcctgacaattggagtgaacatggccttaagcttgaagattggctggattttctcaaagtctgtttagatttttatgttcgagaaaatacctatattaagcttgaagatgactggagagtttggattggttttaagtttgcacctaaaacgttcctaaaaccagattcttttgaagaagacgaaaatagagttaaaaaatggccacaggtcaaaggagcctataacaggctagctaagttactcataattggtgctaaattaaacaaagagtcgaaggttacgaaagatctcgttaacgaatggctaagatctgcttggactgcacttactaaaaataaagtacttaataatgaaggtaatcagtttttcttaagtcgtcaaaaaataacttttgagtttgctgaaaaatgctttatttgccctgttactaacaaactgctcgatacaacatttagaaatcttacgccctatttgccgaattcttttgattcgaaaaactttgagtgcaaatcaatagatttaccacctatatggactttggatatatcccagtacgactatagtgaagggcttaaaaaaattcgacagtctgtttctgcagatgaaaaagtttcccaacttcgttctcgcaacctttggacagatataaatgatagagtagtggagggtggtttttattatcgtactgccgagcactctgctcaacaatcatcagagcgacttaacaattatgaaagcatgttcaaaagcggaaaagttaatgtgctcaattgttccacaaccatggaaatgggtgtagatataggtggtatatcagcggttgtaatgaataacgttccacctcatcccgcaaattacttgcaacgagcagggcgagctggccgaagcaaagagtccagggctatatcttatacgttgtgtaaaagtaacccccatgatacagaagtttttaacgagccatcatggccttttgtcacagctatacccgcacctaaaatatctttagattctaaacggcttgttcaaagacatgtaaattcccttttactttcaatttttctaagagatgttatcggctcaacgaataaggaaaaaacaagtttaaacttagaatggttcttcttaccgtcggaaggcggacaatctgtctgcgacaaattcatcgcatgggcatcaggtaacgcaaataccttagaaaaaacgcttaaagatgtattgaaaggaactgtactttcgactgttccggcttggaatgttatcgacgatacaaaccaggctattgaaaaattatctgagcgctggataactcactaccgtcagcttaaaactgcagaacaagatgcaacacctgagagtgcatacgagtttaaggtaagagttgaattaacaaggcacactaatgaatatttattgaaagagctcgctgccaaagcttttcttccaggttacggctttccaacagatatcgttacactaaacaataaaaacattgttgatttcaaacgtgaaaaagaaggaaaacaaaagcgagaaaaatttagagaggacaatatttctcagcttagagaattgcctactagaaacctagctgttgcaatccgagaatatgctccaggtgcagaaattgttttggatggacgtgtattcaaatctgcgggggttgctcttaattggcagaaactggccagtgacgcaaaagaggggcaaaaatttgatgttgcgtggcgctgtggctcatgtggccattcaggtgtagaaacaaataccacagttaaggaagattggagttgtggctcatgtggaaccaaaataagaaatagttggaaaaaaacggttcttgagccgactggttttgtaactgacttttttaccgctccatcaaacgacatttcatctcaaagttacattgctgttcaaccgtcttggctgtccattgatgcattaccgattaatcttcctgaccctaatttggggtacatgaagtatgggacagagtctactattttccaacattcatctggtgcaaatgaacatggctacgcgatttgcatgcagtgtggtaaagctgaatctatgctaggtgatggtgagtttccaaagtcgcttaatcctgcctctttccataagcctattacttcaacaccgaaatccaaagacaaggatggtttcgagcctgagctctgtgatggaagcgcaactgtccatggtaatgtacatcttggctgttctggtcttacagatgcatttgaactggtgttgcgaaatcctctttctggtgagtacatagaccccagtcaccctgattccgaatctatagcgctaacattagctgtcgccatgcgtaacgcacttgcagcaaagttaggcatcgcaacgtcagagatagggtattctacgagaaaaaccagagttcaagaatctaataagcaagcaatcgctgtgcagctatatgacgtggtaagcggaggtgcaggtttttcaacaagtgcagcacttcatattgaagatgtacttatgcagacttatcaaaatttgtcttgtgaagcttcgtgtgactctgcgtgttcgacatgtttgttggattcaaatactcgacacgatgcaaaccaactaaatcgtaacttggctaaagcatggttaggagatgagttttccaattttgtatctttgagtgaacagtatcactttattaaaggtgcaaaattttgttacgagcctattctggaagctatttctcgacagataaacaaaggtgccagtgaaatacgagtgtggatgggaagcaatgtaaatgaatgggacttaaactctcgtcacgtacagatgttcgcttttcaaatgctaaatattcacaaggttaagcttactattgttcttccaaacacaactttgtccgatgctgattatatttctctatctcgattgagcgacattggcgttgaatttgtaaccagtgatgccgagttagatagtggggctcttgttgcgcaggcaatatacgaaaaggataaggcttttacactagcttgctcttcatttgatgtactcaatccaagtcaaagttggttgctttcacgcactgaaaatatggttgtttattccgaagctctttcaagcgttgaggtgtctccagttgatacatcatcttggataaaattcgacggtaactctatggcaaaagtagagctaagaaaagagctcgatggtgccattgatggtttcggcaagagattctgggagctgttgggaagtaattttaaaccgcttgaggatgacctgaactcatcccagttagctggtgttaagtacaccgataggtatttacagtcgccttggtacatcattttgcttggcgaagtaattagggctttacctaaagctccaggcgttggctttgaattagaaactttgtttaattccagggacaaaggtgcccggcttcatgatgactggagcaacagcaacgcaatgacagaagttatctctacgtggtttgagaagggagcagctacgccttgctaccttgacttgcatcagagacgcgatgacattgctcatagacgtgaaatgaagctttcattcagtaatggcaatatgtactcaataagcctagatcaaggcatgggatattggaaccatcatctagctaagaacaagcattggtttgatttcggtcagccacatgagcagttacttcaaatggctgaagtttggcaatatggaaatcttcaaaccacgtatgactgggaaacagtgatttttatagcaaagctttaa

SEQ ID NO: 28337 - DNA, 3399 bp, Alteromonas macleodii
atgttaattgttgattctccgagcctttggctcaaaaagtttctaatggaaagaaacttatcttcacccaatggtaaccctctattttcctaccaaatgactcacgacgaatacagacagttattcgagttagtacgtgatttttatccaaaaacaaatgtaagttggtctaagcacaaagattggtccgcgtgttttgtcatttactgctcagaatggtatcgacgtgactgttgcgctcagaagtgggaatggtttcctctttggcagagatttcattttgaactcactgcttctcaacgagctgacataataccattaggtttagaggggttctggaaaaggcctattcgtcgctatgaatctgacactagaaactttttaggttcgatttttattgaagggggtctacctttcaaattaattagctcaactggaaataaattttcagaagcgattagaaagctcttgaagctttattatcaggtcgacttgtatgcggtttcgattacagaacttgtgaaaagtcagttaggccatttgccagtggtattttccgagcctgaatctgtagagttaattgggtctgtggtaaagaatctaatgacttgcgcagggttggttgattcggatgttggcgaagagtcaccttcaatgcaacttgaccaaaagtcacctggctggcgtgatagttttccaattccactcgatgatgaaacgggtaaagggctattggataactggttgcttggagcaactaatgcaagcaaagtaataaaggactttaaagataaactgtcatgcgaacattctttcgataaaactacgggccgtttttatactcaaattagccttccaagaaagcttacttttagaaattgcagtgaggcgctggagtccacttacactcagttggggttacttgagggtacgaagcgaattgcagaacttggtggtgtcgtagcgcagatagataatggaaatgtacttgtacctcctagaaaaaaatcgataaaagtgcccagacggttactaagttcttcacttttcactgacctctcacaatctggaattgttatagggaaggtagaagtaaatgagtctagtatttctttcaatgaggcgccgctgggattcttggaagatgaaggtgaattgaaactagtcgggcaggggagtttttcaacaaagtatgctgaaatactggtacttgcgccattagcttatgaaattgaaatactatctgggtatcaagaatacgccggtaagcaagctatcgatggagttgaatttaactggtttagagtaaacggtgattcaaggttttatcacggagataaccgctttcgtatcaggactaactctacctcaacgtctagtggcagcctctatattgacggtgcagaaatattattaaaaaccttgccctcaagagtctataaaggtgttcctagcgttagagatgcagaaggtacactagcatcacagctagggctttcaacattactgaacaacaagcctgttgaatcactcgctgctcatgagttatacggaaaacactatttaagcgttaaaaacaaagaaagtgacaccttattgcgaagaacggttgcaattgttccagatgatttagatatcgaagcggttgcagttaaagagcatgcgcaaataaaagttacgtcatcgcgaaacctgctgatgacagtgtatgcacaagcgtgtcgagtagaaaacgaaaagcttgaaaatggacgtctatttgaaatctatcctgaagctgagccaccttcgagtgtcacactagaggttcaggctaacctgatggaagaccctataattgttaccctgccattccctgctagcggcatgtttgcatttgatagtgaaggtaagcctcttaaaactgagttaactgtagagcagctgttaggtgccgaagttaacctttattcagcaaaatcttatcctgaggacgtttctattgaactagccctcaaaccaaataatcgaacgtcaccacgttaccaatccaaagtaaaagtaaaggaccgtacgttaagcgtcagtttatatagtttcaaagaaaaaataatagagctaatgtcgctatcgaataatttagatgcagaagttgaaatttgcttaagtggtttaagtgacaaaaaagttttttcaatccgccgatatgtttcatccttaaactttgattcagtcggtggcggtatagcgctagcacagtctgaactagcgcatgctgacctaaaaccaccgatggctatgctgattgctgaaccagaacgctcacctttagaactgccagaaaaagaaattggcggtatttcattaggttggttcaacacaacggaaaaaatggagaaaacgggtccttggatgattgttccaagttctgaaacacctcatttgttcaggccaactttctacaaaggtgtcgaatcttcgtatgaacacagtgagacgattaaaagtctacaaacagcggtgaagcagtttaaccctagaagcgaagtcaattcgatagagatgtttctaaccgtaatggaaagcgattttactcatccaagttgggattattgcagaaaactatgggagcatttctcatatctgccactatcaacgtttgaggtatggaaggcgctggttaagaatcctcattgccttacggttgcattatttcgttttgaaatgaatgaagaattcattcgagcattagatcgagagttctccattctttgggagttgatacctatttctgtgtggcaacaatcgatacttgttgtaaaaaaggcttttcttaatttaggccttccaacgtcgatggtagaagagagagtagaagttcttctagataagttttatgacgttgttttaaatgtccctgagccgttaattaagcgactgaaaggtatcgaaatcaactgcaacgactatttagcagaacgtatagtcgaattaatccaagatccggaaagagaatctgagcaatttcaattgtttcgcgatataggcatgaaacgtctcacgggggaagcacagctaaccgaacaggaaatgtttaaggttattgatattgcaatgaagcagcctttactgagaaatcacaaagactcagactggccatcatttcagtttccgttattgagtgaaggattgagccatcgaattagatgtgatttgccacatcacgcaagcgtcatcaactacccactcattgccgctgctattgctgctggatatatcgaaataaacccaaataagttatctgcaaaaatgaagtttgaaattaagcaaataaagatgtttgcgccagattggttctcaggtgtttacgcttttggcattggatattattcagattgtaaggaagaggttgtcgcatga

SEQ ID NO: 28338 - DNA, 6303 bp, Alteromonas macleodii str. 'Balearic Sea AD45'
atgaagtatttttctgagttagttaatcaatctattgcgagagcgaaagagtcgtctttaagtgtattgggtataactaaccctgcgttacgtcaacatctcgctattcaaatgtcacaagattgcggagagtctgaatcaatgatggcgacaccgctttttgaacatacattcggatggacagaggccgatagaaccatggggcaattagctgaagatagattgttatcgtcagcagttttggatgcattggataaagagaaaataacggatagccaaggaaaacaggtagaaaatcgctatcagtttaaaaaagagttcaaaccttatactcatcaattaaaaagctggaacacactactagccgataaacctaaatctgttgtagtaaccagtggaactggctctggtaaaaccgagtgttttatggttccagtgctcgaagatctttatagagaatcacagcaaacacaagagcctttggcgggtgtcagagctatcttcttgtatcctctcaacgcactgattaattcacaacgagaaaggctacacgcttggacacaggactttggtaaagatattcgattttgcttgtataacgggaatacagaagaaaaagccaacaaggtaaaagcacgccaggctcaagtgccaaatgagattctatcaagagagttgatgcgagatcagcccgcgcccattttggttacaaacggcactatgctggaatatatgcttgtaagaaacgttgactcgccaattatcaacaaatcgaaagaacagaagtccttgagatggatagtattggacgaggctcacacgtatgttggctcacaggcagctgaactatcaatgcagttgagacgagttttacacgcttttggtgtggaagctaaagatgttcgttttgttgctacctccgcaacaattggcgacaaggatgctgaaaaacagcttcaaagctatctggcggacctcgccggtgttcctaatgatcatgtagtcgtcatcggagggaagcgaaatatacctcagttaacattttctcccaaagacggtaaaacactggaggaattgtctttaataccagctgataaaaaacctggagaaaaagattacgatccagatgtttcgaaaacacgctttgaagcactgacagagtctacggttgcaaagaaaattagagataagttcgtcaatagcaataagccattaaagcttgctgaattaaaaaaatacctagaggaggaattcccttctcaaacgtttacgcagaactctgtacttcagtggctagacttactaactggaacgaagctatcgcctaaacatgaagcgttcctaaaggttagagcgcacttttttcaaagaatgatgaatggagtttggagctgtattgaccctcattgtgcaagtaagaaaagttctgtcttgaaagatagttggcccttcggcatggtgtattcgaagcaaactggcaaatgtaattgtggtgcaccggtattggaagttggcttttgtaacgactgcaatgagccccatttattggctgcagataaaagtggttttattacacaaagagatacagatgttggtgatgagttttcgttgcttatcgatcaggacgatgatgacgatactgaggatgatgaaagcggtaataaaaacaaacctacatcaatttttgtaacgcttagagctgagccggatgacgagcttatttacagcccagtcgatattaatgtgtctacaggaaaattgggtgacatcactgacactgtgcgcttgtactatgcatatgatagagatgagaattgtacctatcaaacaggatgttgtggttataaaggaacatcattcaaaaaaccgattagaagggcaatactcggctctcctttttacgtggctaatgctgttccaaccatacttgaattttgccctgacccaaaagtagacaaagaaacaggacttggtccgaatacgctgccagggcgaggacgcaagctaatcacatttacagacagtaggcagggcactgctcgtatggctgttagaatgcagcaggaagctgaacgcagtaagttacgaggtttagtatttagcattttaagaacttttcaggaatcgcaaccagaaaaagaagatattgctaaagatgctgatttagctggattaaaagagaatataaaaagcctccaaagtgcaggcttatatgatatggctgcccagctacaagaaaaaattaatgcagcagaaggtggtaaacccgtctcatttaaacccgaagtggtttcttgggggacaatggtaaaagagcttcagctaaagaacgacattaaagataacatattaacttataataaatacgcaaaccctgaagtattcggtgattcgactggagcggagaagctttctgaaatgttgttgattcgcgagtttgctcgtcgtccaaagttccagaacaatatggaaactcaagggattataaaaattggatatcagggtttagaaaaagtaaacgctattcctgacaattggagtgaacatggccttaagcttgaagattggctggattttctcaaagtctgtttagatttttatgttcgagaaaatacctatattaagcttgaagatgactggagagtttggattggttttaagtttgcacctaaaacgttcctaaaaccagattcttttgaagaagacgaaaatagagttaaaaaatggccacaggtcaaaggagcctataacaggctagctaagttacttatactcggtgctaaattaaacaaagagtcgaaggttacgaaagatctcgttaatgaatggctaagatctgcttggactgcacttactcaaaataaagtacttgataatgaaggtaatcagtttttcttaagtcgtcaaaaaataacttttgagtttgctgaaaaatgctttatttgccctgttactaacaaactgctcgatacaacattcagaaatcttacgccctatttgccgaattcttttgattcaagaaactttgagtgcaaatcaatagatttaccacctatatggactttggatatatcccagtacgactacagtgaagggcttgaaaaaattcgacagtctgttttagcagacgaaaaagtttcccaacttcgttctcgcaacctgtggacagatataaatgatagagtagtggagggtggtttttattatcgaactgccgagcattctgctcaacaatcatcagagcgacttaacaattatgaaagcatgttcaaaagcggaaaagttaatgtgctcaattgttctacaaccatggaaatgggtgtagatataggtggtatatcagcggttgtaatgaataacgttcctccacatcccgcaaattacttgcaacgggcaggacgagctggccgaagtaaagagtccagggctatatcttatacgttgtgtaaaagtaacccccatgatacagaagtttttaacgagccatcatggccttttgtcacagctatacccgcacctaaaatatctttagattctaaacggcttgttcaaagacatgtaaattcgcttttactttcaatttttctaagagatgttatcggctcaacgaataaggaaaaaacaagtttaaacttagaatggttcttcttaccgtcggaaggcggacaatctgtctgcgacaaattcatcgcatgggcatcaggtaacgcaaataccttagaaaaaacgcttaaagatgtattgaaaggaactgtactttcgactgttccggcttgcaatgttatcgacgatacaaatcaggctattgaaaaattatctaagcgctggataactcactaccgccagcttaaaactgcagaacaagatgcaacacctgagagtgcatacgagtttaaggtaagagttgagttaacaaggcacactaatgaatatttgttgaaagagctcgctgccaaagcttttcttccaggttacggctttccaacagatatcgttacactaaacaataaaaacattgttgattttaaacgtgaaaaagaaggaaaacaaaagcgcgaaaaatttagagaggacaatatttctcagcttagagaattacctactagaaaccttgctgttgcaatccgagaatatgctccaggtgcagaaattgttttggatggacgtgtattcaaatctgcaggggtcgctcttaattggcagaaactggccagtgacgctagagaggggcaaaaattcgatgttgcgtggcgctgtggctcatgtggtcattcaggtgtagaaacaaataccacaattatggaagattggagttgtggctcatgtggaaccaaaataagaaatagttggaaaaaaacggttcttgagccgactggttttgtaactgacttttttaccgctccatcaaacgacatttcatctcaaagttacattgctgttcaaccgtcttggctgtccattgatgcattaccgattaatcttcctgaccctaatttggggtacatgaagtatgggacagagtctactattttccaacattcatctggtgcaaatgaacatggctacgcgatttgcatgcagtgtggtaaagctgaatctatgctaggtgatggtgagtttccaaagtcgcttaatcctgcctctttccataagcctattacttcaacaccgaaatcaaaagacaaggatggtttcgagcctgagctttgtgatggaagtgcaactgtccacggtaatgtacatcttggctgttctggtctaacagatgcgtttgagctggtgttgcgacatcctctttctggtgagtacatagatcccagtcatcctgattccgattctatagcgctaacattggctgtcgccatgcgtaacgcccttgcagcaaagttaggcatcgcgacgtcggagatagggtactctacgagaaaaaccagagttcaagaatcaaacaagcaagcaatcgctgtgcagctatatgacgtagtaagcggaggtgcaggtttttcaacaagtgcagcacttcatattgaagatgtacttatgcagacttatcaaaatttgtcttgtgaagcttcgtgtgactctgcgtgttcgacatgtttgttggattcaaatactcgacacgatgcaaaccaactaaatcgtaacttggctaaagcatggttaggagatgagttttccaattttgtatctttgagtgaacagtatcactttattaaaggtgcaaaattttgttacgagcctattctggaagctatttctcgacagataaacaaaggtgccagtgaaatacgagtgtggatgggaagcaatgtaaatgaatgggacttaaattctcgtcatgtacagatgttcgcttttcaaatgctaaatattcacaaggtgaagcttactattgttcttccaaacacaactttgtctaatgctgattatatttcgttatctcgattaagagacattggcgttgaatttgtaaccagtgatgccgagttagatagtggggctcttgttgcgcaggcaatatacgaaaaggataaggcttttacactagcttgctcttcatttgatgtactcaatccaaatcaaagttggttgctttcacgcactgaaaatatggttgtttattccgaagctctttcaagcgttgaggtgtctccagttgatacatcatcttggataaaattcgacggtaactctatggcaaaagtagagctaagaagagagctcgatggtgccattgatggtttcggcaagagattctgggagctgttgggaagtaattttaaaccgcttgaggatgacctaaactcatcccagttagctggtgttaagtacaccgataggtatttacagtcgccttggtacgtcattttacttggcgaagtaattagggctttacctaaagctccaggcgttggctttgaattagaaactttgtttaattccagggacaaaggtgcccggcttcatgatgactggagcaacagcaacgcaatgacagaagttatctctacgtggtttgagaagggagcagctacgccttgctaccttgatttgcatcagagacgcgatgacattgctcatagacgtgaaatgaagcttacattcagtaatggcaataggtacacagtaagcctagatcaaggcatgggatattggaaccatcatctagctaagaacaagcattggtttgatttcgctcagccacatgagcagttacttcaaatggctgaagtttggcaatatgggaatcttcaaaccaagtatgactgggaaacagtgatttttatcgcaaagctttaa

SEQ ID NO: 28339 - DNA, 3399 bp, Alteromonas macleodii str. 'Balearic Sea AD45'
atgttactaagtaactcaccagctacgtggcttaaagactttcttattcaaagaagtttatctgagcccaacggaaatcctctattttcatatcaaatgactcacgacgaatacagacagttattcgagttagtacgtgattttcatccaaaaacaaatgtaagttggtctaagcacaaagattggtccgcgtgtttcgtcatttactgctcagaatggtatcgacgtgactgttgcgctcagaagtgggaatggtttcctctttggcagagatttcattttgaactcactgcttctcaacgagctgacataataccattaggtttagaggggttctggaaaaggcctattcgtcgctatgaatctgacactagaaactttttaggttcgatttttattgaagggggtctacctttcaaattaattagctcaactggaaataaattttcagaagcgattagaaagctcttgaagctttattatcaggtcgacttgtatgcggtttcgattacagaacttgtgaaaagtcagttaggccacttgccagtggtattttccgagcctgaatctgtagagttaattgggtctgtggtaaagaatctaatgacttgcgcagggttggttgattcggatgttggcgaagagtcaccttcaatgcaacttgaccaaaagtcacctggctggcgtgatagttttccaattccactcgatgatgaaacgggtaaagggctattggataactggttgcttggagcaactaatgcaagcaaagtaataaaggactttaaagataaactgtcatgcgagcattttttcgataaaaatacgggccgtttttatactcaaattagtcttccaagaaagcttacttttagaaattgcagtgaggcgctggagtccacttacactcagttggggttacttgagggtacgaaacgaattgcagaacttggtggtgtcgtagcgcagatagataatggaaatgtacttgtacctcctagaaaaaaatcgataaaagtgcccagacggttactaagttcttcacttttcactgacctctcacaatctggaattgttatagggaaggtagaagtaaatgagtctagtatttctttcaatgaggcgccgctgggattcttggaagatgaaggtgaattgaaactagtcgggcaggggagtttttcaacaaagtatgctgaaatactggtatttgcgccattagcttatgaaattgaaatactatctgggtatcaagaatacgccggtaagcaagctatcgatggagttgaatttaactggtttagagtaaacggtgattcaaggttttatcacggagataaccgctttcgtatcagaactaactctacctcaacgtctagcggcagcctctatattgaaggtgcagaaatattattaaaaaccttgccttcaaaagtttataaaggtgttcctagcgttagagatgcagaaggtacactagcatcacagctagggctttcaacgttactgaacaacaagcctgttgaatcactcgctgctcatgagttatacggaaaacactatttaagcgttaaaaacaaagaaagtgacaccttattgcgaagaacggttgcaattgttccagatgatttagatatcgaagcggttgcagttaaagatcatgcgcaaataaaagttacgtcatcgcgaaacctgctgatgacagtgtatgcacaagcgtgtcgagtagaaaacgagaagcttgaaaatggacgtctatttgaaatctatcctgaagctgagccaccttcgagtgtcacactagaggttcaggctaacctgatggaagatcctattattgttaccctgccattccctgctagcggcatgtttgcatttgatagtgaaggtaagcctcttaaaactgagttaactgtagagcagctgttaggtgctgaagttaacctttattctgcaaagtcttatcctgaggacgtttctattgaactagccctcaaaccaaataaccgaacgtcaccacgataccaatccaaagtaaaagtaaaggaccgtacgttaagcgtcagtttatatagtttcaaagagaaaattatagagctaatgtcgctatcgaataatttagatgcagaagttgaaatttgcttaagtggtttaagcgacagaaaagttttttcaattcgccgatatatttcatccttaaactttgattcagtcggtggcggtatagcgctagcacagtctgaattagcgcatggtgacctaaaaccaccaatggctatgctgattgctgaaccagaacgcccacctttagaactgccagaaaaagaaattggcggtatttcattaggttggttcaacacaacggaaaaaatggagaaaacgggtccttggatgattgttccaagttctgaaacacctcatttgttcaggccaactttctataaaggtgctgaaccttcttatgaacaaagtgtaacgattaaaagtctacaaacagcggtgaagcagtttaaccctagaagtgaggtcaattcgatagagaagtttctaaccgaaatggaaggcgattttactcatccaagttgggattattgtaggaaactatgggagcatttctcatatctgccgctatcaacgtttgaggtatggaaggcgctggttaagaatcctcattgccttacggttgcactatttcgttttgagatgaatgaagaattcattcgagcattagatcgagagttctccattctttgggagttgatacctatttctgtgtggcaacaatcgatacttgttgtaaaaaaggcttttcttaatttaggccttccaacgtcgatggtagaagagagagtagaggttcttctagataagttttatgacgttgttttaaatgtccctgagccgttaattaagcgacttaaaggtatcgaagtcaactgcaacgactatttagcagaacgtatagtcgaattaatccaagatccggaaagagaatctgagcaatttcaattgtttcgcgatataggcatgaaacgtctcacgggggaagcacagctaaccgaacaggaaatgtttaaggttattgatattgcaatgaagcagcctttactgagaaatcacaaagactcagactggccatcatttcagtttccgttattgagtgaaggattaagccatcgaattagatgtgatttgccacatcatgcaagcgtcatcaactacccactcattgccgctgctattgctgctggatatgtcgaaacaaacccaaataagttatcagcaaaaatgaagtttgaaattaagcaagtgaagatgtttgcgccagattggttctcggctgtttacgcttttggcattggatattattcagattgtaaggaagaggttgtcgcatga

SEQ ID NO: 28340 - DNA, 6114 bp, Asticcacaulis biprosthecum C19
atgaaaccgtttgccatcctctctgacatacgcgcgcgcgccgtcgaagccgtgctgtcacagtcgggcctgacccatgaagggctgaagacgcatctacgttctgtcatgtcggggccgccgggttcgcaaagcgtattgctccaagaacccataatcgaaggcgcgcatccgtttgtcacggcgcccttcgcccttggcaatatgccaaagcccgtccttgatccaaggtttgtcaaggttctggacgggctggcgccgacggacgattaccgctttcctgccactcgtcggccctttcggcatcaatacgcagcttgggagcaactcagcgcaaaaggggacccgcagtccgttcttgtcacatcgggtactggctcagggaagacggagtgctttcttttcccaattctcagtgatctggtcacccaagcggaacagacgacccaacgcctggaaggtgtacaggcgatcatgttatacccgctaaacgcccttatcgaaagccagaaggagcgcctgtcggcgtggacggcgccctttgcaggcaagatacgctactgcctgtataatggtgatttgccgaaaaccgcaccggcatcggatcatcgccggacgccggaacaggttgtcgatcgcaatcagctgagagccagtccgccgtccgttctggtcaccaacgtgaccatgctcgaatacatgttatcccgtgctgacgaccagccaattatcgaaaagtcgaaggggaagttgaagtggatcgttctggacgaagcgcactccctcgtcggggccgccgccgctgagattgcattgcttcttcgacgcgtcttgcttgcctttgagactgagcccgagcaggtgcatttcgttgcgacgtccgccacgatcggcagtggccctgatattctgcagaccttgcagcggtttctggcagaggtcgccggtattgctgacgccaaggtccatgtcatcgaaggcgaccggcaaatgcccggcaagcccgccagggcgccgttaaaagcggtggatctggaggtggctgacccgggctatctatacgactttctcgggtcagatccggatgtctggggctttatagaaaggctacacaagggtacgcaatcgctcgagcaggcagggcggatcggcaagcgttttggacttgatggcgaagcgtttatcaatctcctgacccgcgccgaacggatagcccctgacacaggtgaaccagtacgattggcgccggttcgtatccacgcctttgagcgcgcggtacccggtgtctggagctgcctgaacccggagtgccgcggcaggccagaaaactggccttttgggcgattatttaccgaaaaagcaaatacttgtccggactgtcaggctcccgtgctcgaggcaattaactgcatggaatgtggtgagccgttcctagatgccgaagaggatctggagacgggcaagctggtttcgccagtacgcattgctgtgcgtgatgaatttgacctggatgccgacactgaagccccgccggaggagacgggagaaggcgaaaaggataaccgcgaaatcttcgcaccggcagccaatccacatatgctcttggcagccaatcctacgggtcgcgccaggccgctaaacctgaacaagcagacctggaatgtcgaagacaagggtggcgaaggacgccgcacattcctgtgcgaagaatttccgatcgatgaacgatgcccctgttgccaggtgaaggccaaggccaagaccagcatttatcagctggtgcgacccatgcgttttggcgcgcccttccttattggaaacgctgcgccgctcctggtcgagggcgtagatcctgctacgtcggtatccggtgtgttgccgtccgatggccggcgtctgctgtcctttacggacagccgacaaggtaccgcgcggctgtcggccaagatccaggccgaggcagagcgtaattttgtgcgttcgtttgtgtatcattctgtccaggcctctatggcggcaagcccggaggaaagcactttggacgcgctaaaggctgaactttcagagctggaggatgcctacgaagccagtcgaatgcccatcctcgaaggcataattcaagaccgtaaacaggccttattgaaactgacctctggttcgacggacggtattgcctgggacgttttggtcgatcgattggcttccaggccagaagttgaggcatggatcaaggacgtctgggaaccgcgcgaccctgaattgttcagtgaaccgcgaaaattggccaggttcttgttgttgcgcgagtttgctcggcggcctcgaaaagctaattcgttggaaacgctcggtttggctcggttacgcctgccgtcgatcgacggacttacgtcagctccagccgttttcgcccggcagggcaagtccgtcgacgattggaaggacttcctgtacgcaatggtaacgcattttgtgcggtcctatagtgctataggcgtatcccggtcggaacaacactggttgatgcccaatgtgtccctgcattcgttgttgccgcccgatcaaacagccaatggcgataaaaggcggcagacctggccaagtatacgccgtgtaagaggtcagatggccgggccattgatgtggctgctccgagggttggtccttcggcaggatgaggccgctgacaaggacgacctggacgaatgcatgcgtatggcctggcataacttgcaacccgtcttcggcaatgatcctgaacaccgggcgttggactttacaaagacatggattgctccggtcaagcaggcctatgtatgccagattacgcgccggctactggatcgcacgccttttggtatcacgccctatggccgcttcgaacgtgccgaagaaaaactgaaagtgttgccagtcagcatgcctacccacccggctcctcaactgggacaggtcgatgtccaactgggtgcgcaaaagatcaaaacctggctgcagtccgggcccgagatcgtgaagttgcgagagagcgggcaatggacaaacatcacggatcgaattgcggagtttgcccagtatgcccgctcagctgaacattcggcgcagcaggatagtcagcgtctccgccgatatgaaaaggccttcaaggaaggcaagatcaatattctgaattgctccaccaccatggaaatgggtgtcgatattggctcggtttcgatggtgatgatgaccaatgtgccgccgtcgatcgccagctaccgtcagcgagtgggccgtgccggccgccgcgggcagtccagttctctggccttcaccttctgcaaggataacccgctggatcgggaagcctttcgcaagcctgcggattacctcaagcgcacagtgtcgccccccaaggtggccttgagcagccgtccgatcgttcagcggcacgtaaacgcctatctcctacgtgccttcattctggagcaatccggaaatgcaatccaaatgatgattggaccattcctcggatgtccttccgacccggccggtctgcgtccaattttggccgaacgtcctgtagctctgtttaagagctggctggacctgccaagcgtaaaagccgcccatcgtgctgcgcttgcaaccttggtccggcgctcagttttggagggcgaaaccaatctcgtagaagaaactcgtagcgctattgatgcacttgaagtggcatttgtagctgagtgggagggaattcgggctctggctcgtgacgaaggtttgaaggacgctggcaaaagccgaatgcatattgagttgaagcggctatgcgaggatttcctgttgggcgcgttggccggccaaggcttcttaccgggccatggtttcccaaccgacgtggtcactttcctgccggccaaggcaccgaaaaaggacgatcaagatctagatgggcgatcacgtttccgcagccaggggccgcaacgttcacttgaccttgcaatccgcgattatgcgcccgggtctgaaattgtactggatggtcttgtgcacagatccgaaggcgtgaccctcaactggaagcgccctgccacggaagaggggctggtcgagatccaaagcctcaagtaccactggtcatgccggacatgcggtaccagtgacaccaccagaggcgtgcccaatgcctgcacggcttgcggctcgagcgatctggagcccgtgcagtatcttcgtccgagcggttttaccgtagattttcgcacgaaggcgcacgccgatacggacgtcatcagctatgtgccgcccgaagatccaaaagcctcgacgcgcgacgcaccctggacggcactacctattcctgacgcaggccgatttaggagcagtcgcgaaggtctggtattctatgctaacaaagggccccatcgctgtggattttccgtctgcctttattgcggtcgagctgaagccgacgagcaaaactggacggcaaatgatcccaagagcaggcctttttaccggcacaaacccctgcggccacgcaaaggcgaagccgtggatgtctgtccaggcacagagcagtcgtggaagatacgttccaacttgaccttaggccacgaaattaccaccgacgtattcgaactccagccggttgcggcactgaaccgcgccggttcgacggctttggtaatcgccttaagggaaggtctagctcgtgaacttggcgtcgaggccgatgaaatgggcttctcggtcaagcagacaaccgggcggttcggcaagcaagccgtctccatgctccttttcgacaaggctgccggcggggctggcttttctgtttcgttggagagcaagctggcgaacgttctgatggaggcgtcaaaggtcttggactgcaagacgccgggatgcacaaccggttgcgcggcctgcgtaatgacgtccgacgcaccggttgaggagaatggccttgatcgagtgggagctttgaactttatccgagagcacctgtcatttcccgccgccttggcggaagaagacaaattctccgccgatgccgtcctgtcgcattccgtagtcgatgaaattggtgaggctcttcgagacggcgtagctgcgagattgagcatattcgccacacccacattcgactcggctggtttgacagcctggagtgccgcgaccgatttttcaaattggaaacatcttggttacgcgatagaccttgttcttccggctaccgtggtccctggcctggatgcagcggctaggttggctttgcacgcgtttgttctgacgcatggtatccagttgcggtccggagacgccccgggttcgcatcctaccatgcgtgtattggcagtggttcagggccaggtgaggactcaggcctgggcctcacgtgacgaagccgcgtgcttgccgggagcaagctgggcgcagccttcgctgcacctcatagcgcgaggtagcctggcccgattaccagactacccctcgattgatccatcgagtttgttgccattgccgacaaccaagtttgcttcgatagagtcggagctggatatctccatcggcctgtttggtaacaggatggctactcacatacgctcacttctcgacgcatgtggcctgaacacgacggttcccatcactggcatgacctacaaagacccttatgtttcatcgcctctggtagctcggctgctgatcgacaccttggcggcattaaccgcagaaaaaggccgggggggcgagataaaaataataacgcaaaagctgaagtcatcgtctgaacacggacctccccggcaggcttcgcataattggcgctatgaaggcgcggccaaaagcgtgatcgaagcctacggccggttgaaacggctaactgtcgaactggatcataaggatacggttccacacggccgctacctgaacattgcctatggcgacggcaccaaggcgcaagttgttttcgatcaaggctttggtgcctggtctcccccggcgggacaacccatgcggcacgacttcgatttcgatgtttcccgccaggtctatcaaatttcccgacaatctgcaccagtacgtaagtcgcgatttgggcctacctatctggtcgcagtaaagctctga

SEQ ID NO: 28341 - DNA, 3444 bp, Asticcacaulis biprosthecum C19
atggatttaggtaagggactaaagtcactgtcggaagtacagcttcgcgatctgttccagcaatcgaaatctgatcttccaaccctgatagcgatcaacgctgaactcaaaaccaggcggtccgaaggcgctatcgacctgcaattcgaggtcgcccagcagattgtttatttgcgaaaatcgggtgatgcgcctgaggcacagtcattgaagccggttggtgactggctaaacgcgtttatgttgacgcggggcctgaagcgacctgacggccgtccgctgtcgcgctatcgcatgacagacgacgaatattccgacgcaaagaagatcctgcggctgttggctcggcaaggtcggctggccgtacccgacgaacgcgcgggtcgcctttttgtcgcctactgtgctgaatggttccgtcgtgaagcggcctcgatgtcagccgaatggaaccaattggcgccggatgtattcccttccgtgccgcagggtaatatgcgtactctgacagagatggggctgaactactggggccgtgacctgatccggctcgccacccacagagagtttctgctgaccctggccttggaaggcggtattccggtccacgttattaccgaccaggaccgtagttggctgaatggctatctggaaaccttgatgcgcgccagcgtttcggatcgatcggaggcggctattcgtgtcgtggcctacgaagaagcacatcgactgcggcaaagctaccggcacgacctgttcatcgatacctgcgccgaactggtccacagcattctgcattggcgccatacggctgaaacggaggcaccgaaggtcgatgccgtggactatctcgatgcctgtcacaaggattggcgcgccaagctccctgtttacgtacccaaggacgaaagtcatgaagcgcgtatcttgctcaacggactgatgaatgagccgctgacggggcttgcagtatcgggtatccaggccaaccgctacctgatccgtgaaaaaggcgaatggatcccggcattgcaaatcgtggcagatggccatctgaggcgtgataagcttccagggctggcagcggacagccgttaccgtgcggttccctccggagagctgagcaactttatcgctgacgaattcgccttgtttgaaccgccggtagatgatcaacgcacctggcgcgtcaaacctcgactggatttgtcacgcttgctgaagggatttgccttcaaggcgccggtaacaaccaccctgacgtcgggtagcaccttgtatccaatgacctggccgcatggcgaagcgatcaggtctgacattctcgttttcgaagctgaggaggataagcacggcctccggcttcgactggttggtcaggggtcggccagccgagccgcaaaggtgctttatgccctcatgcccgctgactgggagctccaggctgacacgccagaggccatcctggagtttgaagacgtccccaatctcaaatgtcggttggtaaagacagatgggacgctttatttacgttcgcccgatgatccagcggacctgcgttatcgcgtcgaagccggtaaggacgagaggcaggcggagctaagatatctcaacccgcactgggctggcatcgagagtaccgacgccaacctggacatcctcgaaggtgcgctggacatgcgtatcggggaggacgataagctgcgcatgccagccaccggtgagctgttttggcgccgacctgggcagacatggcaggcagttcgagacgggtccttgaaggagctaggcctggtggaagtgtcatggcgggacccgaaggccggcattcaactggaaaggcgctgtcttggattgttgccgggtggcgcgtcgatccgggccaatatggtcgaggccaagcgtggcgatttaaccttggtcaatcttccaggttggaagttgagccccaggcgtcctgatctggacattgtcgatcaacacaccgagggtttcagcgttacattccctggtcggcccgattatcgccttgtctgcgacctgcttccgcccagcggaaggccgctgcctgtcagaattacctttcgaggtcgcgacgccgtcatcgtcaagcatgatggtgcaattgtggcgcccgggacgatgctcgatctcgccagcctgcgcggtacctttgcattggcccctcatcgtacaagccttctgatctcccgtattggcgccaagacgggagcaagcagtgtaacgttcgacggcgaatatcccttggccacacgccgccaggtcatcgaagccttgctggcggaggcgggacatcaggacgcccagatcgagttggccttcctcggcgacagtcgctcttccgttcgtcttggcaggtatcgttttgataagccgatacagtctgctggcctcgtcgatctgccccaaacagaaggagctgtcgtggcccgcatggtctgcgacccggcggatgaagtgccgctgacattcgaccctcagggaccgggctatcgtgcgccggcaagttgttacgggccgatcttgatctatatgcgcgatgggcccgatgttgtttctcgtccggttgtcgtcgacaccaaggaccgcagtttcgcgcgtcgggagggtctcatgatggctctgaccgaactcgatttcaagcaacggcagggcgacattacaaaagtcctttccgagttggcgaccacgtcggcgaggcccgaggacgtgtcatatctcgtcaaacatgtggcgaccctgaatggcgtcccggcgtccgccttcgacgccctggcgcgtctggcggaagtgcctgtggctttggccagggtcttgcttaacgcgactgacgaagcctctcgtcaggcagtcttttccctgcaaaatgagttgcccttcctttggcttgcattgcccatctcggcttggggcgaagcgttcggcgccgaatgggccggactggagtcggctctggcaagtgtcgagagtgccgcgcgttcagtactcattatgaaatgtcttgcgggcaaggcggcggatatgtcgacgctcgacagcgccctcgcggccgtctttgccagggttggctttgccagtcctgccgtgtcggaagagccgtcgttacaggacattgcgcaggcctatgtccgcggccggagcgacggcgagagcgccgactcgaacttgacgaccgtgccagatttgtccggcaagctcagcgcaaatgggttcgatctgccccctgatattagtcggctaagtttcaaggattggggtggactgttggcgccagcctttctggccctcagcgcacttgaaaagctgccgctcgacactgagacgaagagtctggtgcgccgggtgatgcgtgaagatcagaacgcgaagtcaccctatgtctcaccagccttcccccattttctcagattttacggagcctag

SEQ ID NO: 28342 - DNA, 6108 bp, Asticcacaulis sp. AC402
atgaaaccgtttgcaatcctctcggaaattcgcgcgcgcgccgtcgaagccgtgctgtcacagtcgggcctggcccatgaagggctgaagacgcatctgcgctccgtcatgtcggggccgccgggttcagccggcgtgttgctgcaagaaccgatcatcgaaggcgcgcacccgtttgtcacggcgcccttcgcccttggtaacatgccaaagcccgtccttgatccaaggttcgtcaaggttctggacgggctggcgccgacggacgattaccgctttcctgccacccgtcggccctttcggcatcaatacgcagcctgggagcaactcagcgccaagggggacccacagtccgttcttgtgacatcgggcaccggctcagggaagacggagtgctttctttttccaattctcagtgatctcgtcacccaggcggaacagacgacacaacgtctggaaggtgtgcaggcgatcatgttgtatccgttgaacgcccttatcgaaagccagaaggagcgcttgtcggcgtggacggcgccttatgcaggcaagatacgctactgcttgtataatggcgatttgccgaaatccgcgccgacatcggatcatcgccgaacgcctgaacaggttgtcgatcgcaatcagctgagggcaagtccgccgcccgttctggtcaccaatgtgaccatgctcgaatatatgttatcccgcgctgacgaccagccaattatagaaaagtcgaaagggaagttgaagtggatcgttctggacgaagcgcactctctcgtcggggcggctgccgctgagattgctctgcttcttcgacgcgtcttactcgcctttgaaactgagcccgagcaggtgcatttcgttgcgacgtccgccacgatcggcagtggccctgatatcctgcagaccttgcagcggttcctggcagaggtcgccggtattgctgacgccaaggtccatgtcatcgaaggcgaccggcagatgcccggcaagccggacagggcgccgtcgaaagcggaagacctcgagacggctgacccgggctatctatacgaccatctcgggtcagatccggatgtttggggctttatagaaaggctacacaagggtacgcaatcgctggagcaggcagggcgcattggcaagcgttttgggcttaatggtgaagcgttcgtcaatctcctgactcgtgccgagcggctagcccctgacacaggtgagccagaacgtctggcgccggttcgtatccacgcctttgagcgcgccgtgccgggtgtctggagttgtctgaacccgaagtgccgcggccggccagaaaagtggccatttggacgtttattcaccgaaaaagcaaatacttgtccggactgtcaggcgcctgtgcttgaggcaattaactgcacggaatgtggtgaggcgttcctagatgccgaggaggatctggagacgggcaggctggtttcgccagtacgcattgctgtgcgtgatgaatttgacctggatgccgacaccgaggccccgccggaggaggcggacgacggcgaaaaggataaccgcgaaatcttcgcgccggcagccaatccgcatatcctccttgcggccaatcctatggcccgcgcccgctcgctaaacctgaacaagcagacatggaatgtcgaagacaaggctggcgatggctgtagcacattcctctacgacgaatttccgattgatgaacgatgcccctgttgccaggtcaaggccaagaccggcatctatcaccttatgcgacccatgcgttttggcgcgcccttccttattggaaacgctgcgccgctcttgcttgagggcgtagatcccgccacgaccctatcggggcaattgccgtcagatggccgacggcttctttccttcaccgacagccgacagggtacagcgcgtctgtccgccaagatccaggccgaggcggagcgaaattttgtgcgttcgtttgtgtatcattctgttcaggcgtccatgatggcaagccaggacgatagcgttattggggaacttcaggcggatattgccaagtgggaggcggcttaccaggcaagtcccatgcccattatcgagggcgaaatccaaaagcgtaaggaggcattatcgaagttgacctccggatcgacggacggtgtcgcctgggacgacatggtcgatcgactcgctgccagaccggaaattgagaactggatcaaggacgtctgggaaccgcgcgatcctgaattgttcaatgaaccacgtaaactagccaggttcatgttgttgcgcgagtttgctcggcgaccaagaaaagccaattcgctggaaacgctcggtttggcgcggctacgcattccgtcaatagacgcaattacatcagcaccagcggttttcgcacgtcagggcaagtccgtcgacgattggaaggacttcctgtacgcgatggttacgcattttgtgcgtgctaacagtgctattggcgtatctcgttcggaacaacactggttgatgcccaaggtgtgccttcattcgttgttgccgcccgaccaaacggcgaatggcgacaagaggcggcagatctggccaagcatccgacgtgtaagaggtcagatgcctgggccattgatgtggctgctgcgagggttggtccttcggcaagatgaggctgccgacaaggacgacctggacgaatgcatgcgcatggcctggcacagcttgcaacccgtttttggcaacgatccagaacaccgggcgtttgactttaccaagacctggattgctccggttcagcaggcctatgtatgccagattacgcgccggcttctggatcgcacgccctttggcatcacgccctatggccgcttcgaacgtgtcgaagaaaaactgacggtgttgccagtcacaatgcctaaccatccggcccctcagctggggcaggtcgatgtccaacccggtgcgcaaaagattaaaacctggctgcaatccgagcccgaaatcgtgcagctgcgcttaggcgggcaatggaccgcaattacagatcgtattgcggagttcgcccagtatgcccgctcagctgaacattcggcgcagcaggatagtcagcgtctccgccgatatgaaaaggccttcaaggaaggcaaaatcaatattctgaattgctccaccaccatggaaatgggtgtcgatattggctccgtttcgatcgtgatgatgaccaatgtgccgccgtcgatcgccagctaccgtcagcgagtgggccgtgccggccgccgcgggcagtccagttctctggccttcaccttctgcaaggataatccgctcgatcgcgaagcctttcgcaagcctgcggattacctcaagcgcacagtggcggcccccaaggtggccttgagtagccgtccgatcgttcagcggcacgtaaacgcctatctcctgcgtgccttcattctggagcaatcaggaaatgcaatccagatgatgattggaacattcctcggatgtcctgcggaccccgctggtgttcgtccaattttggctgaacgtcctgtagccctgttcaagagctggttggacctgcctagcgtaaaagccgcccatcgtgctgcgctcgcaaacttggtccggcgctcagtgctcgaaggcgaaaccaatctcgtggacgaaactcgcagcgcgattgatgcacttgaagtcgctttcgtagctgaatgggagggaattcgggctctggcccgtgacgaaggtgtcaaggacgctggcaaaagccgcatgcatatcgagttgaagcggctatgcgaggatttcctgttgggcgcgttggccggccaaggcttcttgccgggccatggtttcccaaccgacgtcgtaacgttcctgccggccaaggcgccgaagaaggacgatcaagatctagatgggcgatcacgtttccgcagccaggggccgcaacgttcacttgacctcgcaatccgcgattatgcgcccgggtctgaaattgtactggatggtctggttcatagatccgaaggtgtgacgctgaattggaagcgccctgccacggaagaggggttggtcgagatccaaagcctcaaataccactggtcatgcagggcatgcggtaccagtgacaccagcagaggcgtgcccaatgcctgcaccgcatgtggctcgagcgatctggagccagtggaatatcttcgtccgagcggttttaccgtagatgttcgccagaaggcccatgccgatacggacgtcgtcagttatgtgccgccagaagatccaaaggcctcgacgcgtgacgcaccttggacggcactacctattcccgacgctggccggtttaggagcagtcgcgaaggtctggtattctatgctaacaaagggccccatcgctgcggattttccgtctgcctttattgcggtcgagctgaagccgacgagcaaatttggaccgcaaatgatcccaaaagcaggcctttttacaggcataaacccctgcggcaccgcaaaggtgaagttgtcgatgtctgtccaggcacagaacagtcctggaagatacgttccaacttgaccttaggccacgaaattaccaccgacgttttcgaacttcagccggttgcgggactgaaccgtgcaagctcgacggcattggtaatcgccttgagggaaggtctggcccgcgaactcggcgttgaggccgatgaaatgggtttctcggtcaagcagacaaccggacggttcggcaaacaagccgtctccatgctccttttcgacaaggctgccggtggggcaggcttttccgtttcgttggaaagcaagttggcaaacgttctgctcgaggcctcgaaggttttggactgcaagacgccaggatgcacaaccggttgcgcggcctgcgtaatgacgtccgacgcaccggttgaggagaatggccttgatcgattaggggctttgaactttctacgagagcatctgtcatttcccgccaccctggcgaaagaagacaaattctcggccgatgctgttctgtcgcattccgtagtcgatgaaattggtgaagctcttcgagacggcgtagctgcgaggttgagcatattcgccacacccacattcgacgcggctggcttgacagcctggagtgccgcgaccgatttttccaactggaggcaccttggttacgagatagaccttgttcttccgtctacagtggttcctggtttggatgcggccgctaggttggctttgcacgcgtttgtcctgacgcatggaatccagttgcggtccggagacgccccgggttctcatcctaccatgcgagtattggcagcggttaagggccaggtgaggactttggcctgggcgtcccgtgacgacgcggcgggcttgcccggagcgagctgggcgcaaccttcgctacaccttatagcgcgaggcagcctgaccgggctacccgactaccccgcgatcgatccgtcgagtttgttgcctttgccaacaactaagtttgcgtcgatagaatcagagctggatatctccatcggcctgtttggtaacaggatggccactcagatacgctcgcttctcgacgcatgtggcctgaacacgacggttcccatcacgggcatgacctacaaagacccctatgtgtcatcgccgcttgtggcacgcctgttaatcgacaccctggcggcacttgcgggtgaaaaaggccgtggagcagagatcaagatattcacacaacatctcaaatcgtcatctgactatggaccacccacacaggcttcgcacaactggcgagaggaaagtgcggcgaagggtgtgatcgaagcctacgggcgcttgaagcggctgaatgtagttctagatcacaaggagaccgttccgcacgggcgttacctgaatatcacatatggcgatggcagcaaggctcaggtggttttcgatcaaggcttcggcgcgtggtctccagcagttggacaacctatgtcgcatggcttcaggctcgatattccgagacaggtcgatcaaatttcccggcagtctgcgcctgttcgtaagtcgcgatttggaccgacttatctggttgccgtaaagctttag

SEQ ID NO: 28343 - DNA, 3444 bp, Asticcacaulis sp. AC402
atggatttaggtaaaggcctaaagtcactgtcggaagtacagcttcgcgatctgttccagcaatcgaaatctgatcttccaaccctgatggcgatcaacgctgaactcaaaaccaggcggtccgaaggtgccatcgacctgcaattcgaggtcgcgcagcagattgttcatttgcgcaaatcgagtgatgagcctgtggcacagtcattgaaaccggttggtaactggctaaacgcgtttctgttgacgcgcggccttaagcgacctgatggccgtcccctgtcgcgctatcgcatgacagacgaagagtattccgacgcaaaaaagatccttcggctgttggctcggcaaggtcggctggccgtacccgacgaacgcgcaggtcgcctttttgttgcctactgtgctgaatggttccgtcgtgaagcggcctcgatgtttaaggaatggaacgaactagcgccggacgtttttccttcagtaccctaccagagcaaactcaaactcaccgagtttggattaaactattggcgccgagatttgatccggatggcgaaccagcgagagtttctgctgaccctggcattggaaggcggtattcccgtccatgtcatcacggaccaggaccgcgggtggctcaacgcctatttgagaaccgtgatgcgcgccagcgtttccgatccgtcggaggatgccatccgcctgatctccttcgaagaggcgtatttgctgcggcagagctaccggcatgaccttttcattgatgcctgtgcggaacttgtccatcgcgtcctgtattggcgccgcacggccgacacggaggcgccgcaggtcgacgcggtggtctacctcgatgcctgtcatccgcattggcgcgccgaccttccggtgtatgtgccgaagaccgaaagtcatgaagcacgtatcttgctcaacggcctgatgaatgagccactgacggggcttgcagtgtcaggcatccaggccaaccgctacctgttccttgaaaaaggcgaatggatcccggcattgcaaatcgtggcagatggccatctgaggcgtgataagcttccagggctagctgcggacagccgttaccgtgcggttccctccggagagctgagcaactttatcgccgacgaattcgccttgtttgaaccgccggtcgatgatcaacgcacttggcgcgtcaaacctcgactggatttgtcacgcttgctcaagggatttgccttcaaggcgccggtaacaacaaccctgacgtcgggtagcaccttgtatccaatggtctggccgcatggtgaggcgatcaggtctgacattctcgttttcgaagccgaggaggagaagcatggcctccggcttcgactggttgctcaggggtcgaccagccgagccgcaaaagtactttatgccctcatgccggcggactgggaggtccaggctgatacgccagaggccatcctggagattgaacatgtccccaatctcaaatgtaggttggtcaagacagatgggacgctttacctccgttcgcccgatgatccagcggacctgcgttatcgcgtcgaagccggtaaagacgagaggcaggcggagctaagatatctcaacccgcagtgggctggcatcgagagtaccgacgccaacctggacatcctcgaaggtgccctggatatgcgtattggggaggacgacaagctgcgcatgccggctgccggtgagctgttttggcgccgacccgggcaggcatggcaggccgttcgagacgggtccttgaaggaactgggcctggtggaagtgtcatggcgggacccgaaggccggcattcaactggaaaggcgctgtcttggtttgttgccgggtggcgcgtcgatccgggccaatatggtcgaggccaagcgtggcgatgtagccttggtcaatcttccaggttggaagttgagccccaggcgtcctgatctggacattgtcgatcaacacagcgagggtttcagcgtcaccttccctggccggcccgattatcgccttgtcggcgacctgcttccgcccatcggaaggccgctgcctgttagaattacttttcgaggtcgcgacgccgttatcataaagaaggatggagcggttgtcgcgccgggggaaacgctggatctggccagcctgcgcggtacctctgcactggtaccctatagaaccagcctccaaatatcccgtatcggcgccaggactggctcaagttgcgttacctttgaaggtgaattcgcattatccgcgcgtcgcagtgtgattgagagcatgctggcggaggcgggacatcaggacgctcaaattgagttagcctttttgggagacagtcgtccttccgtacggctgggtcgatatcggtttgacaggccgatgcagtctgcaggactcgtcgatctacccgcaacaaggggaacagtggtcgcccgaatggtctgccaacccgaagaggagcatgaactgaccttcgactctgaggggccaggctaccgagcgcctgcggcagcttacggcccaacgctcatctacatgcgtgatggaccagacgttgtttctcgtccagtggtggtagacaacaaagaccgcagtttcgtacgccgagagggtctgatcacggcagtcacggaaatcgactttaagaagcggcaaggcgacatcaccaatgtgttgtcagagatggggagcccggcggcaagaccggaggacatctcatatctcgttaaacatgttgtgaccctgaatggcgttccggcgtcggccttcgacgccctggcacggcttgctgaagtgcctgtggctctggttcgggtgttgctaaacacgaccgacgaggcctcgcgtcaggctgtctttgccctgcaaaacgagttgccctttctttggctggccttgcccatttcggcctggcgtgcagcgttcggcgccgaatgggccggcctggaagccgcatttgcgcatgttgaaaccgccgagcgttctaacctgatcatgagctgtttagcaggcaaggctgcagatttatcaacgctagacggctcgctggcggccgttttcgcccgggtcggctttaacgggccggccttgtcgactgagccgtcgttacaggacatcgcgcaggcctatgtccgcggccagagcgaaggcgagagcgccgaaacccacctgatggccttgccagacctgtccggcaagctggccgcaaaggggtttggtctgccctccgatatcagccagctaagcttcaaggactggggcgggctgttggcgcccgcctttctggccctcagcgcacttgaaaagctgccgctcgacacagaagcgaagagtctggtgcgtcgggtgatgcgtgaagatcagaacgcgaagtcaccctatgtctcaccagccttcccccattttctcagattttacggagcctag

SEQ ID NO: 28344 - DNA, 6330 bp, Azoarcus sp. BH72
gtgaaaaagcaatacttcgcgcagcttctacctgaacttgctacccgtgcttcgcgcgcgaccctgagtcgtttggggttctcgaatgcctcgctccgtgcctatctggagcgcgccttttctgcctcctacggcgcaaaaggttgctttgtcggcgacccggtgttcgaagccacttttggctgggaggaggcggaacatagcctagccgaactcagccccgagctgctgacgccagccctggtgtcagccctcgatcggccaggcggggatgcaagaagcagttaccgtttccctcgcgaggctcgcccttaccgccaccagctcgaggcgtggcggattctggggcaagataagccgcagtcggtggtcgtgaccagtggtacgggatcgggcaagaccgaatgcttcatggtgccgattctggatcagcttgcgcgtgcgcatgcccagcgcgggtcgaagctgattggggtgcaggcattgttcctctacccgttgaacgccctaatccagagtcagcgagagcgcctgaacgcctggacgtcatccttcggcgacgggctacggttctgcctctacaacggactgaccccacagaagcagccgcaaggcttgcgcgatcagatgcgaaacgaggtgctcgatcgtgagtcccttcgcgctgcacctccgccgctgttggtgactaacgcgaccatgctcgagtacatgctcgtgcgcgcgcaggacgcccccatcctcgaacagtcgcaaggcgcgctcaagtggatcgtgctcgatgaggctcatacctacatcggctcccaggctgcggagcttgcactgctgctgcgtcgcgtgcttcacgcctttggtgttacacccgaacaagttcgctttgtcgcaacctctgcgacgatcgggggcggcgaggccgaggcgcaattgcgggagttccttgcgcgcgttgcgggtttgagcctcgatcgtgttcacgtcgtttcgggtcacagagttgtgccggacctcgatgcaggcgagcccgcgtacgccgatgcgccactcgaggccctggagtcgatcgcggaggaccccgggcgtctctacgcggccttgtgcgctaacaaaacggcgcgttcgatccgagcgagcttcactccgcccaacgatagagttctgccgttgtcctcactggcggggagtttgtgcggccatgtcgcgcccgaagcgtcagacaaggcaaaggcgctgcgttggctcgacttgctgactttggcgcagtcgggtccgaagggaaagccaaccaagtcatatctgccgctacgttcgcatctcttccataacgtgctcaatgggctttgggcctgcgcggacttagggtgcagatgcaaggccgggacggagcttgattcaccggactggtcattcgggttggtctataccgagccgcggaaacactgcgagtgcggatcgcctgtgtacgagcttcgatcttgtaacgagtgcaacaccacctacctctgggcgcgtcgatatgggcctggagaggatggcaagtaccgcttgctccagacgaccgaagaagatttcgacgagttttcgctggatacggagcgtgccgaggaggatgagcagcaggcccaagtgagacctgggtattccccggtcttgattgcaaacgctcataagggcgcgacggaagagattcttgtcgacgccgctacccttgccctcgatccgttggagctggatggggctgtacgtctcagggggcgagacgaatcggtcattgatgaccaagggacgcttgcaatggtgtgccccgagtgcggagcccatgacccttcaaatgggttggggcttttccgcaaggcgattcttggagcaccgttcctgctcggcgagatcgtcccgacgctcctcgagttctgtccggatatcgataattcggaggcgaagcccctcgagcggccttatcgtggtcgtcgaatgatctccttcacggacagccggcagggtacggctcgcatcgcagcccgattgcagcaagactccgagcgaaatcgtattcgcggtctggtcttcacgaaagttctcacatcagggagtcctggtggagaggccgacgtggctcaactacaagggcaggttgaagcacttggcgcagtgcttgccggtgggccaaatccgcaaatacaggtcatatatgattcgttacgagcgaagctactcgagttttcaggattccgcccggtgccctttgcggagatggtgcagtggttgagttcggctgtcagtgacgtaagagactggatgtatggctactaccgtgaccaggacccgggtgagttcggaacgaataatggccgggagcgccttgccagaatcttgctgaccagggagttcggtcgccgcccgaagcgcgtcaactcgctagagaccatgggtttggtgcgaacggtgtacccgaaacttgaggctatcaatcgtttgccagacttcgttggtgaggtgccagcgatcagtttgagcgactggaaggatttcctgaagattgcgctggatttccatatccgggagaacaccttcatcgacctccccgacgcatggagaaagtggggcgggaaccggctttcggccaagcagttgatgcctccagagactcagcaagcccagacgaatcgctacaagcgctggccgcagtgtgcagtgatcgagcggcagagccgacttgtacgcatactggcgcgcgggctgaacattgatccacagtcagcatcgggtcgtaacgccatcgatgcgattcttagaggagcctggaaacaacttctggacctcaagttgcttgagatgggcgatgtgggtcgctatctgaaactagacggcgcagagatcatggcgctcgcgccgatcgaaaacgcgtggctatgtcccgtaacccgcagggtgctcgacaccgccttcatgggcatcacgccatatcttcccgagcaggccaagtcggacagcgtggcgaaatgcgttcctctgaagatgccagactacagtccaatcgccaatctggacgagatcggcgatgagagagtcgaactcgttcgtgactggctgaataccgatgacgcagtcacagcgcttcgcaaagatggactctggtccgatctgaatgaccgcgttgtcgagggagcattctatttccgtgccgccgagcattcggcgcagcaaccgggggcgcgactcgccgagtatgaggcggcgttcaagactggacggatcaacttgctcagctgctccaccaccatggaaatgggggttgatatcggagggatctcagtggtggccatgaacaacgtgccaccccatcctgcgaattatttgcagcgagcgggtcgtgcgggccgccgtagcgagacacggtcggttgcactttcgctctgcaagtcgaaccctcacgatcagcaggtcttcaccaatccgatgtggccgttcgagacggttctgccggctcctcgcgtccagttgagcagtgcgatactggtgcagcgccacctgaattccatgctccttgcaaactttttgcgcaaggagctttctggccctggctccgccgagaagctgaatctggagtggtggatgctgccggccgatcagtcgcggcagcagcgcttctgcgcttggacacagtgtttctccagcggcaatgaccctgagcttgccaaggggcttcgatcactactccggcatacaccgcacgagggtacggcttcgttggagcgtctcgtcgcagcagcagggcggatggcccaggaccacgccaggaaatggctctccgagttcgatgtcgttgaagccgagttggcacgtttgtcgacccccgcgggtatgacagagcccgcctacaaagcactcaagatccaacgcaagcgcctgactggcgagtatctgctgcgcgaacttgccactgagggttttctcccggggtacgggttcccgaccgacatcgctccattggacaccttgaccgtcgatgagctggcccgtattgaagccacgcaaaggcgtcagcaacaggacgaggctggccgcatcgataaccggatgcgcttccgtgaattgccaagccgcgacatggtgactgccctgcgggaatacgctcccggctcggaggtggtgatcgatgggctggtctatcgcgctgcgggtatcacgttgaactggcataccccagcctcggtaaccgaagcgaatgagatccagagtatccgtgacgcatggagatgccgtcactgcggatcaagcgggacacatgtgcgagcgagccgattgctcgagtgtccggattgcgggtcactgctcggcgccgacaaggaagtgcgcttcgattatcttgagcccgctggctttgccgttgatctctacagcacccctcacaacgatgtttccacgcagacgtttgtcccggtgtcgcttccctggatcaacgcgaatggtgagtggcttccgctgcctaatcccgcgctgggtgttcaccgaagtagtgtggatggtgtggtgtttcatcattcggcaggtattcatggtcatggctttgcgatttgcctctgctgtggacgcgcggagccgatggagggtgaggatgaccttccagatgccttcttcgatcacaagaaggggaagttgaaggatcacaggcggcttcgtggtgcgcagggtggcgagacgaacgtttgcgagggaagctataacgcctactcgatccagcggggtctaaggttggggcatgaggccagaacggatgtgctcgaattggtgttgcgtggcctggatgatcagccaatacgcgatcgcaagattgcctttacgctcgcagtggccatacgtaacgctattgctgcgacattgggtatcgagtcgtcggagttggggtgcgatacgaagcctgtgcgcttcctcggagaagggagttgccaagccattgtggtcttcgaccgaagtgcctcaggctacgcatcctcagtcgccgaccggttgccgcagatcctccgtgcggccgctggtcagttgaattgcgccgaaggctgcgactccgcgtgccagcactgtttgttggactttgatacccggttccgccttgatgatctcgatcgacatgccggccaaagttttctgtctggcgagtggctgactgccttggagttgcccgctgaacttgctcactttggtcctggctctgttgctgagcatcagaccccggttgaggcaataacgcgcgagctggccatgccctcatgcgaatggctgcgcatctatttgagcggtgagccagaagattgggatttggccgtctctcccttgcgtcgctgggtctcgcgctgggcagccactggagtggccgtggagttggtcctcgatgcagaggtcgttcagcgtgtatcgcgggccgatcagtccgtgctggcagcgatggatatgctggatggagtcacactcagggctggaaaggcggctgttatcgctcagggctcagccgttttggctgaagtcggacaaggcggccgcgtgctcgcgtgggcggggctacaagggcgtgccgttccgggtgctaactggggtgattgtgacggaacgattcttgtgcgaggggctgtgatcaaaccagtagcgctgggcgagcggctggagttcgcgctctcagcgccggagggcttgcctgcacagacggtgcggatcgagatcagcaatgagctcgatggtatggcggacggcttcggtcgtcgcatgctcgagagcttccaggggcatctcggcatttccctggttctgccaggtgagcggattgtggagcttacgtaccacgatcgatatctgaatgcaccgctacccgtggctttgctgcttgagttcgtgtgtgcgcttcgcgcaagtgctgacgaatcatgggacgtaaagcaagttgcgttgagcgttgcacccgttcctgacgctcagccctcgcgtatgccaccctctaaagtttggcagaactggtccagtgatgaagagcgggataaggcgctcgttgctgcattcgagtacgcggggctagatctctcgcttgcgaccttgaccaagcgcgattcgatccacgcgaggaggcttgacatcgtgttcgcgagcggcaagaagctacaggtttggttcgatcaggggttctcgtactggcaagttccgagagatcgaaccattggtacggggcgcgtttggttcccgttcgccggagacctagagcgacaggcagagagcatcgggcgcgcggagttccggatcgaagggcagccctatcccacctacgtttttctgggatggtcttga

SEQ ID NO: 28345 - DNA, 3579 bp, Azoarcus sp. BH72
atgttcggaaggcggagtttgccgaggcccgacgggcggtggctctatgcatatcgccttggtacagaggaataccagacgctacataagttgctggcagatgccgtccgggcaacaccgattcaggtcctctctcgtcgcaaccgccactttgcagccttgttcgtgctctacgccgcggagtggtggcggcgtgaatacgatggaggcccttggagatgggccccaatcctcgcgtcgctccagatcaacaaggacgacttggcgcccaacgagcggtctgaagttgtgctgaccgggttctccttctgggggctaaggcccacgacgggtgatgggaagcggtacttcggtaccgtggtggctcatggcggcttgccgctcaagctgatcggacacggcggcagccgtttgaatgctgtcatggggacggtgctgcgtcaggctgcacgttatcgctggagcgaaagccaagtcgtcgatgctgtggcggaccacgcacacgcaatgcctgcaagcttgcgccatgaggaggtgttccgactccttgcgacgctgatccttactacgttggatctaaatgatcggcatcagcttggtggaatgcctgatccgatcggtcatcttgacaacgtggagccaggctggcgcgaagcctatccgctccaaatagacgattcggctgcagtgcagctactggcttcgatggtgagggcggcgagtcagacctcgaccgaacagggtgccgttgcagtctttcaagtggttcgctccctttcctgctccgatgtgggggagtggcggctcgagtctcgtgtggtccatcccgcagtcgcctctgcggatgcgctggcgctgcagttcgggctcggggctgcatcggcgcttcctcgctacttcgaagtcgacgtaactgctggtgaacggggggcgctcaccagcggcaggcttctgctgggcagtgatagggcgactgtggcgtttggaacacagcgtcggcgttggtcgggtcgagtggcctgcgatgagcacattctccatctgcgtactgctgggaatgatgtcgtcgaaggtggcgtcgccctgcccggtggcgagagcttggccgacatcgaggggccatgggtgttcgttgccgagggcgagcgttatcggctggctggcgcgggtgaccttaggctgcctgacgccgaagcacttgtcgcagtggccgagggcagcatcttggagtcgctcgaggagagtgctccgggtagtgagttgctgggacaactccacgtcgattccggaaagacgcttgtgctgtggcgtgtgtccgggagtgttcagatttcggacacgaatgactcttggagggtgcggcttgggcagactcgtaagctgtccggcagcctggtgctcgaggggaggcgtgctgcatactcatccagaccttggccagtttttcgcggtaagccccatgtcgtgcgctatgacgatgagggggcacgcgtggtcctgagcaagggcctccattggttcgcggcggggagcaggagcctgatcgatccggcacgttactgcggcccggtcgagttgcaagtcttcgaggacgatgagcgcataggccgcttccgctttgtcttggtttcagcacactcaagcgagcgtttcctgtcgggtacgtcggccgaggatgcgagtgtcgaattcactggctggggtttcgcggatttggccgtcgagtcgggccgagccgagatgggagcatttcggaagaccgctcaaggtcatgccgtcaccctccaggtcgaatcaacgccgcccaaagacgttctggtctatctgcgctggcctgaatctcctcacgagttgcgggtttgggtgccattccctgcgagcggcggacgggcgtttgatgtcgaggggacccccgtccttagtgggagtgtcatgtccctgcggcatgccgcaggcgtgcgcgtcctcgtattcgatcagaaccccgaccagccgaaaaagtatgaggtcgaactcgagcttaggggcgaccctgtgttgggacgttcggattcgtcgctctcgcgccgcacagttccgatcgtcaaagggtttgcagaagtgcgcctgcttgatctttatggcgagatagaagcgctgctgagcctgtccagcgagctcgatgcgcgggttgaactgcgtctgatggtcggcggcaagcggaacttcagcatgagcgtgtcgcgctacgatgtggcgctgcggccgaaggtgatgggtgtcgcgctggaagatgaagacttgaggcgggttcagctggaacaggtgcaaggctgcgaggttttggcctcgcccatactgcgcccggccgaagcgccgcgagtactgtcccaatcggtgtccgaaggagcgccatccggcgtgtggagtatcgagaggctgaggccggagtttgcgccttggcttgtctatcctgcgccgggctctgcgctggaattcaggcctttgtgtatcggtggtggtattgccagtgaagacgacgcagctaccgccgacccgctacccgcttgtgctttggctgcggccattcggttgccagacgctgcagcgcgcctcgccgcaattgatgccgtgttggtggccatgggcgacgattttgaccatgactcctggtcgatgctcgacggactgtggtccgcattcggtagattgcccctgtgcagcattgacacgttcaaggtcctggcaaggcggcccgagatcgttgttgcgatgttgtttcgaagcgagctgccggctgcgcaactgggcgaccatgtcaggcagctgaagcggcaacttggcatgacgcttgaactcgtcgggatcacagtctggcgtcgcgcaattgaaaagttctcaaacgcttggacccagaggctaggcgacgatctggccaagctgagtgtgccgattcttcttaagggtcgtttgaaggctgtcgtcgatgagctgccggccctgcaactgaatatggagtggttgcagttcgaatgttcgaacgaataccccccggctgtcctgcagttgcagaaggacattgcggcgaatcgaggggtccacctcacgcggctttggcagggtgaggacagtttgctgcagcgattactgctgcgtgttcacgcggacgatgtcgcctggcctgagccgcggttttttgctgataaggccatacgcgtcttcgtcgaggctgtgctccctgtacccagaatgaagagccaactgaagcttctccatagtttcttctggcttgataacggagatttcaaactctccgtggcgaatgttccggtgctatgcgccctatggtgcgcccttgatctaccactcgactggtggcgcgacccgggtaacaggctcgcgttgcagcgtcttcgcgctttcgaccccttgtggtttgaaggtgcctatcagcacgcgtttgcggcgtgtattggcctggcgttgattgagccgacttcggcgcggcttggcgggactgctcctcccgtcgagggtggcccacgggttcatcgtctgcctgccggcacggtccagcgcatcaaagagaaaacaaagtga

SEQ ID NO: 28346 - DNA, 5118 bp, Azotobacter chroococcum NCIMB 8003
atgcgttacttccgtgatctgatcgagcaaagcctcaaccgcacccgggaggccaccctcggcgtgctgggggtgaaccaccagggcctgcgccaccatctcagcgagcagatggtgaacgagctgggcgccgagggctgcttcctggcgccgccggtgttcgagcacaccttcggttgggaagaggccgacgtaaccctgcaggacctgcaaagcggcctgctgtccgaaagcctgctgaacaccctgcactatgcggagaactacgccttctccaaggacagccggccctacaagcaccagctcaaggcgtggaatgtgctgaccagcgagccgccgcgctcggcaatcatcaccagcggcaccggctcgggcaagaccgagtgcttcatggtgccgatcctgaacgacctggttgaagaggtcacccgcacgcgggtgccgctggtgggcgtgcgggcgctgttcctgtacccgctgaacgccctgatcaactcccagcaggagcgtctcgatgcctggacgcgcccctacggcgacaagatccgcttctgcctctacaacggcaagaccgaagagagcgccagcatcatgcgcaaggagcagagcgagaagcccaatcaggtgctctcgcgcgaactgctgcgcaaggaaccggcgccgatcctgatgaccaacgccaccatgctcgagtacatgctggtgcgtcaggtggacagtccgatcctggcgatttcccagcagcaggagtcgctgcgctggatagtactggatgaggcccacacctacgtcggctcgcaggcggcggaaatctcgctgctgctgcgccgtgtggtgcaagcctttggccggcgggccgatcagatccgcttcgtggccacctcggccaccattgcgggcgatgatacgcagaagcagctgcagaagtatctggccgaccttgccggggtgtcgccggatcaggtggacgtgatcagcggctcccgggtctggccggatgtcgtcgacctgatcactggagagaacacctctctggatgagttgctcgacatcgagccggatcgggaggtatcgcctgcccgcttcgaagcccttacccgaaactacctggcgtgcaacctgcgccatgccgtggtgtcgtcaccccgtccgctggacctcaacgagcttatccaggcagtcgcgccgtggctgcgcgggaagaccaacctggagcgccagcaggaagtgctcgcctggctggatcttatgaccggcaccttcgagtcggacgaccaaccgccgttcctcaagctgcgcacccacctgttccagcgcatgctgcatggtctgtgggcctgcgtgaaccccgagtgcagcgccaagtcggagcacctgacggactggccgctcggcaatgtctacgtcaaccagcgctcacactgcgactgccacgccccggtgtacgagctgggcttctgcgccgaatgccgcacgccgcacctggaggcagaggaccgcaacggggtcctgcgccagaagagcccctatgtagacgacgaattctctctgagctacgagagcgacggcgacgaagccgctggcgggaacggccccgccaaggtactgacgcagggcttcgtgttggcccgcaacaaccaccgcaaagccccctacatgccgctcacccttgacctcgacacccagcagctggggctggttggccagggcaactgtatcgagctgtcggtggtcgaggacaagcgagccgagtgcagccactgcacctacagcggctacgagggcgacttcctgcgcaaagcctacctgggtgcgcccttctacgtcgccaacgccgtccccaccgtgctggagttctgccaagacccggacaaggccgactgcgacggcctctcccccgaggagctgcccggccggggtcgcaagctgatcaccttcaccgatagtcgccagggcaccgcccggatggcggtcaagatgcagcaggaagccgaacgctcgcgcctgcgtggcttagtgttcgagaccctgcgcaatgcccaggtcaagagcaacctggcccagccgcagtcctccgaggggcatgccaagctgctggccgccgagatgctcgagaagatggggcaacccgaagctgcggccgagatgcgccgggaagcggagcaggaaatgcaggcccgggtgctggcgcccgtgaagatcgagtggacggacatggtgcgcgaactggccaccaccaatgacatcgggcggtcgatcctcgagtacaaccggtacgccaacccgatgctgttcagcgacagccagggcagtgtcaccatggcccgcctgctgctgacccgcgagttcgcgatcccgcccaagacccagaacagcagtgagacgctgggcttggtgcgggtcgactacaagggcttcgactcgatcaccagcccgccgccaaggtggctggatacgctcgccccgccggccaccgccggcggcgagaagtcgcgcctgaccaaggaggactggcgcgatttcctcaaggtcgcgctggattacttcgtgcgccagaacgccttcctgcgcctggagcgcaacatgcagctgtggatgggcatgaaggccatcaccaagtcgctgttctcgcccaaggcggacgtcgaggaaagcaccactgtgaagaagtggccgcagacacgggccgtcggcaacccgtcgcgcctgatcaagctgctcgagctggggaccaggctcagccggaccagccccgatgacgccagcctgatcgacagctggctggaagccgcctggcaggccctgaccgccgcgcacatcctcgaaccagtggacctgggccaccggctcaagctggaaacgctgatgttctccctgccgaccgaaggctgggtctgcccgctgacgcatcgcatcctcggctccaccttccgcggcctgacaccctacctgccgcgcaacaccgtgggccgtgactaccactgcgagaagatccagctgccggcgctgaccgacctgctggtggacggtagcgccgaatccaggctatcgcagatccgcagccgggttacggcagacccggtgattgccgagctgcgccgtgaaagcctgtggtcgaacctgtgcgaccgggtggtcgagggcggcttctactatcggacagccgagcactcagcccagcagtcggccaagaagctggacgattacgtggagctgttcaagaaggggagagtcaacgtcctgaactgctcgacgaccatggaaatgggcgtggacatcggtggtatctcggcggtggtgatgaacaacgtgccgccgcacccggccaactacctgcagcgcgccggccgtgccggtcgccgccgcgaggcccgggccattgcctacacgctctgcaaggcagacccccacaaccagcgcgccttcgccgagccgaagtggccgttcgtgaccagcatcccggcgccgaacatcaccctcagctctgcccggatcgttcagcgccatgtgaactcgctgctcctgtccctgttcctacgcagcagcaccagcaacgacggcgaccgcacgaaactgaccctgaagtggttcttctcgccgccggaggactcgccgtgcctggcattcaccggctggctggccgtcagccagaaagcgtttgctgatgcagtgaggtcgctggtcgccggcacctgcctggaaggccagccgatcagcgccatcatgacgaacacccgcaacgccatccgcgaactggaagcgcgctggatcagcgagtacgccaagctcaatgccaagctgcaggccgccaccgatgagccgtacaagaaggccctgacgctggagcgccgtcgccacgagaacgagtacctgctgcgtgatcttgccgctcgcgccttcctgccgggctatggcttcccgaccgacgtggtgtcgctcaacacctacaacatcgacgacttcaagaaccagcagaacgagcgcctgcacgccagggacagcagccgcgaggacaacatcttcagccacaaggatctgccgtcgcgcagcctgaacatcgccattcaggaatacgcgccgggctcgcaggtagtgatcgatggccgcgtctatcgctctgccggaatcagtctgcactggcatgccgccgggcaggtgaacgaggcgcagaagttcgatgtcgcctggcgctgcgagaactgcggcgccaccggcctgatcgaaaacgcctacaccaacatggacgacctgaagtgcaactgctgccaggcgtccattccgtcgagccagatcaagacggtgctgcgcccgtccggcttcgtcaccgacttttacgaggaaaccggcaacgacatctccagtcgcaagatgatccgcgtggagcggccccgcatccacctgaaggccgaagtggtggccctgccggacaaacgctgtggcacggtgcgcttcggccataacggtgcggtcttctaccactcatccggcgaacatgagcgcggctacgccgtgtgcatggcgtgcggacgcgcggaatccatgctgcccaccggcgaggtgcccaagagcctgcgcccggatcagatgcaccggccggtcggcgggatcggtgccagccacaaggaaaaggactgctcgggtgcagcagtgaaggccaacttgtacctgggctatcaaatccacacggacgtgctggagctgttcctgaagagcccggccacgggccagtggcttggtgactcgccgacggagcagaccatcgccatgacgctggccgtggccatccgcgacgaaattgccgagcagctcggcatctccagcgacgagatgggctttggcttccgcctggatcgggatctggagagcaatcaggggcgctctgtcgtgcagctcttcgacgacgtgagtgggggcgccggctttgtgctgtcggcggtcaatgacctgggcgggctgctgaagaaggcgctggcgcgcctccattgtccggcctcctgcgacaacgtttgctcgcactgcctggccgggcaggacagccgcgtggagcgcgaggagttggaccgcaagctgacgcaggagtggctggcgagttcagggattatcgcggcgcgggcctaa

SEQ ID NO: 28347 - DNA, 3333 bp, Azotobacter chroococcum NCIMB 8003
gtgctttcgaccacaccgattaagagccctttcaaggcatggctcgccgagtttttactgagccggggcatcgtcaaggagtctactgggaagccgctgtatagttaccaggtcaccgaggccgagtaccactcgctgcgagcgcttttgagcgcgaacatcgccctgatggacaatccggtccatgccgagtatgtggggggctgctttgctctgttcgtcagcgagcagtttcggcgggcctacaatgcctcttggtcttggtcgggcgcagaaggtgaactgggagtttccctgtcaccgacgcagcgcatatacctcgccaagcgcgggctcgactactggaagcggccgatccgggcgcgggagaacggccgcgactggctgggctcactgttcgccgaaggcgggctaccctggcctctggtgcagagcgaggatcacggcttcggtcgtgctgtacgcagcggcatcaagcacttcttccgcaccgagggcaaccgccgcactaccgccgacctgatggcggacttcgagagctacctgccgctggcattccagaatctggagacgcgccagctgcttgccgggattgtcgaccacctgatgttcctggcagggcaatacccgctgaaggatcaggccgatcccgctgcctacctcgacgaggtggctccaagctgggccgatgcgtttccgatcccgctggatgagaccaacggccgcaacctgatcagcacctggctgcaggcagccggtgaacggacgcgcatccgccaggaagccctgctgcgcgccaaagcgttcaccggcgaacacatcctctgcggcaccctgccggcgtggacgatccgcaccgaattgaccctgcccaccgaaacgctgcagccgatcgatgccaacaccttgcggagcatgcgccttgaagtagccttctacgagggcgaccgcatgctggcgcgcggccctgcggtctacggtcagaaggaaggcgcgcagacccggctgcgcttccccaacacgcagatcacacttgagcgccactgcctgcgctccccgctgaatatccggttgctcgacagcggccgggaggttcaccggatcttcatcgaagacagcgcgctagaccaccaggaagcgcccttgatcttcgagccggtcgacggccgctggaagctggtgagcatgtcgagctgcgcactggccggcggcctcgcgcgcattcgcatgccggcgaacttcgaggcagttaccggcagtggcatcgagccccgcctgctcgaactggatgcgcaggacggctggtggctggaggccgccgacagcctttcgctgcgccacggcgccgacctgtaccgcgtcaccctgaatcagggcagcaccgagattgccagacctacgctggaaggtaccctcgccctgtatgaaggcgccccctcgatcatgtatctcggctggccgcatctgagcctgccagagaactacctctatgcgctggaggacctctgcgagttcgccaatggccagctggtgagcgagctgcgccgccagggtgccatcggcgtcatgcgctacaccgtgcgcaacaaggccggcgaaaccctgctgcagcgccgcttcggcgttctgccgcgggaatttggattgacgcagttcccggcctgcaaggatgagcctgcgcgcctgcagatccgcggcgccaacggccttgagctggccgtcgccggcgaggtgcggatagcggggcaggttgccagtgacgataccgtcactctgcaccttcgccataccggcgaagcgccgccggcggggttcacgctggagatccgcatgcggcctgagcacccgccgctgcagcttcgtctggcctatccatatcaaggggcgcgcttgatggaccaggatggcaaggccaccctggtacgcaacctgaccctgaacgatctgccggggctgcgggtcgcactgacttctggcctgccccaggggcaggacttccacatgcggatggagctgatcggcgattccagccagtgtcggagctggcgcatgcagcgcgacttccagatcaaggtcggctacaacccgatcctgctcgacttgttcagctatcaggcgaaaatcctgcaactcctaggcgccgtggacgacaaagaagcctacgtccgtctcggcatcgagactgaaacgcgtctgctgacgctcaacatccagcgctacagtggccgcctgcagcgcgaggggcgaaccctgatcgaggtggtggacgtggctaccggcctggtcactcatgacgcccgaatcgaggcgatgaaccttgccgacccgaagcaaaaacccatcgccctgggggagctgaccagcgaaggcgtgggaaccgggcgcttcgatacggcagactacctgccggagtccggagcctggctgatctacccggccagcgactcctcgaagagctttccggtatgggtccagtccacctacgcgagcagcctgcgcgagcaagacggagcccccaagtccgtggactcgctacacaaggcagccgaggtgttccacccccagctcaatcccggggtgatcgacgagcagatcgcccggatgcaggatgacttcggccacagcggctggcagtacctcgccgacctgaagcagctctacggccatctgccgctgtcctccttcgaaccgtggaaggccctgacccacaacccagaggccctgagcttcgcagtgttccgcctggaaatgaacgaggccttctgcacccgtatggccgacgagttggccgtcatctgggaagcgatccctctgccggtgtgggtaaaggcctaccagcgctacttcgacagcttggcgcagatggggctgcccgaggctgcgatcagcagcctgcagcgcaaccgtgacgccgtattgcgcatgctggtgccgggcttcgattacctgggcgactacctgtccaccggcaatccgaggtccctgatgctggcgccgccggcagccgtcctgccggcctgggtcaacacgctctacagctcgggccgccgcttccccaccgacctgggtagcgaactggcagcctggatcgagcagcagtcgctgcccgccgcggtaaaggggctggccaagagtcattacgccgaggcggtgatctacctgccaatcttcatgggcttcgtgaccgccggcaaggcaaccctggacgatctgcccgtccccctgccctatgccaagttcgtgatccgcaccatttccgactttgaccgtcatgactggtttgccccggtgcacgccctgatgacgtcctacttgctggcctcgacagcctag

SEQ ID NO: 28348 - DNA, 6147 bp, Bacteroides fragilis
atgaatatgaattatttttcattctataataaggccaaggaattgctaatagattctcttgcttctctttggttcaagggtcaagcccgagaacaagaatatatcaagcgggttctgactgaggatgagccactttttgctgagccagtatttcaatcgatattcccttgggaggagagtgtctacagttttgaggcacactcttctaaacttggattgctaacttcttcatttgttaatgcactgagcaacgaaggaattgacaaggatttaagattcccattagacaggcatccttataagcatcagaccgaaagctggagaactatgctctctcctcgaccacagaccattgttgttacctctggaacaggatcgggtaaaactgaatgttttatgattccggtattgcaggacttggctaagaccaatatgaaagattgtgttcaggccattttcctttatcctttgaatgcgctgatgaaaagtcaacagaaacgtattcatgcttggtgcaaagcccttccggaaaaggttacctatgcaatatataatggggaaactgacaaagaaaatcgttctgacagatatactgcacctcattatccacagctcgtaacaagacctcagataaggagaactccgcctcagattctctttaccaatccgactatgctcaactatatgttggtacgagctgaagaccatgaaattttggaaaaatccaaggggaagctcaaatggattcttcttgatgaagcacacacttatatcggctcttcggctgctgaattatcattgcaaatccgacgtgttttggacgcttttggtgtaactattgaccaagtaaattttgctgtaacatcagcgaccatcggggatgagagtgaccccaaaacgatgataaagctaaagactttcgtttctcagctcacgggaaagccattcgaagatataaagatcattgggggcaagcgcattattcctgagctaaataagggaattgcagaagaacaattatccaaaataaacaaaagatttggcatcaggttgacctattctgatattgagagactgcgaaaaaagctcaattcttcgccagtattaaaagtaaaggaaataggtagcatacttgataagaaaatcgggataaatgtggatgcctcattggaaataattgatgctctcggggaaaaagtgaagaatctaaatgaaggaagtggttttggagctttattgccaacccgtgctcatttctttgttcggtcgataagcggagtgtatgtttgtaccaatcccgattgtcagcgtcataagggatatagattaccgataggtagtctgacaacatatcagaatataaactgtccagtttgtaaatcaaagatgctggagcttgccacatgctcgtcttgcggctctcccattgtagtgggtgagacaagcacaactaagggcttcaggatgcacaccaatataattgaccttgacaatacgcttttctatgagcaaaaggaagatctcattgattctgaagatatggaaaatatcgaaaatgttgagcagaatgaggcagatggcttttctcgcttctttttcgccattcctgagaaactatgtctaagaaaaaatgcgacttgtacttctcacattttcaatcatcggaatggcaaaatagaacttgctcctgaaaacaatgaaagcagtaagggtattactcctttggaaagaggagaaagtactcctgtaagatatcaatctcttcgacactcaggagataatcacgttctttgtcctcattgtggtaataatctcagtgagttaaaaaaacttgattatctcagaataagtgctactcagattggacgtactttagcgacattacttcttgacaacgccgaagctattggcagtaatgatgctggcgttgtatatgaaggtcggaagtatatagcatttactgatagccgtcaagggtctgcacgctctgcgatgggacttaatcaggatgtagaacgttcatggattcgagcttccatttttcataagcttgccgacatgcgtttgaacgatgtgaaacccggcggtctgactcctgatgaggaagctgaatataatgcatatctgagcattcggggttgtcttccagccttactccttgaaaaattcaaacaacttgaagaaaaaaagaacggtgtaccagtaatccccagcccggaggaagtgtcgtggtcgcaaataagccaacctcttgaaaatgactctaatttcaggaaattgtacgaacatgttgataaagcacgtggcaggaaaaatttcaggaatgcaacggactatctgaaagcacttcttgtcgatcaattcggatggattcccaagcgcgcgaactctttggaaacaatggggttcgtgcgtcttgtttatccgacacttaaaaatgcgaaatgcccgacacttcttattcagaaaagatgtacggacaccgactggcagaattttctgaagatttgtatggattatgtcattcgtggaggtcgtcattatatgctttctggagcctataaggattatcttacacaaaataagtattgttctcctatatatccttcaaattcagagcttagaaagaatggaaaccctgtatcgaaatggttcaaagtcaacgtcagccaaaaaggtgtcgatgagaatcagaacaggctcgttcttcttctatgtgccgttctcggttatgatgacatttctcaaatcagtcagacgaagattgctgacatcaactcaatgcttgatgctgcatgggatttcctaaaacaaaatgtccttgaagcgacagatgccgaaaaccaagggtatatgctcgatctcaccggtgataaggttaagttgcaacttatcgaaaaaggttacctctgtcctgttgacaacgttattatagatacgccgttctgtggctacagcccaagaatgaatggttacatcggtcgtgagaatttcgatcgattcaaaatccagacggagtttgtcaatccgtttttcccattcaagtttgcggaacagatagaagaaaatgtcacggaatggattgagaagaatctcttcgaccaaaaggccgcgggagtgttcggagttatgaactatagagtacttgcttcaaaaccaatttttatatcggcagaacattcagctcagcagtcgtcagaagaccttgaccgatatgaaaaggagtttaatgagggaaaaatcaatattctttcttgctcaactacaatggagatgggtgtagatattagtggtatcacagaagtcgtgatgaataatgtaccccctaaatcgtcaaactaccttcaacgtgcgggacgtgcaggacgaagaagtgaaactaaagccttggctttaaccgtttgtgcccccaatcctattggaacccatacatggaacaatcctgattatccgattacacatgttacagagaccccgttgttaaaattggaaagccgccagttgattcaacgtcatgtcaatgcgatggtattcgcatcctttgtcgcagatcaagggggaatcagggtcacggcaactcttagggatttctttgttaaggcagaagggatgtctttctatgataagtttctaaattacattgacagcgtaatcagcggaaacgttgaacggcttcaaagagcgtattcaaaattaatcaagggaacaagtcttgctcagataacattgccggatgccgcacaagtagtcaagaaagacatagctgctgttcacaatgtctttgatgctcacaacggtgctttggaaaaggctcttgaatctctgagaaatgaatccgaaacagccaacgctatcaaggctattgagaaacaagaagagaatcttttaaagacttcaatgttgtcctatcttgccgaaaattcttttttgccaagcgccggcatccccataggattagtcgaatgtctactcggaggtaaagaaaaggttgacggcagctcaccgacattgcacataagccaggcaatctcttcttatgctcccggtaatcccgtagtgaaaaacgaatgggtctatgaacccagtggtattcgtcttaagacaaaatacgatgacagcacctcaaggtatatcatacagaattgtactcactgcggctataccactattacctatggaagtgctaaaacggattgtcctaagtgtggtcggcatggaactatgcatggtataaaggacatctcgttgtcgatagagcagcgtttcacagaggtcgttgaacctgcagcattctctgtagcatgggattcgacccctatacgaaaaatgggcactcttggcggtatgaatttcattcagcctattttgcttgaaatggatgcctggcaaccgaagaccaattctgccaaaatgtctatccgttgttcaaccccaaggtctgagatcctcttttataataaaggagcgagtgggtatggatatgctttctgtccttattgcggcagaatgaaatcagaaaaatcaccggactctacagagcggatgatgccgcaccataaacatcttttggcctcaacaccttgcctcggtggtgaaaatgacggtgcagcagtaagacgccacgtgttgttggtcggaagataccagacagactttgtcgagatcaagttccatgataagaacaacaatttgatcgttgactctgagacactctattctctcggtgtgattctaagccgtaagctcacggagttgctcggagtcaacgacggagagattgaattcggttatgatgtcataaatcattctattttcatatacgatactgccctcgggggcgcaggttattcattgcttttccgggaatataaagatgaagtcctgaaaatggctttggaagcgcttgaaagatgtgactgtgaacggtcttgtactaagtgccttatcgaccgcagatcgcaatggtatctgaactatcttaaccgaactaaggctctcgaatggctaagacaggaaattaaggcccgcattgctccaaaggaaattcttcgcttaatacctgattctcacactgtgacatcagacatcacaaccgagttttatcaactcacacggaacaaggacatttcctgtattaaaatatttgttaacgacaacatctctcaatgggatgcggaggcgttcccattcaagaaaattctcacagaactatctcttgaaggcgttgacgttgcctttatactaccaagcgttcccgatgtaaaatcactctcgtcagccgacagtgctactttaattgcagaggtatttaaaaacgactttaaaggccttgaaaacacattgccagcagaattgcttcccttgatggttgtgattatgaatgatggaaccgtcaaaacctactttggtaaaaatattgacacttcctattccaaaaattggggaagcggagatgtattcataaccacccaattaaattcgttgtcctacgccgacataaatcgaatgcaattgttgaacaccttttcatcaggcgatacctccttcatgttcgactatagaataacagaacacagttcgttaggccatttctttgattctctgaagaatccggaagtagagaactggaatagaatagtatccaacctacaaggcaagaccgtttctgttgaatattctgatagatacctaaaaacacccttaggctgtatgctcctagcgaaaatgatttctgggctgaagaatgaagctgatttaaacgtggtgtctatcaaggttatcgtcacaaatatcgtctcaatggatgattcggatgtagcagtaaatgctataaaggatttcaccaacggtgagaagagaaatcttttcctgaagaatgcaatatctgaattgaccggaatagaaccggaaattcaagacactggttatgttgagcatgaacggtgtctgacagttaaagcagataacgcagagctctgcatacgtcccgatgccggtatagcgagaggatgggtgccatttggaagagataacgctgaatgtgccgactgcgatttcagagaagattggaatatggacctcgaactgttcaacaagcagcagagaggagccggaatactctatactatctcatataagcaaccataa

SEQ ID NO: 28349 - DNA, 3198 bp, Bacteroides fragilis
atggctaatatatacaatagcgagcagcatattgccctgatgaaaattttggatgcccgtaacagatcatccataacccctaatatgcccctttggaaacttaaattaactgaggaagaatatacaaacttaaaggagacccttgcccaaaatatatgtcgcttagaagattttggaattgaggcggctttgtgttacgccgaatggtggagaagagactataatggtggaattccttccagagaagatgtcgcagttggattaggactgcctcactattgttgggagcaactatataaggctgcgcgtcagggtcttaaaagtcatggattcgcattcattcactctctcaagggtaatgaatattttagaactttactgaatcaaggaggccttcctgtaaattacataaagaatggaaccaatcttggtgggttttcacgctttctccttggtttggttgaagaattgtcttcaataaatattgattgggatgataataaccttgatttaatcaaaaattttaattgtattgcttatcttgggaaagcgttcaagaatgacaatatttacgatgtttcattacagattgctcatgcaatcatatccgaagaagatcgctggctaccatatgatgacgcggattcctctttgtcggaactgactaaatccctaaaaagagaataccggcgagttaagagtgaacacagaactacaccactttctctaagctggaaactccgtttgacttcggacgaaaccgcgaatctttttgtcaatttgaatgtagtaaaagagatttcatcaaaatctatcgaaggtttggactaccaatcgtgctacaccttcgatgtgtttgttgctgggatacttgttggaaagtatgtaagaaaatccttagttaaggatgacataggagaggttatcggtgcgatatactctcgtgtaactgttggcgtggcaaatgatataaagtggaatggcgagcctgtagttgaagttaagattaggtgtgataacgatgacagattgtttccaacattatgtggcagttatcctccgaatttcgaatgccctcaggttttccaaatgctcgatgataatgtgtattctttgaaaccgacagcgaacgctgaaagtaatatagcagttttctccactgattggaagtgtgatggaaatcacaagctatcactaaatggaaaactttattcagcgattgagtttgctaatcaagtggatttgcacaattgtgtattgaatgaggatatgaccataaccaatgagttcacgccttatagtgctgaattcagaggtacatatatacaatgggttgagcaatctaattttaagttattgactcgtattccggtaataagcgtttttgaccaaactggtatcagagtcggaaatatcaagcctaaatatcgtgttcataatagtaaaactgattggcggaatttgtccaattcatgtcttttgccatttgggcttgtagatattaaggtagaatttcctgacaacaaatacgaggtggagacattttatttcatagacgatatgacttttgtttctcgcaacgaaaggatgttttccacagagttatgtcttgattctcgccatattatgtctgcaaaagttgatgagtgcgaagacttatctgttgaaatgatagataaaaatatatggaggatttccagagatgcctgtgcttctaaatattcacctacatgtaatttgaaaataatggctgagggcaatcctcctttgagaatatctgttgttgcaccatttgagggtatagtaatatctgatttggaaggaaaaattgtgccgtctggaaaaatcatatcttatgataacctgagatattttaatattatcagtcacggacaagctggtatgatagatgtgacttacaaatctgataaaataacggattacgataaaatcaagcatcttaaaagtcccgtaattgaaggtatagttccattatcagattatcgcgatttattcgcaagaatgtttcaattatatggtgcaaatacttttgaccgaagcagttccatagaattgagaatatacgacaaatgcatctatataaggaaatttgttcttgatagtgagttgatctcagataaaattcgaatcacagatgataccaacgaagacacttcggatttcatatatgacggtgatgtttatgcactgccagtttccgaagatataaaaccggccgaattagtacagataaagcttgagtcgtataatcgacaaatgaacttgtttacaattcctgacgagcttttgaattcggaagcaatccttttctctggtcccgaaagttctcgcagactcgttcctaagtattataactttgggcaagaagattacagtttggaagtgcgtagagagaagtctgctactaacataatacattggggtgaaaaacttagcaaagatgatgttttttccggcgaatattggatgaaaacagtaaaggccttccgcattatttccgagtttaatcttccgtttaccacatataatgcattcaaagccataggtcgtgttcctaaattattggttaacctaatattagcctgttggcttaatggtgcttccgatattctcattcaggaaattgaccgttttgaagatgaattaaacattgcagtacattggattccgcgcactgtgtggggagaatgtattgagaatttcatatgtttgcttcctccagaactcagtagtataataacggcaaaattaggcgagattacagaactgataaatggacttttcaatgctacgctatctgcggaagttgcttctgaacttatccattatgttgcggaaggcaatatcggacgtgcccatatcttctcaatatcggacataaatcaatttaagtcaaggatacatgggtatacagataataatatggacctacccctaatccgatttgtgcttcaaaatcaatattatgtagaccaaaagatgctcgtgtcctatcgcgtgatgattgaggctgcaatgtgtgctgcggaaaaccttgcacaagtaaaagattgcataaatcttttttcgttagaaggccgagattatgctcgtattattaatttttaccaaaaatacttcaaagaaacctacagtgagatattcatcggaactgtaaaacaaattgcaagcaaatga

SEQ ID NO: 28350 - DNA, 6147 bp, Bacteroides fragilis 638R
atgaatatgaattatttttcattctataataaggccaaggaattgctaatagattctcttgcttctctttggttcaagggtcaagcccgagaacaagaatatatcaagcgggttctgactgaggatgagccactttttgctgagccagtatttcaatcgatattcccttgggaggagagtgtctacagttttgaggcacactcttctaaacttggattgctaacttcttcatttgttaatgcactgagcaacgaaggaattgacaaggatttaagattcccattagacaggcatccttataagcatcagaccgaaagctggagaactatgctctctcctcgaccacagaccattgttgttacctctggaacaggatcgggtaaaactgaatgttttatgattccggtattgcaggacttggctaagaccaatatgaaagattgtgttcaggccattttcctttatcctttgaatgcgctgatgaaaagtcaacagaaacgtattcatgcttggtgcaaagcccttccggaaaaggttacctatgcaatatataatggggaaactgacaaagaaaatcgttctgacagatatactgcacctcattatccacagctcgtaacaagacctcagataaggagaactccacctcagattctctttaccaatccgactatgctcaactatatgttggtacgagctgaagaccatgaaattttggaaaaatccaaggggaagctcaaatggattcttcttgatgaagcacacacttatatcggctcttcggctgctgaattatcattgcaaatccgacgtgttttggacgcttttggtgtaactattgaccaagtaaattttgctgtaacatcagcgaccatcggggatgagagtgaccccaaaacgatgataaagctaaagactttcgtttctcagctcacgggaaagccattcgaagatataaagatcattgggggcaagcgcattattcctgagctaaataagggaattgcagaagaacaattatccaaaataaacaaaagatttggcatcaggttgacctattctgatattgagagactgcgaaaaaagctcaattcttcgccagtattaaaagtaaaggaaataggtagcatacttgataagaaaatcgggataaatgtggatgcctcattggaaataattgatgctctcggggaaaaagtgaagaatctaaatgaaggaagtggttttggagctttattgccaacccgtgctcatttctttgttcggtcgataagcggagtgtatgtttgtaccaatcccgattgtcagcgtcataagggatatagattaccgataggtagtctgacaacatatcagaatataaactgtccagtttgtaaatcaaagatgctggagcttgccacatgctcgtcttgcggctctcccattgtagtgggtgagacaagcacaactaagggcttcaggatgcacaccaatataattgaccttgacaatacgcttttctatgagcaaaaggaagatctcattgattctgaagatatggaaaatatcgaaaatgttgagcagaatgaggcagatggcttttctcgcttctttttcgccattcctgagaaactatgtctaagaaaaaatgcgacttgtacttctcacattttcaatcatcggaatggcaaaatagaacttgctcctgaaaacaatgaaagcagtaagggtattactcctttggaaagaggagaaagtactcctgtaagatatcaatctcttcgacactcaggagataatcacgttctttgtcctcattgtggtaataatctcagtgagttaaaaaaacttgattatctcagaataagtgctactcagattggacgtactttagcgacattacttcttgacaacgccgaagctattggcagtaatgatgctggcgttgtatatgaaggtcggaagtatatagcatttactgatagccgtcaagggtctgcacgctctgcgatgggacttaatcaggatgtagaacgttcatggattcgagcttccatttttcataagcttgccgacatgcgtttgaacgatgtgaaacccggcggtctgactcctgatgaggaagctgaatataatgcatatctgagcattcggggttgtcttccagccttactccttgaaaaattcaaacaacttgaagaaaaaaagaacggtgtaccagtaatccccagcccggaggaagtgtcgtggtcgcaaataagccaacctcttgaaaatgactctaatttcaggaaattgtacgaacatgttgataaagcacgtggcaggaaaaatttcaggaatgcaacggactatctgaaagcacttcttgtcgatcaattcggatggattcccaagcgcgcgaactctttggaaacaatggggttcgtgcgtcttgtttatccgacacttaaaaatgcgaaatgcccgacacttcttattcagaaaagatgtacggacaccgactggcagaattttctgaagatttgtatggattatgtcattcgtggaggtcgtcattatatgctttctggagcctataaggattatcttacacaaaataagtattgttctcctatatatccttcaaattcagagcttagaaagaatggaaaccctgtatcgaaatggttcaaagtcaacgtcagccaaaaaggtgtcgatgagaatcagaacaggctcgttcttcttctatgtgccgttctcggttatgatgacatttctcaaatcagtcagacgaagattgctgacatcaactcaatgcttgatgctgcatgggatttcctaaaacaaaatgtccttgaagcgacagatgccgaaaaccaagggtatatgctcgatctcaccggtgataaggttaagttgcaacttatcgaaaaaggttacctctgtcctgttgacaacgttattatagatacgccgttctgtggctacagcccaagaatgaatggttacatcggtcgtgagaatttcgatcgattcaaaatccagacggagtttgtcaatccgtttttcccattcaagtttgcggaacagatagaagaaaatgtcacggaatggattgagaagaatctcttcgaccaaaaggccgcgggagtgttcggagttatgaactatagagtacttgcttcaaaaccaatttttatatcggcagaacattcagctcagcagtcgtcagaagaccttgaccgatatgaaaaggagtttaatgagggaaaaatcaatattctttcttgctcaactacaatggagatgggtgtagatattagtggtatcacagaagtcgtgatgaataatgtaccccctaaatcgtcaaactaccttcaacgtgcgggacgtgcaggacgaagaagtgaaactaaagccttggctttaaccgtttgtgcccccaatcctattggaacccatacatggaacaatcctgattatccgattacacatgttacagagaccccgttgttaaaattggaaagccgccagttgattcaacgtcatgtcaatgcgatggtattcgcatcctttgtcgcagatcaagggggaatcagggtcacggcaactcttagggatttctttgttaaggcagaagggatgtctttctatgataagtttctaaattacattgacagcgtaatcagcggaaacgttgaacggcttcaaagagcgtattcaaaattaatcaagggaacaagtcttgctcagataacattgccggatgccgcacaagtagtcaagaaagacatagctgctgttcacaatgtctttgatgctcacaacggtgctttggaaaaggctcttgaatctctgagaaatgaatccgaaacagccaacgctatcaaggctattgagaaacaagaagagaatcttttaaagacttcaatgttgtcctatcttgccgaaaattcttttttgccaagcgccggcatccccataggattagtcgaatgtctactcggaggtaaagaaaaggttgacggcagctcaccgacattgcacataagccaggcaatctcttcttatgctcccggtaatcccgtagtgaaaaacgaatgggtctatgaacccagtggtattcgtcttaagacaaaatacgatgacagcacctcaaggtatatcatacagaattgtactcactgcggctataccactattacctatggaagtgctaaaacggattgtcctaagtgtggtcggcatggaactatgcatggtataaaggacatctcgttgtcgatagagcagcgtttcacagaggtcgttgaacctgcagcattctctgtagcatgggattcgacccctatacgaaaaatgggcactcttggcggtatgaatttcattcagcctattttgcttgaaatggatgcctggcaaccgaagaccaattctgccaaaatgtctatccgttgttcaaccccaaggtctgagatcctcttttataataaaggagcgagtgggtatggatatgctttctgtccttattgcggcagaatgaaatcagaaaaatcaccggactctacagagcggatgatgccgcaccataaacatcttttggcctcaacaccttgcctcggtggtgaaaatgacggtgcagcagtaagacgccacgtgttgttggtcggaagataccagacagactttgtcgagatcaagttccatgataagaacaacaatttgatcgaagactctgagacactctattctctcggtgtgattctaagccgtaagctcacggagttgctcggagtcaacgacggagagattgaattcggttatgatgtcataaatcattctattttcatatacgatactgccctcgggggcgcaggttattcattgcttttccgggaatataaagatgaagtcctgaaaatggctttggaagcgcttgaaagatgtgactgtgaacggtcttgtactaagtgccttatcgaccgcagatcgcaatggtatctgaactatcttaaccgaactaaggctctcgaatggctaagacaggaaattaaggcccgcattgctccaaaggagattcttcgcttaatacctgattctcacactgtgacatcagacatcacaaccgagttttatcaactcacacggaacaaggacatttcctgtattaaaatatttgttaacgacaacatctctcaatgggatgcggaggcgttcccattcaagaaaattctcacagaactatctcttgaaggcgttgacgttgcctttatactaccaagcgttcccgatgtaaaatcactctcgtcagccgacagtgctactttaattgcagaggtatttaaaaacgactttaaaggccttgaaaacacattgccagcagaattgcttcccttgatggttgtgattatgaatgatggaaccgtcaaaacctactttggtaaaaatattgacacttcctattccaaaaattggggaagcggagatgtattcataaccacccaattaaattcgttgtcctacgccgacataaatcgaatgcaattgttgaacaccttttcatcaggcgatacctccttcatgttcgactatagaataacagaacacagttcgttaggccatttctttgattctctgaagaatccggaagtagagaactggaatagaatagtatccaacctacaaggcaagaccgtttctgttgaatattctgatagatacctaaaaacacccttaggctgtatgctcctagcgaaaatgatttctgggctgaagaatgaagctgatttaaacgtggtgtctatcaaggttatcgtcacaaatatcgtctcaatggatgattcggatgtagcagtaaatgctataaaggatttcaccaacggtgagaagagaaatcttttcctgaagaatgcaatatctgaattgaccggaatagaaccggaaattcaagacactggttatgttgagcatgaacggtgtctgacagttaaagcagataacgcagagctctgcatacgtcccgatgccggtatagcgagaggatgggtgccatttggaagagataacgctgaatgtgccgactgcgatttcagagaagattggaatatggacctcgaactgttcaacaagcagcagagaggagccggaatactctatactatctcatataagcaaccataa

SEQ ID NO: 28351 - DNA, 3198 bp, Bacteroides fragilis 638R
atggctaatatatacaatagcgagcagcatattgccctgatgaaaattttggatgcccgtaacagatcatccataacccctaatatgcccctttggaaacttaaattaactgaggaagaatatacaaacttaaaggagacccttgcccaaaatatatgtcgcttagaagattttggaattgaggcggctttgtgttacgccgaatggtggagaagagactataatggtggaattccttccagagaagatgtcgcagttggattaggactgcctcactattgttgggagcaactatataaggctgcgcgtcagggtcttaaaagtcatggattcgcattcattcactctctcaagggtaatgaatattttagaactttactgaatcaaggaggccttcctgtaaattacataaagaatggaaccaatcttggtgggttttcacgctttctccttggtttggttgaagaattgtcttcaataaatattgattgggatgataataaccttgatttaatcaaaaattttaattgtattgcttatcttgggaaagcgttcaagaatgacaatatttacgatgtttcattacagattgctcatgcaatcatatccgaagaagatcgctggctaccatatgatgacgcggattcctctttgtcggaactgactaaatccctaaaaagagaataccggcgagttaagagtgaacacagaactacaccactttctctaagctggaaactccgtttgacttcggacgaaaccgcgaatctttttgtcaatttgaatgtagtaaaagagatttcatcaaaatctatcgaaggtttggactaccaatcgtgctacaccttcgatgtgtttgttgctgggatacttgttggaaagtatgtaagaaaatccttagttaaggatgacataggagaggttatcggtgcgatatactctcgtgtaactgttggcgtggcaaatgatataaagtggaatggcgagcctgtagttgaagttaagattaggtgtgataacgatgacagattgtttccaacattatgtggcagttatcctccgaatttcgaatgccctcaggttttccaaatgctcgatgataatgtgtattctttgaaaccgacagcgaacgctgaaagtaatatagcagttttctccactgattggaagtgtgatggaagtcacaagctatcactaaatggaaaactttattcagcgattgagtttgctaatcaagtggatttgcacaattgtgtattgaatgaggatatgaccataaccaatgagttcacgccttatagtgctgaattcagaggtacatatatacaatgggttgagcaatctaattttaagttattgactcgtattccggtaataagcgtttttgaccaaactggtatcagagtcggaaatatcaagcctaaatatcgtgttcataatagtaaaactgattggcggaatttgtccaattcatgtcttttgccatttgggcttgtagatattaaggtagaatttcctgacaacaaatacgaggtggagacattttatttcatagacgatatgacttttgtttctcgcaacgaaaggatgttttccacagagttatgtcttgattctcgccatattatgtctgcaaaagttgatgagtgcgaagacttatctgttgaaatgatagataaaaatatatggaggatttccagagatgcctgtgcttctaaatattcacctacatgtaatttgaaaataatggctgagggcaatcctcctttgagaatatctgttgttgcaccatttgagggtatagtaatatctgatttggaaggaaaaattgtgccgtctggaaaaatcatatcttatgataacctgagatattttaatattatcagtcacggacaagctggtatgatagatgtgacttacaaatctgataaaataacggattacgataaaatcaagcatcttaaaagtcccgtaattgaaggtatagttccattatcagattatcgcgatttattcgcaagaatgtttcaattatatggtgcaaatacttttgaccgaagcagttccatagaattgagaatatacgacaaatgcatctatataaggaaatttgttcttgatagtgagttgatctcagataaaattcgaatcacagatgataccaacgaagacacttcggatttcatatatgacggtgatgtttatgcactgccagtttccgaagatataaaaccggccgaattagtacagataaagcttgagtcgtataatcgacaaatgaacttgtttacaattcctgacgagcttttgaattcggaagcaatccttttctctggtcccgaaagttctcgcagactcgttcctaagtattataactttgggcaagaagattacagtttggaagtgcgtagagagaagtctgctactaacataatacattggggtgaaaaacttagcaaagatgatgttttttccggcgaatattggatgaaaacagtaaaggccttccgcattatttccgagtttaatcttccgtttaccacatataatgcattcaaagccataggtcgtgttcctaaattattggttaacctaatattagcctgttggcttaatggtgcttccgatattctcattcaggaaattgaccgttttgaagatgaattaaacattgcagtacattggattccgcgcactgtgtggggagaatgtattgagaatttcatatgtttgcttcctccagaactcagtagtataataacggcaaaattaggcgagattacagaactgataaatggacttttcaatgctacgctatctgcggaagttgcttctgaacttatccattatgttgcggaaggcaatatcggacgtgcccatatcttctcaatatcggacataaatcaatttaagtcaaggatacatgggtatacagataataatatggacctacccctaatccgatttgtgcttcaaaatcaatattatgtagaccaaaagatgctcgtgtcctatcgcgtgatgattgaggctgcaatgtgtgctgcggaaaaccttgcacaagtaaaagattgcataaatcttttttcgttagaaggccgagattatgctcgtattattaatttttaccaaaaatacttcaaagaaacctacagtgagatattcatcggaactgtaaaacaaattgcaagcaaatga

SEQ ID NO: 28352 - DNA, 6141 bp, Bacteroides fragilis str. 1009-4-F #10
atgaattatttttcattctataataaggccaaggaattgctaatagattctcttgcttctctttggttcaagggtcaagcccgagaacaagaatatatcaagcgggttctgactgaggatgagccactttttgctgagccagtatttcaatcgatattcccttgggaggagagtgtctacagttttgaggcacactcttctaaacttggattgctaacttcttcatttgttaatgcactgagcaacgaaggaattgacaaggatttaagattcccattagacaggcatccttataagcatcagaccgaaagctggagaactatgctctctcctcgaccacagaccattgttgttacctctggaacaggatcgggtaaaactgaatgttttatgattccggtattgcaggacttggctaagaccaatatgaaagattgtgttcaggccattttcctttatcctttgaatgcgctgatgaaaagtcagcagaaacgtattcatgcttggtgcaaagcccttccggaaaaggttacctatgcaatatataatggggaaactgacaaagaaaatcgttctgacagatatactgcacctcattatccacagctcgtaacaagacctcagataaggagaactccacctcagattctctttaccaatccgactatgctcaactatatgttggtacgagctgaagaccatgaaattttggaaaaatccaaggggaagctcaaatggattcttcttgatgaagcacacacttatatcggctcttcggctgctgaattatcattgcaaatccgacgtgttttggacgcttttggtgtaactattgaccaagtaaattttgctgtaacatcagcgaccatcggggatgagagtgaccccaaaacgatgataaagctaaagactttcgtttctcagctcacgggaaagccattcgaagatataaagatcattgggggcaagcgcattattcctgagctaaataagggaattgcagaagaacaattatccaaaataaacaaaagatttggcatcaggttgacctattctgatattgagagactgcgaaaaaagctcaattcttcgccagtattaaaagtaaaggaaataggtagcatacttgataagaaaatcgggataaatgtggatgcctcattggaaataattgatgctctcggggaaaaagtgaagaatctaaatgaaggaagtggttttggagctttattgccaacccgtgctcatttctttgttcggtcgataagcggagtgtatgtttgtaccaatcccgattgtcagcgtcataagggatatagattaccgataggtagtctgacaacatatcagaatataaactgtccagtttgtaaatcaaagatgctggagcttgccacatgctcgtcttgcggctctcccattgtagtgggtgagacaagcacaactaagggcttcaggatgcacaccaatataattgaccttgacaatacgcttttctatgagcaaaaggaagatctcattgattctgaagatatggaaaatatcgaaaatgttgagcagaatgaggcagatggcttttctcgcttctttttcgccattcctgagaaactatgtctaagaaaaaatgcgacttgtacttctcacattttcaatcatcggaatggcaaaatagaacttgctcctgaaaacaatgaaagcagtaagggtattactcctttggaaagaggagaaagtactcctgtaagatatcaatctcttcgacactcaggagataatcacgttctttgtcctcattgtggtaataatctcagtgagttaaaaaaacttgattatctcagaataagtgctactcagattggacgtactttagcgacattacttcttgacaacgccgaagctattggcagtaatgatgctggcgttgtatatgaaggtcggaagtatatagcatttactgatagccgtcaagggtctgcacgctctgcgatgggacttaatcaggatgtagaacgttcatggattcgagcttccatttttcataagcttgccgacatgcgtttgaacgatgtgaaacccggcggtctgactcctgatgaggaagctgaatataatgcatatctgagcattcggggttgtcttccagccttactccttgaaaaattcaaacaacttgaagagaaaaagaacggtgtaccagtaatccccagcccggaggaagtgtcgtggtcgcaaataagccaacctcttgaaaatgactctaatttcaggaaattgtacgaacatgttgataaagcacgtggcaggaaaaatttcaggaatgcaacggactatctgaaagcacttcttgtcgatcaattcggatggattcccaagcgcgcgaactctttggaaacaatggggttcgtgcgtcttgtttatccgacacttaaaaatgcgaaatgcccgacacttcttattcagaaaagatgtacggacaccgactggcagaattttctgaagatttgtatggattatgtcattcgtggaggtcgtcattatatgctttctggagcctataaggattatcttacacaaaataagtattgttctcctatatatccttcaaattcagagcttagaaagaatggaaaccctgtatcgaaatggttcaaagtcaacgtcagccaaaaaggtgtcgatgagaatcagaacaggctcgttcttcttctatgtgccgttctcggttatgatgacatttctcaaatcagtcagacgaagattgctgacatcaactcaatgcttgatgctgcatgggatttcctaaaacaaaatgtccttgaagcgacagatgccgaaaaccaagggtatatgctcgatctcaccggtgataaggttaagttgcaacttatcgaaaaaggttacctctgtcctgttgacaacgttattatagatacgccgttctgtggctacagcccaagaatgaatggttacatcggtcgtgagaatttcgatcgattcaaaatccagacggagtttgtcaatccgtttttcccattcaagtttgcggaacagatagaagaaaatgtcacggaatggattgagaagaatctcttcgaccaaaaggccgcgggagtgttcggagttatgaactatagagtacttgcttcaaaaccaatttttatatcggcagaacattcagctcagcagtcgtcagaagaccttgaccgatatgaaaaggagtttaatgagggaaaaatcaatattctttcttgctcaactacaatggagatgggtgtagatattagtggtatcacagaagtcgtgatgaataatgtaccccctaaatcgtcaaactaccttcaacgtgcgggacgtgcaggacgaagaagtgaaactaaagccttggctttaaccgtttgtgcccccaatcctattggaacccatacatggaacaatcctgattatccgattacacatgttacagagaccccgttgttaaaattggaaagccgccagttgattcaacgtcatgtcaatgcgatggtattcgcatcctttgtcgcagatcaagggggaatcagggtcacggcaactcttagggatttctttgttaaggcagaagggatgtctttctatgataagtttctaaattacattgacagcgtaatcagcggaaacgttgaacggcttcaaagagcgtattcaaaattaatcaagggaacaagtcttgctcagataacattgccggatgccgcacaagtagtcaagaaagacatagctgctgttcacaatgtctttgatgctcacaacggtgctttggaaaaggctcttgaatctctgagaaatgaatccgaaacagccaacgctatcaaggctattgagaaacaagaagagaatcttttaaagacttcaatgttgtcctatcttgccgaaaattcttttttgccaagcgccggcatccccataggattagtcgaatgtctactcggaggtaaagaaaaggttgacggcagctcaccgacattgcacataagccaggcaatctcttcttatgctcccggtaatcccgtagtgaaaaacgaatgggtctatgaacccagtggtattcgtcttaagacaaaatacgatgacagcacctcaaggtatatcatacagaattgtactcactgcggctataccactattacctatggaagtgctaaaacggattgtcctaagtgtggtcggcatggaactatgcatggtataaaggacatctcgttgtcgatagagcagcgtttcacagaggtcgttgaacctgcagcattctctgtagcatgggattcgacccctatacgaaaaatgggcactcttggcggtatgaatttcattcagcctattttgcttgaaatggatgcctggcaaccgaagaccaattctgccaaaatgtctatccgttgttcaaccccaaggtctgagatcctcttttataataaaggagcgagtgggtatggatatgctttctgtccttattgcggcagaatgaaatcagaaaaatcaccggactctacagagcggatgatgccgcaccataaacatcttttggcctcaacaccttgcctcggtggtgaaaatgacggtgcagcagtaagacgccacgtgttgttggtcggaagataccagacagactttgtcgagatcaagttccatgataagaacaacaatttgatcgaagactctgagacactctattctctcggtgtgattctaagccgtaagctcacggagttgctcggagtcaacgacggagagattgaattcggttatgatgtcataaatcattctattttcatatacgatactgccctcgggggcgcaggttattcattgcttttccgggaatataaagatgaagtcctgaaaatggctttggaagcgcttgaaagatgtgactgtgaacggtcttgtactaagtgccttatcgaccgcagatcgcaatggtatctgaactatcttaaccgaactaaggctctcgaatggctaagacaggaaattaaggcccgcattgctccaaaggaaattcttcgcttaatacctgattctcacactgtgacatcagacatcacaaccgagttttatcaactcacacggaacaaggacatttcctgtattaaaatatttgttaacgacaacatctctcaatgggatgcggaggcgttcccattcaagaaaattctcacagaactatctcttgaaggcgttgacgttgcctttatactaccaagcgttcccgatgtaaaatcactctcgtcagccgacagtgctactttaattgcagaggtatttaaaaacgactttaaaggccttgaaaacacattgccagcagaattgcttcccttgatggttgtgattatgaatgatggaaccgtcaaaacctactttggtaaaaatattgacacttcctattccaaaaattggggaagcggagatgtattcataaccacccaattaaattcgttgtcctacgccgacataaatcgaatgcaattgttgaacaccttttcatcaggcgatacctccttcatgttcgactatagaataacagaacacagttcgttaggccatttctttgattctctgaagaatccggaagtagagaactggaatagaatagtatccaacctacaaggcaagaccgtttctgttgaatattctgatagatacctaaaaacacccttaggctgtatgctcctagcgaaaatgatttctgggctgaagaatgaagctgatttaaacgtggtgtctatcaaggttatcgtcacaaatatcgtctcaatggatgattcggatgtagcagtaaatgctataaaggatttcaccaacggtgagaagagaaatcttttcctgaagaatgcaatatctgaattgaccggaatagaaccggaaattcaagacactggttatgttgagcatgaacggtgtctgacagttaaagcagataacgcagagctctgcatacgtcccgatgccggtatagcgagaggatgggtgccatttggaagagataacgctgaatgtgccgactgcgatttcagagaagattggaatatggacctcgaactgttcaacaagcagcagagaggagccggaatactctatactatctcatataagcaaccataa

SEQ ID NO: 28353 - DNA, 3198 bp, Bacteroides fragilis str. 1009-4-F #10
atggctaatatatacaatagcgagcagcatattgccctgatgaaaattttggatgcccgtaacagatcatccataacccctaatatgcccctttggaaacttaaattaactgaggaagaatatacaaacttaaaggagacccttgcccaaaatatatgtcgcttagaagattttggaattgaggcggctttgtgttacgccgaatggtggagaagagactataatggtggaattccttccagagaagatgtcgcagttggattaggactgcctcactattgttgggagcaactatataaggctgcgcgtcagggtcttaaaagtcatggattcgcattcattcactctctcaagggtaatgaatattttagaactttactgaatcaaggaggccttcctgtaaattacataaagaatggaaccaatcttggtgggttttcacgctttctccttggtttggttgaagaattgtcttcaataaatattgattgggatgataataaccttgatttaatcaaaaattttaattgtattgcttatcttgggaaagcgttcaagaatgacaatatttacgatgtttcattacagattgctcatgcaatcatatccgaagaagatcgctggctaccatatgatgacgcggattcctctttgtcggaactgactaaatccctaaaaagagaataccggcgagttaagagtgaacacagaactacaccactttctctaagctggaaactccgtttgacttcggacgaaaccgcgaatctttttgtcaatttgaatgtagtaaaagagatttcatcaaaatctatcgaaggtttggactaccaatcgtgctacaccttcgatgtgtttgttgctgggatacttgttggaaagtatgtaagaaaatccttagttaaggatgacataggagaggttatcggtgcgatatactctcgtgtaactgttggcgtggcaaatgatataaagtggaatggcgagcctgtagttgaagttaagattaggtgtgataacgatgacagattgtttccaacattatgtggcagttatcctccgaatttcgaatgccctcaggttttccaaatgctcgatgataatgtgtattctttgaaaccgacagcgaacgctgaaagtaatatagcagttttctccactgattggaagtgtgatggaagtcacaagctatcactaaatggaaaactttattcagcgattgagtttgctaatcaagtggatttgcacaattgtgtattgaatgaggatatgaccataaccaatgagttcacgccttatagtgctgaattcagaggtacatatatacaatgggttgagcaatctaattttaagttattgactcgtattccggtaataagcgtttttgaccaaactggtatcagagtaggaaatatcaagcctaaatatcgtgttcataatagtaaaactgattggcggaatttgtccaattcatgtcttttgccatttgggcttgtagatattaaggtagaatttcctgacaacaaatacgaggtggagacattttatttcatagacgatatgacttttgtttctcgcaacgaaaggatgttttccacagagttatgtcttgattctcgccatattatctctgcaaaagttgatgagtgcgaagacttatctgttgaaatgatagataaaaatatatggaagatttccagagatgcctgtgcttctaaatattcacctacatgtaatttgaaaataatggctgagggcaatcctcctttgagaatatctgttgttgcaccatttgagggtatagtaatatctgatttggaaggaaaaattgtgccgtctggaaaaatcatatcttatgataacctgagatattttaatattatcagtcacggacaagctggtatgatagatgtgacttacaaatctgataaaataacggattacgataaaatcaagcatcttaaaagtcccgtaattgaaggtatagttccattatcagattatcgcgatttattcgcaagaatgtttcaattatatggtgcaaatacttttgaccgaagcagttccatagaattgagaatatacgacaaatgcatctatataaggaaatttgttcttgatagtgagttgatctcagataaaattcgaatcacagatgataccaacgaagacacttcggatttcatatatgacggtgatgtttatgcactgccagtttccgaagatataaaaccggccgaattagtacagataaagcttgagtcgtataatcgacaaatgaacttgtttacaattcctgacgagcttttgaattcggaagcaatccttttctctggtcccgaaagttctcgcagactcgttcctaagtattataactttgggcaagaagattacagtttggaagtgcgtagagagaagtctgctactaacataatacattggggtgaaaaacttagcaaagatgatgttttttccggcgaatattggatgaaaacagtaaaggccttccgcattatttccgagtttaatcttccgtttaccacatataatgcattcaaagccataggtcgtgttcctaaattattggttaacctaatattagcctgttggcttaatggtgcttccgatattctcattcaggaaattgaccgttttgaagatgaattaaacattgcagtacattggattccgcgcactgtgtggggagaatgtattgagaatttcatatgtttgcttcctccagaactcagtagtataataacggcaaaattaggcgagattacagaactgataaatggacttttcaatgctacgctatctgcggaagttgcttctgaacttatccattatgttgcggaaggcaatatcggacgtgcccatatcttctcaatatcggacataaatcaatttaagtcaaggatacatgggtatacagataataatatggacctacccctaatccgatttgtgcttcaaaatcaatattatgtagaccaaaagatgctcgtgtcctatcgcgtgatgattgaggctgcaatgtgtgctgcggaaaaccttgcacaagtaaaagattgtataaatcttttttcgttagaaggccgagattatgctcgtattattaatttttaccaaaaatacttcaaagaaacctacagtgagatattcatcggaactgtaaaacaaattgcaagcaaatga

SEQ ID NO: 28354 - DNA, 6147 bp, Bacteroides fragilis str. 1009-4-F #7
atgaatatgaattatttttcattctataataaggccaaggaattgctaatagattctcttgcttctctttggttcaagggtcaagcccgagaacaagaatatatcaagcgggttctgactgaggatgagccactttttgctgagccagtatttcaatcgatattcccttgggaggagagtgtctacagttttgaggcacactcttctaaacttggattgctaacttcttcatttgttaatgcactgagcaacgaaggaattgacaaggatttaagattcccattagacaggcatccttataagcatcagaccgaaagctggagaactatgctctctcctcgaccacagaccattgttgttacctctggaacaggatcgggtaaaactgaatgttttatgattccggtattgcaggacttggctaagaccaatatgaaagattgtgttcaggccattttcctttatcctttgaatgcgctgatgaaaagtcagcagaaacgtattcatgcttggtgcaaagcccttccggaaaaggttacctatgcaatatataatggggaaactgacaaagaaaatcgttctgacagatatactgcacctcattatccacagctcgtaacaagacctcagataaggagaactccacctcagattctctttaccaatccgactatgctcaactatatgttggtacgagctgaagaccatgaaattttggaaaaatccaaggggaagctcaaatggattcttcttgatgaagcacacacttatatcggctcttcggctgctgaattatcattgcaaatccgacgtgttttggacgcttttggtgtaactattgaccaagtaaattttgctgtaacatcagcgaccatcggggatgagagtgaccccaaaacgatgataaagctaaagactttcgtttctcagctcacgggaaagccattcgaagatataaagatcattgggggcaagcgcattattcctgagctaaataagggaattgcagaagaacaattatccaaaataaacaaaagatttggcatcaggttgacctattctgatattgagagactgcgaaaaaagctcaattcttcgccagtattaaaagtaaaggaaataggtagcatacttgataagaaaatcgggataaatgtggatgcctcattggaaataattgatgctctcggggaaaaagtgaagaatctaaatgaaggaagtggttttggagctttattgccaacccgtgctcatttctttgttcggtcgataagcggagtgtatgtttgtaccaatcccgattgtcagcgtcataagggatatagattaccgataggtagtctgacaacatatcagaatataaactgtccagtttgtaaatcaaagatgctggagcttgccacatgctcgtcttgcggctctcccattgtagtgggtgagacaagcacaactaagggcttcaggatgcacaccaatataattgaccttgacaatacgcttttctatgagcaaaaggaagatctcattgattctgaagatatggaaaatatcgaaaatgttgagcagaatgaggcagatggcttttctcgcttctttttcgccattcctgagaaactatgtctaagaaaaaatgcgacttgtacttctcacattttcaatcatcggaatggcaaaatagaacttgctcctgaaaacaatgaaagcagtaagggtattactcctttggaaagaggagaaagtactcctgtaagatatcaatctcttcgacactcaggagataatcacgttctttgtcctcattgtggtaataatctcagtgagttaaaaaaacttgattatctcagaataagtgctactcagattggacgtactttagcgacattacttcttgacaacgccgaagctattggcagtaatgatgctggcgttgtatatgaaggtcggaagtatatagcatttactgatagccgtcaagggtctgcacgctctgcgatgggacttaatcaggatgtagaacgttcatggattcgagcttccatttttcataagcttgccgacatgcgtttgaacgatgtgaaacccggcggtctgactcctgatgaggaagctgaatataatgcatatctgagcattcggggttgtcttccagccttactccttgaaaaattcaaacaacttgaagagaaaaagaacggtgtaccagtaatccccagcccggaggaagtgtcgtggtcgcaaataagccaacctcttgaaaatgactctaatttcaggaaattgtacgaacatgttgataaagcacgtggcaggaaaaatttcaggaatgcaacggactatctgaaagcacttcttgtcgatcaattcggatggattcccaagcgcgcgaactctttggaaacaatggggttcgtgcgtcttgtttatccgacacttaaaaatgcgaaatgcccgacacttcttattcagaaaagatgtacggacaccgactggcagaattttctgaagatttgtatggattatgtcattcgtggaggtcgtcattatatgctttctggagcctataaggattatcttacacaaaataagtattgttctcctatatatccttcaaattcagagcttagaaagaatggaaaccctgtatcgaaatggttcaaagtcaacgtcagccaaaaaggtgtcgatgagaatcagaacaggctcgttcttcttctatgtgccgttctcggttatgatgacatttctcaaatcagtcagacgaagattgctgacatcaactcaatgcttgatgctgcatgggatttcctaaaacaaaatgtccttgaagcgacagatgccgaaaaccaagggtatatgctcgatctcaccggtgataaggttaagttgcaacttatcgaaaaaggttacctctgtcctgttgacaacgttattatagatacgccgttctgtggctacagcccaagaatgaatggttacatcggtcgtgagaatttcgatcgattcaaaatccagacggagtttgtcaatccgtttttcccattcaagtttgcggaacagatagaagaaaatgtcacggaatggattgagaagaatctcttcgaccaaaaggccgcgggagtgttcggagttatgaactatagagtacttgcttcaaaaccaatttttatatcggcagaacattcagctcagcagtcgtcagaagaccttgaccgatatgaaaaggagtttaatgagggaaaaatcaatattctttcttgctcaactacaatggagatgggtgtagatattagtggtatcacagaagtcgtgatgaataatgtaccccctaaatcgtcaaactaccttcaacgtgcgggacgtgcaggacgaagaagtgaaactaaagccttggctttaaccgtttgtgcccccaatcctattggaacccatacatggaacaatcctgattatccgattacacatgttacagagaccccgttgttaaaattggaaagccgccagttgattcaacgtcatgtcaatgcgatggtattcgcatcctttgtcgcagatcaagggggaatcagggtcacggcaactcttagggatttctttgttaaggcagaagggatgtctttctatgataagtttctaaattacattgacagcgtaatcagcggaaacgttgaacggcttcaaagagcgtattcaaaattaatcaagggaacaagtcttgctcagataacattgccggatgccgcacaagtagtcaagaaagacatagctgctgttcacaatgtctttgatgctcacaacggtgctttggaaaaggctcttgaatctctgagaaatgaatccgaaacagccaacgctatcaaggctattgagaaacaagaagagaatcttttaaagacttcaatgttgtcctatcttgccgaaaattcttttttgccaagcgccggcatccccataggattagtcgaatgtctactcggaggtaaagaaaaggttgacggcagctcaccgacattgcacataagccaggcaatctcttcttatgctcccggtaatcccgtagtgaaaaacgaatgggtctatgaacccagtggtattcgtcttaagacaaaatacgatgacagcacctcaaggtatatcatacagaattgtactcactgcggctataccactattacctatggaagtgctaaaacggattgtcctaagtgtggtcggcatggaactatgcatggtataaaggacatctcgttgtcgatagagcagcgtttcacagaggtcgttgaacctgcagcattctctgtagcatgggattcgacccctatacgaaaaatgggcactcttggcggtatgaatttcattcagcctattttgcttgaaatggatgcctggcaaccgaagaccaattctgccaaaatgtctatccgttgttcaaccccaaggtctgagatcctcttttataataaaggagcgagtgggtatggatatgctttctgtccttattgcggcagaatgaaatcagaaaaatcaccggactctacagagcggatgatgccgcaccataaacatcttttggcctcaacaccttgcctcggtggtgaaaatgacggtgcagcagtaagacgccacgtgttgttggtcggaagataccagacagactttgtcgagatcaagttccatgataagaacaacaatttgatcgaagactctgagacactctattctctcggtgtgattctaagccgtaagctcacggagttgctcggagtcaacgacggagagattgaattcggttatgatgtcataaatcattctattttcatatacgatactgccctcgggggcgcaggttattcattgcttttccgggaatataaagatgaagtcctgaaaatggctttggaagcgcttgaaagatgtgactgtgaacggtcttgtactaagtgccttatcgaccgcagatcgcaatggtatctgaactatcttaaccgaactaaggctctcgaatggctaagacaggaaattaaggcccgcattgctccaaaggaaattcttcgcttaatacctgattctcacactgtgacatcagacatcacaaccgagttttatcaactcacacggaacaaggacatttcctgtattaaaatatttgttaacgacaacatctctcaatgggatgcggaggcgttcccattcaagaaaattctcacagaactatctcttgaaggcgttgacgttgcctttatactaccaagcgttcccgatgtaaaatcactctcgtcagccgacagtgctactttaattgcagaggtatttaaaaacgactttaaaggccttgaaaacacattgccagcagaattgcttcccttgatggttgtgattatgaatgatggaaccgtcaaaacctactttggtaaaaatattgacacttcctattccaaaaattggggaagcggagatgtattcataaccacccaattaaattcgttgtcctacgccgacataaatcgaatgcaattgttgaacaccttttcatcaggcgatacctccttcatgttcgactatagaataacagaacacagttcgttaggccatttctttgattctctgaagaatccggaagtagagaactggaatagaatagtatccaacctacaaggcaagaccgtttctgttgaatattctgatagatacctaaaaacacccttaggctgtatgctcctagcgaaaatgatttctgggctgaagaatgaagctgatttaaacgtggtgtctatcaaggttatcgtcacaaatatcgtctcaatggatgattcggatgtagcagtaaatgctataaaggatttcaccaacggtgagaagagaaatcttttcctgaagaatgcaatatctgaattgaccggaatagaaccggaaattcaagacactggttatgttgagcatgaacggtgtctgacagttaaagcagataacgcagagctctgcatacgtcccgatgccggtatagcgagaggatgggtgccatttggaagagataacgctgaatgtgccgactgcgatttcagagaagattggaatatggacctcgaactgttcaacaagcagcagagaggagccggaatactctatactatctcatataagcaaccataa

SEQ ID NO: 28355 - DNA, 3114 bp, Bacteroides fragilis str. 1009-4-F #7
atgcccctttggaaacttaaattaactgaggaagaatatacaaacttaaaggagacccttgcccaaaatatatgtcgcttagaagattttggaattgaggcggctttgtgttacgccgaatggtggagaagagactataatggtggaattccttccagagaagatgtcgcagttggattaggactgcctcactattgttgggagcaactatataaggctgcgcgtcagggtcttaaaagtcatggattcgcattcattcactctctcaagggtaatgaatattttagaactttactgaatcaaggaggccttcctgtaaattacataaagaatggaaccaatcttggtgggttttcacgctttctccttggtttggttgaagaattgtcttcaataaatattgattgggatgataataaccttgatttaatcaaaaattttaattgtattgcttatcttgggaaagcgttcaagaatgacaatatttacgatgtttcattacagattgctcatgcaatcatatccgaagaagatcgctggctaccatatgatgacgcggattcctctttgtcggaactgactaaatccctaaaaagagaataccggcgagttaagagtgaacacagaactacaccactttctctaagctggaaactccgtttgacttcggacgaaaccgcgaatctttttgtcaatttgaatgtagtaaaagagatttcatcaaaatctatcgaaggtttggactaccaatcgtgctacaccttcgatgtgtttgttgctgggatacttgttggaaagtatgtaagaaaatccttagttaaggatgacataggagaggttatcggtgcgatatactctcgtgtaactgttggcgtggcaaatgatataaagtggaatggcgagcctgtagttgaagttaagattaggtgtgataacgatgacagattgtttccaacattatgtggcagttatcctccgaatttcgaatgccctcaggttttccaaatgctcgatgataatgtgtattctttgaaaccgacagcgaacgctgaaagtaatatagcagttttctccactgattggaagtgtgatggaagtcacaagctatcactaaatggaaaactttattcagcgattgagtttgctaatcaagtggatttgcacaattgtgtattgaatgaggatatgaccataaccaatgagttcacgccttatagtgctgaattcagaggtacatatatacaatgggttgagcaatctaattttaagttattgactcgtattccggtaataagcgtttttgaccaaactggtatcagagtaggaaatatcaagcctaaatatcgtgttcataatagtaaaactgattggcggaatttgtccaattcatgtcttttgccatttgggcttgtagatattaaggtagaatttcctgacaacaaatacgaggtggagacattttatttcatagacgatatgacttttgtttctcgcaacgaaaggatgttttccacagagttatgtcttgattctcgccatattatctctgcaaaagttgatgagtgcgaagacttatctgttgaaatgatagataaaaatatatggaagatttccagagatgcctgtgcttctaaatattcacctacatgtaatttgaaaataatggctgagggcaatcctcctttgagaatatctgttgttgcaccatttgagggtatagtaatatctgatttggaaggaaaaattgtgccgtctggaaaaatcatatcttatgataacctgagatattttaatattatcagtcacggacaagctggtatgatagatgtgacttacaaatctgataaaataacggattacgataaaatcaagcatcttaaaagtcccgtaattgaaggtatagttccattatcagattatcgcgatttattcgcaagaatgtttcaattatatggtgcaaatacttttgaccgaagcagttccatagaattgagaatatacgacaaatgcatctatataaggaaatttgttcttgatagtgagttgatctcagataaaattcgaatcacagatgataccaacgaagacacttcggatttcatatatgacggtgatgtttatgcactgccagtttccgaagatataaaaccggccgaattagtacagataaagcttgagtcgtataatcgacaaatgaacttgtttacaattcctgacgagcttttgaattcggaagcaatccttttctctggtcccgaaagttctcgcagactcgttcctaagtattataactttgggcaagaagattacagtttggaagtgcgtagagagaagtctgctactaacataatacattggggtgaaaaacttagcaaagatgatgttttttccggcgaatattggatgaaaacagtaaaggccttccgcattatttccgagtttaatcttccgtttaccacatataatgcattcaaagccataggtcgtgttcctaaattattggttaacctaatattagcctgttggcttaatggtgcttccgatattctcattcaggaaattgaccgttttgaagatgaattaaacattgcagtacattggattccgcgcactgtgtggggagaatgtattgagaatttcatatgtttgcttcctccagaactcagtagtataataacggcaaaattaggcgagattacagaactgataaatggacttttcaatgctacgctatctgcggaagttgcttctgaacttatccattatgttgcggaaggcaatatcggacgtgcccatatcttctcaatatcggacataaatcaatttaagtcaaggatacatgggtatacagataataatatggacctacccctaatccgatttgtgcttcaaaatcaatattatgtagaccaaaagatgctcgtgtcctatcgcgtgatgattgaggctgcaatgtgtgctgcggaaaaccttgcacaagtaaaagattgtataaatcttttttcgttagaaggccgagattatgctcgtattattaatttttaccaaaaatacttcaaagaaacctacagtgagatattcatcggaactgtaaaacaaattgcaagcaaatga

SEQ ID NO: 28356 - DNA, 6147 bp, Bacteroides fragilis str. 3783N1-2
atgaatatgaattatttttcattctataataaggccaaggaattgctaatagattctcttgcttctctttggttcaagggtcaagcccgagaacaagaatatatcaagcgggttctgactgaggatgagccactttttgctgagccagtatttcaatcgatattcccttgggaggagagtgtctacagttttgaggcacactcttctaaacttggattgctaacttcttcatttgttaatgcactgagcaacgaaggaattgacaaggatttaagattcccattagacaggcatccttataagcatcagaccgaaagctggagaactatgctctctcctcgaccacagaccattgttgttacctctggaacaggatcgggtaaaactgaatgttttatgattccggtattgcaggacttggctaagaccaatatgaaagattgtgttcaggccattttcctttatcctttgaatgcgctgatgaaaagtcagcagaaacgtattcatgcttggtgcaaagcccttccggaaaaggttacctatgcaatatataatggggaaactgacaaagaaaatcgttctgacagatatactgcacctcattatccacagctcgtaacaagacctcagataaggagaactccacctcagattctctttaccaatccgactatgctcaactatatgttggtacgagctgaagaccatgaaattttggaaaaatccaaggggaagctcaaatggattcttcttgatgaagcacacacttatatcggctcttcggctgctgaattatcattgcaaatccgacgtgttttggacgcttttggtgtaactattgaccaagtaaattttgctgtaacatcagcgaccatcggggatgagagtgaccccaaaacgatgataaagctaaagactttcgtttctcagctcacgggaaagccattcgaagatataaagatcattgggggcaagcgcattattcctgagctaaataagggaattgcagaagaacaattatccaaaataaacaaaagatttggcatcaggttgacctattctgatattgagagactgcgaaaaaagctcaattcttcgccagtattaaaagtaaaggaaataggtagcatacttgataagaaaatcgggataaatgtggatgcctcattggaaataattgatgctctcggggaaaaagtgaagaatctaaatgaaggaagtggttttggagctttattgccaacccgtgctcatttctttgttcggtcgataagcggagtgtatgtttgtaccaatcccgattgtcagcgtcataagggatatagattaccgataggtagtctgacaacatatcagaatataaactgtccagtttgtaaatcaaagatgctggagcttgccacatgctcgtcttgcggctctcccattgtagtgggtgagacaagcacaactaagggcttcaggatgcacaccaatataattgaccttgacaatacgcttttctatgagcaaaaggaagatctcattgattctgaagatatggaaaatatcgaaaatgttgagcagaatgaggcagatggcttttctcgcttctttttcgccattcctgagaaactatgtctaagaaaaaatgcgacttgtacttctcacattttcaatcatcggaatggcaaaatagaacttgctcctgaaaacaatgaaagcagtaagggtattactcctttggaaagaggagaaagtactcctgtaagatatcaatctcttcgacactcaggagataatcacgttctttgtcctcattgtggtaataatctcagtgagttaaaaaaacttgattatctcagaataagtgctactcagattggacgtactttagcgacattacttcttgacaacgccgaagctattggcagtaatgatgctggcgttgtatatgaaggtcggaagtatatagcatttactgatagccgtcaagggtctgcacgctctgcgatgggacttaatcaggatgtagaacgttcatggattcgagcttccatttttcataagcttgccgacatgcgtttgaacgatgtgaaacccggcggtctgactcctgatgaggaagctgaatataatgcatatctgagcattcggggttgtcttccagccttactccttgaaaaattcaaacaacttgaagagaaaaagaacggtgtaccagtaatccccagcccggaggaagtgtcgtggtcgcaaataagccaacctcttgaaaatgactctaatttcaggaaattgtacgaacatgttgataaagcacgtggcaggaaaaatttcaggaatgcaacggactatctgaaagcacttcttgtcgatcaattcggatggattcccaagcgcgcgaactctttggaaacaatggggttcgtgcgtcttgtttatccgacacttaaaaatgcgaaatgcccgacacttcttattcagaaaagatgtacggacaccgactggcagaattttctgaagatttgtatggattatgtcattcgtggaggtcgtcattatatgctttctggagcctataaggattatcttacacaaaataagtattgttctcctatatatccttcaaattcagagcttagaaagaatggaaaccctgtatcgaaatggttcaaagtcaacgtcagccaaaaaggtgtcgatgagaatcagaacaggctcgttcttcttctatgtgccgttctcggttatgatgacatttctcaaatcagtcagacgaagattgctgacatcaactcaatgcttgatgctgcatgggatttcctaaaacaaaatgtccttgaagcgacagatgccgaaaaccaagggtatatgctcgatctcaccggtgataaggttaagttgcaacttatcgaaaaaggttacctctgtcctgttgacaacgttattatagatacgccgttctgtggctacagcccaagaatgaatggttacatcggtcgtgagaatttcgatcgattcaaaatccagacggagtttgtcaatccgtttttcccattcaagtttgcggaacagatagaagaaaatgtcacggaatggattgagaagaatctcttcgaccaaaaggccgcgggagtgttcggagttatgaactatagagtacttgcttcaaaaccaatttttatatcggcagaacattcagctcagcagtcgtcagaagaccttgaccgatatgaaaaggagtttaatgagggaaaaatcaatattctttcttgctcaactacaatggagatgggtgtagatattagtggtatcacagaagtcgtgatgaataatgtaccccctaaatcgtcaaactaccttcaacgtgcgggacgtgcaggacgaagaagtgaaactaaagccttggctttaaccgtttgtgcccccaatcctattggaacccatacatggaacaatcctgattatccgattacacatgttacagagaccccgttgttaaaattggaaagccgccagttgattcaacgtcatgtcaatgcgatggtattcgcatcctttgtcgcagatcaagggggaatcagggtcacggcaactcttagggatttctttgttaaggcagaagggatgtctttctatgataagtttctaaattacattgacagcgtaatcagcggaaacgttgaacggcttcaaagagcgtattcaaaattaatcaagggaacaagtcttgctcagataacattgccggatgccgcacaagtagtcaagaaagacatagctgctgttcacaatgtctttgatgctcacaacggtgctttggaaaaggctcttgaatctctgagaaatgaatccgaaacagccaacgctatcaaggctattgagaaacaagaagagaatcttttaaagacttcaatgttgtcctatcttgccgaaaattcttttttgccaagcgccggcatccccataggattagtcgaatgtctactcggaggtaaagaaaaggttgacggcagctcaccgacattgcacataagccaggcaatctcttcttatgctcccggtaatcccgtagtgaaaaacgaatgggtctatgaacccagtggtattcgtcttaagacaaaatacgatgacagcacctcaaggtatatcatacagaattgtactcactgcggctataccactattacctatggaagtgctaaaacggattgtcctaagtgtggtcggcatggaactatgcatggtataaaggacatctcgttgtcgatagagcagcgtttcacagaggtcgttgaacctgcagcattctctgtagcatgggattcgacccctatacgaaaaatgggcactcttggcggtatgaatttcattcagcctattttgcttgaaatggatgcctggcaaccgaagaccaattctgccaaaatgtctatccgttgttcaaccccaaggtctgagatcctcttttataataaaggagcgagtgggtatggatatgctttctgtccttattgcggcagaatgaaatcagaaaaatcaccggactctacagagcggatgatgccgcaccataaacatcttttggcctcaacaccttgcctcggtggtgaaaatgacggtacagcagtaagacgccacgtgttgttggtcggaagataccagacagactttgtcgagatcaagttccatgataagaacaacaatttgatcgaagactctgagacactctattctctcggtgtgattctaagccgtaagctcacggagttgctcggagtcaacgacggagagattgaattcggttatgatgtcataaatcattctattttcatatacgatactgccctcgggggcgcaggttattcattgcttttccgggaatataaagatgaagtcctgaaaatggctttggaagcgcttgaaagatgtgactgtgaacggtcttgtactaagtgccttatcgaccgcagatcgcaatggtatctgaactatcttaaccgaactaaggctctcgaatggctaagacaggaaattaaggcccgcattgctccaaaggaaattcttcgcttaatacctgattctcacactgtgacatcagacatcacaaccgagttttatcaactcacacggaacaaggacatttcctgtattaaaatatttgttaacgacaacatctctcaatgggatgcggaggcgttcccattcaagaaaattctcacagaactatctcttgaaggcgttgacgttgcctttatactaccaagcgttcccgatgtaaaatcactctcgtcagccgacagtgctactttaattgcagaggtatttaaaaacgactttaaaggccttgaaaacacattgccagcagaattgcttcccttgatggttgtgattatgaatgatggaaccgtcaaaacctactttggtaaaaatattgacacttcctattccaaaaattggggaagcggagatgtattcataaccacccaattaaattcgttgtcctacgccgacataaatcgaatgcaattgttgaacaccttttcatcaggcgatacctccttcatgttcgactatagaataacagaacacagttcgttaggccatttctttgattctctgaagaatccggaagtagagaactggaatagaatagtatccaacctacaaggcaagaccgtttctgttgaatattctgatagatacctaaaaacacccttaggctgtatgctcctagcgaaaatgatttctgggctgaagaatgaagctgatttaaacgtggtgtctatcaaggttatcgtcacaaatatcgtctcaatggatgattcggatgtagcagtaaatgctataaaggatttcaccaacggtgagaagagaaatcttttcctgaagaatgcaatatctgaattgaccggaatagaaccggaaattcaagacactggttatgttgagcatgaacggtgtctgacagttaaagcagataacgcagagctctgcatacgtcccgatgccggtatagcgagaggatgggtgccatttggaagagataacgctgaatgtgccgactgcgatttcagagaagattggaatatggacctcgaactgttcaacaagcagcagagaggagccggaatactctatactatctcatataagcaaccataa

SEQ ID NO: 28357 - DNA, 3159 bp, Bacteroides fragilis str. 3783N1-2
atgaaaattttggatgcccgtaacagatcatccataacccctaatatgcccctttggaaacttaaattaactgaggaagaatatacaaacttaaaggagacccttgcccaaaatatatgtcgcttagaagattttggaattgaggcggctttgtgttacgccgaatggtggagaagagactataatggtggaattccttccagagaagatgtcgcagttggattaggactgcctcactattgttgggagcaactatataaggctgcgcgtcagggtcttaaaagtcatggattcgcattcattcactctctcaagggtaatgaatattttagaactttactgaatcaaggaggccttcctgtaaattacataaagaatggaaccaatcttggtgggttttcacgctttctccttggtttggttgaagaattgtcttcaataaatattgattgggatgataataaccttgatttaatcaaaaattttaattgtattgcttatcttgggaaagcgttcaagaatgacaatatttacgatgtttcattacagattgctcatgcaatcatatccgaagaagatcgctggctaccatatgatgacgcggattcctctttgtcggaactgactaaatccctaaaaagagaataccggcgagttaagagtgaacacagaactacaccactttctctaagctggaaactccgtttgacttcggacgaaaccgcgaatctttttgtcaatttgaatgtagtaaaagagatttcatcaaaatctatcgaaggtttggactaccaatcgtgctacaccttcgatgtgtttgttgctgggatacttgttggaaagtatgtaagaaaatccttagttaaggatgacataggagaggttatcggtgcgatatactctcgtgtaactgttggcgtggcaaatgatataaagtggaatggcgagcctgtagttgaagttaagattaggtgtgataacgatgacagattgtttccaacattatgtggcagttatcctccgaatttcgaatgccctcaggttttccaaatgctcgatgataatgtgtattctttgaaaccgacagcgaacgctgaaagtaatatagcagttttctccactgattggaagtgtgatggaagtcacaagctatcactaaatggaaaactttattcagcgattgagtttgctaatcaagtggatttgcacaattgtgtattgaatgaggatatgaccataaccaatgagttcacgccttatagtgctgaattcagaggtacatatatacaatgggttgagcaatctaattttaagttattgactcgtattccggtaataagcgtttttgaccaaactggtatcagagtaggaaatatcaagcctaaatatcgtgttcataatagtaaaactgattggcggaatttgtccaattcatgtcttttgccatttgggcttgtagatattaaggtagaatttcctgacaacaaatacgaggtggagacattttatttcatagacgatatgacttttgtttctcgcaacgaaaggatgttttccacagagttatgtcttgattctcgccatattatctctgcaaaagttgatgagtgcgaagacttatctgttgaaatgatagataaaaatatatggaagatttccagagatgcctgtgcttctaaatattcacctacatgtaatttgaaaataatggctgagggcaatcctcctttgagaatatctgttgttgcaccatttgagggtatagtaatatctgatttggaaggaaaaattgtgccgtctggaaaaatcatatcttatgataacctgagatattttaatattatcagtcacggacaagctggtatgatagatgtgacttacaaatctgataaaataacggattacgataaaatcaagcatcttaaaagtcccgtaattgaaggtatagttccattatcagattatcgcgatttattcgcaagaatgtttcaattatatggtgcaaatacttttgaccgaagcagttccatagaattgagaatatacgacaaatgcatctatataaggaaatttgttcttgatagtgagttgatctcagataaaattcgaatcacagatgataccaacgaagacacttcggatttcatatatgacggtgatgtttatgcactgccagtttccgaagatataaaaccggccgaattagtacagataaagcttgagtcgtataatcgacaaatgaacttgtttacaattcctgacgagcttttgaattcggaagcaatccttttctctggtcccgaaagttctcgcagactcgttcctaagtattataactttgggcaagaagattacagtttggaagtgcgtagagagaagtctgctactaacataatacattggggtgaaaaacttagcaaagatgatgttttttccggcgaatattggatgaaaacagtaaaggccttccgcattatttccgagtttaatcttccgtttaccacatataatgcattcaaagccataggtcgtgttcctaaattattggttaacctaatattagcctgttggcttaatggtgcttccgatattctcattcaggaaattgaccgttttgaagatgaattaaacattgcagtacattggattccgcgcactgtgtggggagaatgtattgagaatttcatatgtttgcttcctccagaactcagtagtataataacggcaaaattaggcgagattacagaactgataaatggacttttcaatgctacgctatctgcggaagttgcttctgaacttatccattatgttgcggaaggcaatatcggacgtgcccatatcttctcaatatcggacataaatcaatttaagtcaaggatacatgggtatacagataataatatggacctacccctaatccgatttgtgcttcaaaatcaatattatgtagaccaaaagatgctcgtgtcctatcgcgtgatgattgaggctgcaatgtgtgctgcggaaaaccttgcacaagtaaaagattgtataaatcttttttcgttagaaggccgagattatgctcgtattattaatttttaccaaaaatacttcaaagaaacctacagtgagatattcatcggaactgtaaaacaaattgcaagcaaatga

SEQ ID NO: 28358 - DNA, 6147 bp, Bacteroides fragilis str. 3783N1-6; identical to SEQ ID NO: 28356

SEQ ID NO: 28359 - DNA, 3198 bp, Bacteroides fragilis str. 3783N1-6; identical to SEQ ID NO: 28353

SEQ ID NO: 28360 - DNA, 6147 bp, Bacteroides fragilis str. 3783N1-8; identical to SEQ ID NO: 28356

SEQ ID NO: 28361 - DNA, 3114 bp, Bacteroides fragilis str. 3783N1-8; identical to SEQ ID NO: 28355

SEQ ID NO: 28362 - DNA, 6147 bp, Bacteroides fragilis str. 3783N2-1; identical to SEQ ID NO: 28356

SEQ ID NO: 28363 - DNA, 3198 bp, Bacteroides fragilis str. 3783N2-1; identical to SEQ ID NO: 28353

SEQ ID NO: 28364 - DNA, 6147 bp, Bacteroides fragilis str. 3976T7; identical to SEQ ID NO: 28356

SEQ ID NO: 28365 - DNA, 3198 bp, Bacteroides fragilis str. 3976T7; identical to SEQ ID NO: 28353

SEQ ID NO: 28366 - DNA, 6144 bp, Bacteroides stercoris ATCC 43183
atgaatatgaattatttttcattctacaataaggccaaggaattattaatagattctcttgcctctctttggttcaagggtcaagcccaagaacaagaatatatcaagaggattttgactaaggatgagcctctttttgcagaacctgtattccaatcaatattcccttgggaggagagtgccgacagttttgaggaacattcttctaaactcagattgttaactccttcatttgttaatgcactgagtagcgaaggaattgacaaggatttgagatttccattagacaggcatccttataagcatcaaacagaaagctggagaactatgctttcttctcgaccacaaaccattgttgtgactaccggaacaggatcaggtaaaacagaatgttttatgataccagttttgcaagatttggctaaaaccaatgaaaaaaattgtgttcaggccatattcctttatcctttgaatgcactgatgaaaagccaacagaaacgtattcatgcttggtgcaaagctcttcccgaaaaggttacctatgcgatatataatggagaaaccgacaaagaaaatcggtctgacagatatactacatctcattatccacagctcgtaacaaggcctcaaataaggaaaactccgcctcagattctctttactaatccaactatgctcaactatatgttggtacgagcagaagaccgtgaaatcttggaaaaatccaaaggtaagctcaaatggattcttttagatgaagcacatacttatactggctcttcagccgctgaattatcattgcaaatccgtcgtgtactagatgcttttggcgtaactattgatcaagtaaattttgctgtaacatcagcgactatcggtgatgaaagtgaccccaaaacgacgataaagctaaaaacttttgtgtctcaactcactggaaaaccatttgaagatataaaaataattagtggtaagcgcattattccagaactaaacaagggaattgcagaagatcaattgtccaaaataaacaaaaagtttagtatcgaattgagttattctgacattgagaagttgagaaaaaagcttaactcttcgccggtattgaaagcaaaggaaatcggtcgtatgcttgataaaggaatcgggaaaaatgtggatgcctcattggaaataatagatgctctcggagaaaaagtgaaaggtctaaacaaaggaggcggccttggagctttattgccaacacgtgctcatttatttgttagatcgataagtggagtgtatgtttgcaccaatcctgattgtcaacgtcataagggatatagattatcgataggaagtctgacaacatatcaaaatatgaattgtccagtttgtaaatcaaagatgctggaacttgctacatgttcgtcttgcggctctcccattatagtgggtgaaacaaacacaactaagggatttaggatgcacaccaatgtaattgatcttgacaagagtcttttctatgagcaaaaggaagatctcattgatttggaagatatgggaaatatagaagatgttgagcaaaatgaggcggatggcttttctcgcttctttttcgccattccgaagaaagcatgtttaaggaaaaatgcgaatagaacatatcacatcttcaatcatcagaatggtaaaatagaacttgtccctgaagacaatagaagcaacaagtgttttacttctttaaaaagtgaagaaagtattcctgtaatatatcaatctcttcgacactcaggagataatcatgttctttgtcctcattgtggcaataatctcagcgagtttaaaaaccttgattatctcagaataagtgctactcaaattggacgtactttagcaacattgcttcttgataatgccgaacccattgacagtaatgacgcagacgttgtatatgaaggccgaaagtatataacatttaccgatagccgtcaagggtctgcacgttctgcaatgggacttaatcaggatgtagaacgttcatggattcgagcttccatttttcataaacttgccgatatgcgtttgaatgatgtgaaacctggtggtctgactcctgatgaggaagcagaatacaatgcatatctgagtattcgggaacatcttccgaccttactttttgaaaaatttaaacaacttgaaaaaaaaaagaatggcataccagtaatccccaatccagaggaggtatcatgggggcaaataagccagtctcttgaaaatgactcaaatttcaagaagttgtatgaacatgttgataaagcacgtggcagaaaaaatttcaagaatgcaacggactatctgaaagcacttcttgtcgaccaattcggatggattcctaaacgggcgaactcattggaaacgatgggattcgtacgtcttgtctatccagcacttaaaaatgcgaaatgcccagcactccttcagaaaagatgtacagacaccgactggcagaattttctcaagatctgtatggattatgtcattcgtggaggtcgtcattatatgctttctggagcttataaagattaccttacacaaaataagtactgttctcctatatatccttcaaattcagaactgaggaagaatgggagccctgtatcgaaatggtttaaagtcaatgtaagttcaaaaggtattaatgagaatcagaatagactcgttcttcttctgtgtgcagttctagattatgatgatatttctcaaatcaatcaaataaagattgctgacatcaactcaatacttgatgccgcatgggatttcctgaaacaaaatgttcttgaagcaacagatgtagaaaatcaaggatatatgctcgatctcatgggggataaagttaagctgcaacttatcgaaaaaggttatctctgtcctgttgacaatgttattatagatgcgccgttctgtggctatagcccaagaatgaacggttacatcggtcgtgaaaatttcgatagattcaaaatcaagacggagtttgtaaatccgcttttcccattcaagtctgcggatcagacagaaaagaatgtcatggaatggattgagaagaacttctctgaacaaaaggctgctggtgtgttcggggttatgaactccagagtatttgcttcaaaaccgatttttatatcggctgaacattcagctcagcaatcgtcagaagatcttgaccgatacgaaagagagtttaatgaggggaaaatcaatattctttcttgctcaacaacaatggagatgggggtcgatattggtggtattacagaagtcgtcatgaataatgtgccgccaaaatcgtcaaattaccttcagcgtacgggacgtgcaggacgaagaagtgaaactaaagccttggctttaactgtttgtgctcccaatcctattggaactcatacatggaacaatccagattatccgattacacatgtaacagaaactccattgttaaaattggaaagccgtcagttgattcaacgtcatgttaatgcgatggtattcgcatcctttgtagcagatcaagggggaatcagggttacggcaactcttagggatttttttgtcacggcagaagggatgtctttctttgataagtttctaaattatattgatagtgtaatcagcggaaaggttgaacgtcttcaagaaccatatttaaaattaatcaagggaacaagtctcgctcagataacattggcggatgtcgcacaagtagtcaaaaaagacatagttgctgtttacaatgtctttgatgctcataaaggagctcttgcaaaggcgattgaatctctgaagaatgaatcaggaacgaccaatgctattaaagctatagagaaacaagaggaaaatttttttaagacctcgatgttgtcatatcttgctgaaaattcttttctgccaagtgcaggtttacccttaggactagttgagtgtctgctaggcggtaaggaaaaggttgacggtaactcaccgacattgcatataagtcaggccatctcctcttatgctcccggtaatccagtagtgaaaaacgaatgggtctatgagaccaatggtattcgtctgaagacaaaatacgatgacagcacttcaaggtatatcatacagaattgcactcattgtggttatacaactattatctatggaagtgctaagacggattgtcccaagtgcggtcggcatggaactatgcatggcataaaggacatctcactatcgacagatcagcgttttacagaggtcgttgaacctgctgcgttctccgtagcatgggattcgaccccgactcgaaaaatggactctctcggcagtatgaatttcattcagcctattttgcttgaaatggatgcctggcttctgaagacaaattctgcaaaaatgtctatccgctgttcaacgccaaggtctgagattctcttttataataaaggaacgaatgggtatggatatgctttctgtccttattgcggtagaatgaaatcagaaaaatcaccagacaccacagagcggatgctgtcgcaccataaacatcttctagcttcgacctcttgtcccggtggcgaaaatgacggtgctgcagtaagacgtcatgtgttgttggtcggaagataccagactgactttgttgagatcaagttttatgacaaagacaacaatctggtagaagacactgagacactctattctctcggcgtgattcttagccgtaaactcacggagctgctcggtgtcaacgatggagaaattgaattcggctatgatggcataaatcattctattttcatatatgatactgctctcggtggtgcaggttattcattgctcttccgagaatataaagatgaagtcctaaaaatggctttggagactcttgaaagatgcgactgtgaacggtcttgcacgaagtgccttatagatcgcagatcgcaatggtatacgaactatcttaaccggcctaaggctctagaatggttaagacaggaagtcaaggcccgtgttgccccaaaggaaattatttatttaatgcctgattctcatgttgtgacatcagacatcacgaccgagttttatcagctcacacggaacaaggacatctctggtatcagaatatttgtcaacgacaacatttctcaatgggatgcggaaacattcccatttaaaaaaattctcacagaactatctctagaaggagttgacgttgcctttatactgccaagcgtaccagatgtaaaatcgctctcgtcagcagacagtgcaactttaattgcggaggtatttaaaaccaactttaaatgtcttgaaaacacactgccgacaggattatttccgttgatggtcgtgattatgaatgacggaatcgtcaaaacatactttggaaaaaatattgatacatcctattctaagaattggggaagtggagatgtattcataaccacacagccaaattcattgtcctatgccgacataaatagaatgcaactgttgagcgccttttcatcggacgattcttcctttatgttcgaatatagaataagagaacacagctcgttgggtcgtttttttgattctctgaaagctccggaaactggtaattggaatagaataatatctaacctacgaggcaaggctgtttctattgaatattctgatagatacctaaaaacgcccttaggctgtatgcttttggcaaaaatgatttccagtctgaagaatgaagcagatttagttctggtatcaattaaagttattgtcacaaatatcgtctcaattaatgacccagatatggcagtaaatgctataaaagattttaccaacggtaagaagagaaatcatttcctgaaggatgctatatttgaactgaccgggatagaaccggaaattcaagatacaggttatgttgagcatgaacggtgtctgacggttaaagcggataatgcagaaatctgtatacgtccagacgcaggtatagcaaaaggatgggcaccatttggaagagataacgctgaatgtaccgaccgcgatttcagagaagattggaatatagatctcgaactgttcaacaaacagcagataggaaacggaatactttacaccatctcatataagcaactctaa

SEQ ID NO: 28367 - DNA, 3198 bp, Bacteroides stercoris ATCC 43183; identical to SEQ ID NO: 28335

SEQ ID NO: 28368 - DNA, 6144 bp, Bacteroides uniformis
atgaatatgaattatttttcattctacaataaggccaaggaattattaatagattctcttgcctctctttggttcaagggtcaagcccaagaacaagaatatatcaagaggattttgactaaggatgagcctctttttgcagaacctgtattccaatcaatattcccttgggaggagagtgccgacagttttgaggaacattcttctaaactcagattgttaactccttcatttgttaatgcactgagtagcgaagaagttgacaaggatttgagatttccattagacaggcatccttataagcatcaaacagaaagctggagaactatgctttcttctcgaccacaaaccattgtcgtgactaccggaacaggatcaggtaaaacagagtgttttatgataccagtgttgcaagatttggctaaaaccaatgaaaaaaattgtgttcaggccatattcctttatcctttgaatgcactgatgaaaagccaacagaaacgtattcatgcttggtgcaaagctcttcccgaaaaggttacctatgcgatatataatggagagaccgacaaagaaaatcggtctgacagatatactgcatctcattatccacagctcgtaacaaggcctcaaataaggaaaactccgcctcagattctctttactaatccaactatgctcaactatatgttggtacgagcagaagaccgtgaaatcttggaaaaatccaaagggaagctcaaatggattcttttagatgaagcacatacttatactggctcttcagccgctgaattatcattgcaaatccgtcgtgtactagatgcttttggcgtaactattgatcaagtgaattttgctgtaacatcagcgactatcagggatgaaagtgaccccaaaacgacgatcaagctaaaaacttttgtgtctcaactcactggaaaaccatttgaagatataaaaataattagtggcaagcgcattattccagaactaaacaagggaattgcagaagatcaattgtccaaaataaacaaaaagtttagtatcgaattgagttattctgatattgagaagttgagaaaaaagcttaactcttcgccggtattgaaagcaaaggaaatcggtcgtatgcttgataaaggaattgggaaaaatgtggatacctcattggaaataatagatgctctcggggaaaaagtgaaaggtataaacaacggaggcggccttggagctttattgccaacacgtgctcatttatttgttagatcgataagtggagtgtatgtttgcaccaatcccgattgtcagcgtcataaggaatatagattgtcgataggaagtctgacaacatatcaaaatatgaattgtccagtttgtaaatcaaagatgctggaacttgctacatgttcgtcttgcggctctcccattatagtgggtgaaacaagcacaactaagggatttaggatgcacaccaatgtaattgatcttgacaagagtcttttctatgagcaaaaggaagatctcattgatttggaagatatgggaaatatagaagatgttgagcaaaatgaggcggatggcttttctcgcttctttttcgccattccgaagaaagcatgtctaaggaaaaatgcgaatagaacatatcacatcttcaatcatcggaatggtaaaatagaactagtccctgaagacaatagaagcaacaagtgttttacttctttaaaaagtgaagaaagtattcctgtaatatatcaatctcttcgacactcaggagataatcacgttctttgtcctcattgtggcaataatctcagcgagtttaaaaaccttgattatctcagaataagtgctactcaaattggacgtactttagcaacattgcttcttgataatgctgaacccattgacagtaatgacgcagacgttgtatatgaaggccgaaagtatataacatttaccgatagccgtcaagggtctgcacgttctgcgatgggacttaatcaggatgtagaacgttcatggattcgagcttccatttttcataaacttgccgacatgcgtttgaatgatgtgaaacctggtggtctgactcctgatgaggaagcagaatacaatgcatatctgagtattcgggaacatcttccgaccttactttttgaaaaatttaaacgacttgaagaaaaaaagaatggcacaccagtaatccccaatccagaggaggtgtcatgggggcaaataagccagtctcttgaaaatgactcaaatttcaagaagttgtatgaacatgttgataaagcacgtggcagaaaaaatttcaagaatgcaacggactatctgaaagcacttcttgtcgaccaattcggatggattcctaaacgggcgaactcattggaaacgatgggattcgtacgtcttgtctatccagcacttaaaaatgcgaaatgcccagcactcattcagaaaagatgtacagacaccgactggcagaattttctcaagatttgtatggattatgtcattcgtggaggtcgtcattatatgctttctggagcttataaagattaccttacacaaaataagtactgttctcctatatatccttcaaattcagaactgaggaagaatgggagccctgtatcgaaatggtttaaagtcaatgtaagttcaaaagggattaatgagaatcagaatagactcgttcttcttctatgtgcagttctaggttatgatgatatttctcaaatcaatcagataaagattgctgacatcaactcaatgcttgatgccgcatgggattttctgagacaaaatgttcttgaagcaacagatgtagaaaatcaaggatatatgctcgatctcatgggggataaagttaagctgcaacttatcgaaaaaggttatctctgtcctgttgacaatgttattatagatgcaccgttctgtggctatagcccaagaatgaacggttacatcggtcgtgaaaatttcgatagattcaaaatcaagacggagtttgtaaatccgcttttcccattcaagtctgcggatcagacagaaaagaatgtcatggaatggattgagaagaacttctttgaacaaaaggctgctggtgtgttcggggttatgaactccagagtatttgcttcaaaaccgatttttatatcagctgaacattctgctcagcaatcgtcagaagatcttgaccgatacgaaagagagtttaatgaggggaaaatcaatattctttcttgctcaacaacaatggagatgggggttgatattggtggtattacagaagtcgtcatgaataatgtgccgccaaaatcatcaaactaccttcagcgtacgggacgtgcaggacgaagaaatgaaactaaagccttggctttaactgtttgtgctcccaatcctattggaactcatacatggaacaatccagattatccgattacacatgtaacagaaactccgttgttaaaattggaaagccgtcagttgattcaacgtcatgttaatgcgatggtattcgcatcctttgtagcagatcaagggggaatcagggttacggcaactcttagggacttttttgtcacggcagaagggatgtctttctttgataagtttctaaattatattgatagtgtaatcagcggaaaggttgaacgtcttcaagaaccatattcaaaattaatcaagggaacaagtcttgctcagataacattggcggatgccgcacaagtagtcaagaaagacatagttgctgtttacaatgtctttgatgctcataaaggagctcttgcaaaggcgattgaatctctgaagaatgaatcaggaacgaccaatgctatcaaagctatagagaaacaagaggaaaatcttttaaagacctcgatgttgtcatatcttgctgaaaattcttttctgccaagtgcaggtttacccttaggactagttgagtgtctgctaggtggtaaggaaaaggttgacggtaactcaccgacattgcatataagtcaggccatctcctcttatgctcccggtaatccagtagtgaaaaacgaatgggtctatgagcccaatggtattcgtctgaagacaaaatacgatgacagcacttcaaggtatatcatacaaaattgcactcattgtggttatacaactattatctatggaagtgctaagacggattgtcccaagtgcggtcggcatggaactatgcatggcataaaggacatctcactatcgacagatcagcgttttacagaggtcgttgaacctgctgcattctccgtagcatgggattcgaccccgacacgaaaaatggactctctcggcagtatgaatttcattcagcctattttgcttgaaatggatgcctggcttctgaagacaaattctgcaaaaatgtctatccgctgttcaacgccaaggtctgagattctcttttataataaaggaacgagtgggtatggatatgctttctgtccttattgcggtagaatgaaatcagaaaaatcaccagactccacagagcggatgctgtcgcaccataaacatcttctagcttcgacctcttgtcccggtggcgaaaatgacggtgctgcagtaagacgtcatgtgttgttggtcggaagataccagactgactttgttgagatcaagttttatgacaaggacaacaatctggtagaagacacagagacactctattctctcggcgtgattcttagccgtaaactcacggagctgctcggagtcaacgatggagagattgaattcggctatgatggcataaatcattctattttcatatatgatactgctctcggtggtgcaggttattcattactcttccgagaatataaagatgaagtcctaaaaatggctttggagactcttgaaagatgcgactgtgaacggtcttgcacgaagtgccttatagatcgcagatcgcaatggtatacgaactatcttaaccggcccaaggctctagaatggttaagacaggaagtcaaggcccgtgttgccccaaaggaaattatttatttaatgcctgattctcatgctgtgacatcagacatcacgaccgagttttatcagctcacacggaacaaggacatctctggtatcagaatatttgtcgacgacaacatttctcaatgggatgcggaaacattcccatttataaaaattctcacagaactatctctagaaggagttgacgttgcctttatactgccaagcgtaccagatgtaaaatcgctctcgtcagctgacagtgcaactttaattgcggaggtatttaaaaccaactttaaatgtcttgaaaacacactgccgacaggattatttccgttgatggtcgtgattatgaatgacggaatcgtcaaaacatactttgggaaaaatattgatacatcctattctaagaattggggaagtggagatgtattcataaccacacagccaaattcattgtcctatgccgacataaatagaatgcaactgttgagcgccttttcatcggacgattcttcctttatgttcgaatatagaataagagaacacagctcgttgggtcgtttttttgattctctgaaagctccggaaactggtaattggaatagaataatatctaacctacgaggcaaggctgtttctattgaatattctgatagatacctaaaaacgcccttaggctgtatgcttttggcaaaaatgatttccagtctgaagaatgaagcagacttagttttggtatcaattaaggttatcgtcacaaatatcgtctcaattaatgactcagatgtggcagtaaatgctataaaagattttgccaacggtaagaagagaaatcatttcctgaaggatgctatatttgaactgaccggaatagaaccggaaattcaagatacaggttatgttgagcatgaacggtgtctgacggttaaagcggataatgcagaggtctgtatacgtccagatgcaggtatagcaaaaggatgggcaccatttggaagagataacgctgaatgcaccgaccgcgatttcagagaagattggaatatagatctcgaactgttcaataaacagcagataggaaacggaatactttacaccatctcatataagcaactctaa

SEQ ID NO: 28369 - DNA, 3198 bp, Bacteroides uniformis
atggttaatatatgcaatagtgaacagcatgttgttttgatgaggattttggatgctcgtaacagaccgtccataaccccagatatgcccctttggaaacttaaattaaccgaggaagaatatacaaacttaaaggagactcttgtccaaaatgcgtatcgattagaagattttggaatagaggcggccttgtgttacgctgaatggtggagaagagactataatggaggaattccttccagagaagatgttgcagtcggattaggactgcctcattattgttgggagcaactatataaagctgcacgtcatgggcttaaaagtcatggatttgcatttattcactctctcaaggggaatgaatattttagaactttactaaatcaaggaggtcttcctgtaaattacataaagaacggaactaatcttagcgggttttcacgttttctcattggattggttgaagaattgtcttcaataaatattgattgggatgataataatatagatttaatcaagaattttaattgtatagcttatcttgggaaagcgttcaaaaatgacaatatttacgatgtttcattacagattgctcatgcaatcatatccgaagaagaccgctggctaccatatgatgatacggattcctctttgtcggaactgactaaatccttaaaaagagaataccggcgagttaagagtgaacatagaaccaaaccactttctctaagttggaaacttcgtttgacctcaagtaaaactgcaaatctttttgtcaatttaaatatagtaaaagagatttcatcaaaatctattgaaggtctaaactatcaatcgtgctacaccttcgatgtgtttgtctctggtatacttgttggaaaatatgtaagaaaatccctagttaaagatgacaaaggagaggttatcggtgcgatatattctcgtataactgttggcgtagcaaatgatataaagtggagtggagaacctgtagttgaagttaagatcaggtgtgacaacgatgacagattgtttccaactttatgtggtagttatcctccgaattttgaatgccctcaggttttccaaatgcttgatgataatgtatattctttgaaatcgacagcgaatgctgaaaataatatagctgttttctctactaattggaagtgtgatggtagtcacaatctattactaaatggagaactttattcggcgattaagtttactgataaagtagatttacacaattgcatgtcgaatgaggatataaccataaccaatgagttcacgccttatagcgctgaattcagaggtacatatatacaatgggtagagcaatccaattttaagttattgactcgcattccagtaataagcgtttttgaccaaactggcactagagtcgggaatatcaagcctaaatatcgtgttcataatagtaaggctgagtggcggaatttgtccaattcatgccttttgccatttgggcttgttgatatcaaggttgaatttcctgacaataaatacgtgatggaaacattttatttcatagacgatatgacatttgtctctcgcaacgaaacaatgttttccacagagctacacctatattctcgccatgttatctctgcaaaagttgatgaatgcgaaaacttatctgttgaaatgacggataaaaatacctggaggatttccagagatgcctgtgcttctaaatattctcctacgtgtaatttgaaaataattgccgagaataatcctcctttgaaagtatctgttgtagcaccgtttgagggtatagtaatatctgatttggaagggaaaattgtgccatcgggaaaaatcatatcttatgataacctgagatattttaatataatcagtcatggacagtctggtatgatagatgtaacttacaaatctgataaaataaaggatgacaatacaatcaagcatcttaagagtccagtaattgaaggtatagttccattatccgattatcgtgatttgtttgcaagaatgtttcaattatatggtgcaaatacttttgaccgtagtagttccatagaactaaaaatatgtgacaaacgcatctatataagaaaatttgttcttgatagtgagttgagttcagataaaattcgaatcacagattataccagcgaagacacttccgatttcatatatgacggtgatgtatatgcattgccggtttcagaaaatataaaaccagctgaattagtgcagataaagcttgagccgtataatcgacaaatgaacttgtttacaattcctgatgagcttttgaattcggaagcaattcttttctctggtcccgaaagttcgcgcaggcttgttcctaagtattacaattttgaacaagaagattacagttcggaagtacgtggagagatgtctgctgctaacacaatactttggagtgaaaggctttgcaaggatgatgtttttgccggcgagtattgggcaaagacagtaaaagcattccgtattatttcagaatttaatcttccatttaccacatataatgctttcaaagctattggttgtgaacctaaattattggttaacttaatattagcttgttggattaatggcgcttccgatgttctcattcaagaaattgaccgttttgaagatgaattaaacattgcagtacattggattccgcacactgtgtggggagaatgtattgagagtttcatacgttcgcttcctccaacactcattaatataatgaatacaaaattaggtgagattacagaactgataaatgcacttttcaacgctacactatctgcagaagttgcgtctgaacttacccaatatgttgcgggagggaatatcggaaatgccaggattttctcaagagcggacataaatcaatttaaatcaaaaatacatgggtgtacagataacaatatagacctacctctaacccgatttgtacttcaaaataaatattatgtagatcaagagatgcacaagtcctatcgtgtaatgattgagtccgcaatgtgtgctgcggaaaacttcgcacaagtaaaaaatcgcacaaatctttttttattggaaagtcgagactatgctcgtatcattaatttttaccgaaaatactttaaagaaacctacagtgagatattcattgggacagtaaaacaaattgtaaacaaatga

SEQ ID NO: 28370 - DNA, 6162 bp, Bilophila sp. 4_1_30
atgcctctgtcgtatttttccagaattttccctcgccttcaggaacgcatccggcaggatgtgccctccgcgctaccgctaaacaatgattctctgcgccgctgtctggacgccatgctctcctgtgcgccgggtgatgaaggaagtctcacaagcgacccggcatttgaagccatgttcggctggaaacaggcagacctcagcatggccgaccttgcagggaacctgctggatgaacgcctggcccgctgcctcaacgagccgcccgaggaactgcggcaggactacgagttcccgtcttctcgcaggccttacacacaccagcttgaagcctggaaaactctttgcgggaaggagccttcctccgccgtcatcagcagcggcacgggatcggggaaaacggaatgcttcatgattcccatcctcgacaggctggccagacaaagcgcggtacagggcggccctctggaaggtatacgggccctttttctctacccgctcaacgcgctcatcagcagtcagcgcgatcggctcgacgcatggacgcggggctttaacggcaacgtacgtttctgcctttataacggtaagacaccccaaagtctgcctgctcatgaaaagagatgcgccaacgaagtgcgctctcgcgatgagctgcgcgccagtccgccccccattctttttaccaacgcttccatgctggaatacatgctggtgcgcacagaagacgcacccattctgcaaaaatcccagggcacgctggaatggatagtgctcgatgaagcacactgctatataggttcccaggccgcggaactctcccttctgctacgccgtgtacagatggccttcggagtgactcccgacacagtgcgctttgtggccacatccgccaccataggcgatccaaatggttcgaccggattggagctgaaacgctttctcgcagacgtggcgggcgttcccgtctctcaagtcacacttattgcgggagaaagaatgattcccgtacttcccccgctggaagaaaagcccgccatgctggaagagttggaaggcatggctcccgaagaagcccaaagtgccgctcgtcatgaagcgctctgccgctcgaaaacggcaaaagtattgcgtgcactgtttacccgggacaaaaacgtggcatgcctctccgaggtacagactctgctgaaaaaagaaggccttcctgccggcacaaatgtcgccctgcgctggctcgacgtgctttcatggacacggggaagcgacggcacaccctttcttcctctgcgcgcccacatgtttggtcggggactttccgggatctgggcctgcgcggacccaaactgcccgcacaaacagaaagatttgcaggacgactggccttacggcgcggtatggacggatctgcgcgagcactgcacatgcggaagccctgtctttgaaatcgtcacgtgcagaggttgccgcacgcctttccttctggcgcagaaaaacgaccgcaccgatagcgacggacggcccgcagaatttctcatgcagaagatacacttgctggagccggaatacgaggatgacagcctcatcgacgaagaaacgaccatgagccgcattgtagattcctacgccattctgctggtacggcccggtgcatcgtcagtctccttctttctcgacaaggaaaccttccggctcatggacacggacaacggccatgccatccgtgtttcattgaaggaaccgaatcccgacaagggcagtcttgcctgtcccctctgcctggaaacttcgcgggggcatcaagaattctatcattacaacacaatcggcacaccctacctgcaaaacaccatagctccggtacttctggagtttgctccagacggcaaggaccccatgcagcatcccttccggggccgcaagatgctcaccttcaacgatagtcggcagggcacggcgcgctcggccatgagcatgcagctcttttccgaactcacgcgcatacgcggacttctctatcatatcagtctgcaggtctgtcaggacggcaatgacgaaaagatggccaaactgcagcaggacatcgctaagcttgaagcattgcccgaagaaaccctgtccgctcttcagaacattctggacgaaaaaaaggcagagcttaccagtcttgggaacatggttcccgttaccttcgacgacatagctaaaaaacttcagatcgagcgttccagcttcgaggctctgctccgaatctatcaggaaaaagcgcctgcgctgttttccgtaggttccggcacatcggactttgccaggatgctcatcttccgtgaattcggaagacgaccggcaaaagccgtcaatcttgaaacgctggggctcatggccgtacgctatccggcactggagcaggtaactgccgttcctcgggaattgagtcgcgaaaatctcacgctgcaagactggaaggactttctgaaaatttgcctcgacttcgtgttccgggccaacggcgccaccgatttcccaagagaatggagaaaatggctgggcatgacctacaaccagaacttcatgctgcccccggacagggaagagcacggcaagttccaacttctctggccccagtgccgccgtaacagacagcaccggcttgtgcgccttctcgaacgggcgctgcgcataaacaccgaacactgggaacatgccgacctcatcgacagtattcttcgtcaagcatggaaccaaatcacgagcctccccaagctctgctcaagacacacggacggcgttcttctgcagcactctgccatgagcttcgcgccgctgaaaaaagtccgcctttgccccttcacgcgacgttttcttgatactgcatttctcggtatttctccctatcttccccgcaagggcgaacaaaacgcgtcctgtcgggaatatgccatgcctctctacccttcaccgttcgaacccacttccgaaagcggcgttcaaaaagcccgcgactggctttcgaaaaacaaggacgttcagacgctacggcaggccggactttggtttgccgaccacgacagtgtcgtggaactcaccccttatttcagggcgcaggaacattccgcccaactcccgtccgctgagttggatttatgtacgcaaaaatttcgggaaggagacatcaacgtgctctcttgttccaccaccatggaaatgggcatagacatcggtggcatttccatcgtaggcatgaacaacgtacctcctcatccggccaactatctccagcgctccggccgttccggccgccgaggggaaacgcgagcactcacctttaccatgtgcaagaacaaccctcacgaaatggcggcctttgccaacagtcgctgggccttcgacacgtccctttccgtgccccgggtatcgctgaacagccctgtcataatgcaaaggcacgtcaacgcccttctactcacgacctttctcaaggaacggcagcaggaagacgacaaagatttggccaaactctcgtgcgatgccttcttcaccggcaacaatccggcggctcgtctcttctccctgcgcttcaaaacgctgaaaacagactcgccccttctggaaagcatacgtcttttatgtcgcaacagcgtcttccagaacgaacgcccggaagcaatggctgaaaaagccgccgaagccatggacagagcgtacgaacgctggcacggtgattatgacatcctgtgccaagaagaaaaaaacatgcagagcgatggcggcaaggaaaattccgcagccaagaaggccgttaccctccgcaaggagcgcatggccaaagagtatctgctcaaggaactcatctcgcaggaatttctacccgcccacggattccctcttcatgtggccacgtttgataccatgtatctttcccttttcctggagcagcagcgacgaaaaaaagaaagcaggggagaggtggacaacctgtttttacgcagagaactgcccagtcgttctctttcttcggcactcaccgaatatgcgcccggcaacagtgtggccatcaacggccttgtctacgaatcgagaggcataaccctgaactggcatattcccgcctccgaagaggccgccgcggaactccagaacatacgaagccgctggagatgccggaactgcggaagcttcggcacggcggccagccgttccctgacggcatgcagcaactgcggcgctccccttaccaaagaaaactggcatgaatatcttgaacctgcgggctttgccgtcgactttttcagggaaccttccaataacgttgcgctcggcatgaaaggtctgagtcacgccgaggccaatgtatgcgcctgcggcccgtggatatccctggggcttcccgaaacggcccgcttccgctgcaccacgtccggcacggtatttcatcgctctcgcggtctttacagcaagggatacgcggtatgcctagcctgcggcagggtagagtccatctccgaaacaagggaaataccctctgccataaagcatcataaaaaactccgtggagggaaaaacgaaaacgatcccgccaaccatatctgccccgcctgccgggaaggtatggaatggaaaataaaagcacctctctggcttgcctgcgaaagtaaaaccgacgttttggagctacagatacgaaaggaagaccaatcatggctcaacaatgaagcacaggcctttcccatagctgtcgccctgcgcgatgccttggccgcgcggctcggcattcaaacggaagagatggaatgtaccgtggacacccgcagaagagaagatggcacgatctgcacctccatcttcgtcttcgacaaaaatgccgcaggctacgcctcttccgccggggagtacatggtggaacttatgcgcgacgcgcacgatcgtctgctctgcaaaggtcatggctgcgaaactgcctgcccccactgcatcctcagctttgacctgcgttaccagagccgggagctcgacaggcacaaagggttggaagtactcacgcctgcatggttcaccctgctcgaccttccctcgcaggcgcgcatcttcggagcttcgaccgcaacggaaaccatgcgtcttgaagaatcagtgctgttcatatccctgctgcatcctgaggcaaccattctcatgcacctcggaccgaattctctgtggctgcccggcgacggtgacatgctacaccttttggacattctgaggctgcggcaggtacatgttgagctgacactggagaaagaattttacgacagcttcagccaggaagaacgcatgcttcttgctccccttatccacggcaacgtgacctgctccgttcttgagggtgacttttctcatcctcatgcccgtcttgccgtcaccatagaagacgggctgctgcatcgctgggccgtgtacgaagaagaggaaaaccgcctgttgctcaaaggctgcacggaaggcgatgcgggcacgcgcagaccgcttctgcaaaaggatcttcaggcaaaatccggcaacagcgccatcgtgcagataggaggcaacgacaagacttccgtcacagacttcggcccatggctgtggcacaaactgcgccagtctcttgaaaaaaatctggggctcgatcccgttgccgcccggcggcccatcacacgcatcctgttttccgacaggtactgcaattccccccttaccactgcccttctctacagactgctgagtcatctgaaagagctctacggcgaggcatggacttcccccaccttcttcgtcatgctcgcagaccggatttccggggagtactcccatgtgtgggacgattggagccgtgccacagagcgtgatgaagccgtcagaggattgttgaacgaactgggaacggccaaggtagttcccatggataaaaaaatgatggctcatgcccgctcccttcggctggattttcaagacggcacggcactgaccatctggcttgaccagggactcggattcctcaaggtagaacgcaaatgtcccgaccggctgttccccttccaggaaacctgcgaagaacagatcattacgctaaagaatatggagcagactctcgaagtagttccgggaggaacggtcgtcagcctacagttgggcaaagtctaa

SEQ ID NO: 28371 - DNA, 3348 bp, Bilophila sp. 4_1_30
atggcgaagcagctcaagataaaagactggttgaatgattttctggccagcagggaacttgacgccccagacggccgccacttgttttcctatcatgccacaccggacgaattcctgactctggaagaaggcctaaaacaaaacatgacattggcctccatgctgggctgccaaaaccccttctgtctgtgggacaatgctcccgacttcgatgccgtttttgtgctttatgccgctttgtgctggcagcaaaggtacggagggacgacatggacgtatgacgtcatcctgaacggcctgaacacctctctctccaatcccagtctggagctgagggatatcattgaaagagggctgaacttctggggccttgccaaaagcgaacgaggctatgcctatctcggagctatcgcgcgcgaggccggacttccgcagaagctgcttgccgaaaacagaggcgccgtaggacgccttctccattccgttctgagagaagcgctgcgttccggccagtccggcagcatcgttacaagctggattgaaagctgcaaaactctcctgccccaatcttactggaacgaggaaatcatcgctctgttggccgactccatcaacgccattctcaacatcaagaaaaatcttcgtgcgagcacgctcgaagaggccatgtccgagctggatgaaaaaactcccgactggcgttcctgctttccgcttcccctctatgacgataccgctcgcgaccttctaaaccgcctcctggaagatgcggcgtcttccacacaaacggtacagaccggaagtcctgtctctgctgtccgcagccttatcaggaatgccggacaggattgggatcttctggtccgtctggatataccctcccgcatagaaaccggcatcagccaagataagccgcgcgtgctctccatgtgcatcacttccggccagagatctttcgagtccgtactgaaaaaacatgcagacagcgatttctatttttttcagcaaaagaagaatatgaccttctccggtccagacgccgtgcaagaaatcattgtccgatacaccgcaccttcaggcttctgtctgacccatacttgtcccggtggcacggaactggactctgaactgccctggattttcgagggagagcagtacggctaccgtttccggcaacagggcggcggcagtgtacgtggaacggtcagctatgttgcgctcgctcccggatgggaagccgaaaatgcggaagacataggttctctactgggtacaaacaggcatgtctaccgcatgacaaaacctagccgcctaaaaaaagacgacctcgatttttctatacgaacctccgagttgatcggtgaagagtatgactggagcagggacaaccgtttctgggatgtggaaatgcttcaacccgcactggcattccgcggtattcccaaggccgttgtttccacgggcggcacgaaaaaaatcccgcacggcaaaatgctaaaaaaaacagctgggatggaaaaatttgccccgttttctgcctcaaatgcgcctgtcggtgtcactcaggtatggttcaaggcgaacgacggcgccagcctacgcagtcgcatgcttcttctgcccatgaaagcctccatcagcctgtccacagatgcggagggaaacggccttctgcgccttgagaattggaacgccgaagcggctaccttcgaccagccgcaggcaggactggaacttgcctgccgacctctgggaaacagccttgaacttgcctttaaaactctgcccggtcgtgtgcctccggccacggtggatcttcgggtgtcttggaagaataatccccagtccgcgcgtatccgcgttccctttccccagacaggagcccgactcttcaacgccgaaggtcaggaaattctttcaaacaaacaaatctgcgcgctgcatcttcacggtctgcgcctgtactgtttcatcatgggagtgcatcatactgcgcttcgcctctccctgcccggcaaaaaactggactatccactggaaactcatgagcactgcatgggcatccacctcatagactggcagaatgcccttctggaaatgctcgccatgacaaatggactggacgaccgcgtctcactcgacattcttttcgatggccagaaagtagcgggctggaacgtggcccgctacgaatcctgtcttgtcccggaggaaacgaaagccgtgctcgccctccccaagtacggaacccgaccttcacaaggttatgccatgaaggctctgctgctcgaccacccagaacttggtccgacactgcttgaggaaagcctgcgtgaagacggcacggcctcgggcgagtgggagctttcagaggtgttggacaggcctggcccctggctcatttttgatgatacggaaggcacatctctgcgtcctctgctctggacagtgaacggcgacatcgacgaaacgccccgcaactgccttcaggccgccattgccgaaaaggacagagaatcccgtctgcgggcgtttctatcatgcgtcgctgtcatggaacacgaccttgacgcgccggaatggacgactcttcttgcgcttttcaagtatgtgaggaacctaccgctttccacgctggaagtctggcaggcccttcttcattttccacgcatcatggccatgatcgccctgcatccgggcatctccttccaagttctcacatccagagtcgacacggaacttccctttttgtggaacttcgtttcccggcaggactggagtgcagccagccagtgcgtcaaacactattttgaaaagctcattcccggcgacatggccttcggcatctggcaggatcatatgcagaagactatggaaaatcttggttcatgctgtccgtccgtcaacgcactcgtacacatcgctaatcctcttccctgtgaaacaccgatgttgacaagtgtatgcgcctattaccacgcagatcaggtcgcctgtcttctgttcaaagacaacaattctgaaatgcaaaaattgctccgacggcacgccgacgacaaatggccgacagcgtttgcgtccctcgtcaaccgcgagcggcacagcgacgatatcaagtcgttcctgcccttctcgcaggggcatggaaacagcgtgctcggcctgcccattcttctcacgcttcaggcctttgagccgcaaacaatgtttatccccgttccacccgaccaggacactgtctttcacgtccgcgagcatcttcatttcgacgccgaatggtttgaacaagcctcctcccttacggcttactgctgcgcatcgaaacgcttcagcataaaggaatcatga

SEQ ID NO: 28372 - DNA, 6252 bp, Burkholderia sp. H160
atgaagtactttaccgacctgattgaacaaagtttgagtcgtacccgggaagccacgttgagcgttctcggtatcaacgacgagaatctgcgacgccatctcggcagccagatgaacagcacgcttggctccgatgggtgctttctcgcaccgcccgttttcgaacatacctttggatggcaggaagccgaggagataacgcttaatgacctgaggggcaatctgctgtcggcgagtctgctcgatacgctccatgctgctgagggcacctaccgcttcgcagcgaacacgcatccttacgtgcatcagttgaaggcatgggaaacgctgctggcgccgacgccaaaatccgcagtcgtcacgagcgggacaggctctggaaagacggagtgcttcatggtgcccatacttgaggacctggtccgtgagcgcgcaaagctagggcagtcactcgttggcgtacgtgcgctttttctctacccactcaacgcccttatcaattcccagcgcgagcgcctccacgcctggacccggccattcggctccgacatccgcttttgcctctataacggcaaaaccgtggaaagtgctagtgaagtgcgcaagctgcagcatcaaaggcccaatgaagtcttgtcacgggaggaactgcgcagacagccggcgcctatgctgatgaccaacgcgaccatgcttgagtacatgctggtccgacaggtcgacgcaccgattctcgagctgtcacgacaacagcagtccctgcgctggatagtcctggatgaggcacacacctatgtcggctcccaggcggccgaactcgcgctgctgttgcgacgcgtggttcaggcgttcggaaagcgccccgacgaaattcgctttgttgcgacttcggccactatcgccgacagcaatgcaaatgaacggcttcagcagtatcttgcaagtctggccggggtgcacccggaacaagtagtcgtattggggggctcacgcaaggtgccagacatcgtgtgcaccgggacacctgaccagcgaagctatgaagcggcatgctcagttgacgccggccaggaaatatcggaggcccgcttttccgtacttgcccatcatcccttggccagcgcgcttcgccacggcattgttaacaaagggcgcccacttgacctgaacgagctcgttgacatcgccggcaacaggctgacaggcgagacgctcgctgagcggcaacaggagttgctcggatggctcgacctgatgagcgggacacggcgtgcggccaaggagccaccgttcatcaagctgcgcattcacctcttccagcggatgctgcacggcctgtgggcctgcatcgatgcccgttgcagcgccaaaccggcggggcttgaagcctggccatttggcaatgtctatgtcacccaacgctctcgctgcgagtgtcatgcaccggtgtacgagctcgccttctgtgacgagtgcaagaccccgcatctgctcgcggaagaccgggccgggcaactgcagcaacgcagtccctacgcaagcgatgaattctcgctgagctacgatagtccggccgaagacgaaccaaatggcgacctgccatccagcctttcgcgcaggcagttcgccgagaaatttgtcatcgctgcgtcggagacgcaacgggagccctatttcccgctgcaggtcaatctttcgaccctcaacgtgggggccctaccgtcaacagacacaagagaactcgtcgtcgcgccggaatctctggccacctgcagccggtgtgagacaagcttcaccggttcgcccggaccgcttcgcaaggcctaccttggcgcaccgttctatgtggcgaacgcggtccccacggtcctcgaattctgccctgacccgatgccggaagattctgacggaaaatcaccggaggaacttcccggccgagggcgcaagctcattacgttcaccgatagccgtcaggggaccgcccgcatggcggtgcggatgcaacaggaagccgaacgctcccggcttcgcgggctcgtcttcgaaatactgcgtaacgcccaggcaaagctcgatgccaaacccaaggatattcctacagtcggctatgaggagctcatcgaacaggcaaagcgccttcagagtatgggtatgaacgacatgtctgcgcagctgttccagaaggctgaggaggccaggtcggggctgtccacaagcgggaccagcgaaatgtcctggtccgacatggtcacggaacttgcaacgtcaagagacatctcgctatcgattcgcgactacaacaagtacgcgaatcctgaactcttcgagggacaggaaggtgccattccaatggcccgtctgctgcttgcccgcgaatacgcgcggcgtcccaagaaccagaacagcacggagacgttaggcctggtccgcgttggctaccggggtcttgacggcatcacttcggctccagccttgtggcttggccgaaaggctggtgccctcccgggcgaggccgtccccggtaatctgacgctccaggactggcgggattttctcaaggtagcgctcgactttcacgttcgcgaaaatacgttcatccgcctcgaccccacgatgcagcgatggatgggagcacggttcacctcgaaggttctcatgccatcaaagcgggacgccgcggagagcgccactttcaagaagtggccgcagttcaggcaaggccgggggcatcgacttgtaaaattgctggaacaggggtgcaatcttgaccggagccgccccgatgaccaggacatcatcaaccatcttctcgagcacgcatggaacgcgctggtgggcgcgacgatactcgaacagtttgaggggggctacgcactcaacctcaacaccctgaccttctcgctgcccactattgcctgggtgtgtccgctcactcaccgcatgttcgatacggcatttcgcgcgcttacgccctatatgccagaccgctttcgtgagggagattaccgttgccggaaggtgcagctgcccaccttttcgctgctgtccccggcgggcgatgccgacgctgcccgggttcaggtccgccggctcgtcacggacaatccacaagtccagcaattaaggtcacagaatctctggaccgacatttgtgaccggactgcggagggtggattctactaccgcaccgccgagcactcggcgcagcagtcctcaagccggttggaaacctacgaggacatgttcaagcgcggcaaaatcaacgtgctgaactgctcgaccacaatggaaatgggggtcgacattgggggtatctcggccgtgttgatgaacaatgtgcctccgcatccggccaactacctgcaacgtgccgggcgcgccggacgccggaacgaagcccgttcaattgcgtacaccctgtgcaaagccgacccgcacaaccagcgggcgttccgggaaccaaagtggccgtttgtcacggccattcccgcgcccggcatcacgctcagttcggagcgaatcgtacagcggcacgtcaactctgcgctgcttggccggttcctgcgaacgcttggcaacaccggaacggaccgaacgaagctcacgttgaactggttctttggtggcgaggcgtccacctgcacgcgcttcattgactggatgcaaagcgaccccgaaggcctcgaccaaagcgtcgccgacatcacgcgtggcaccagcctggcagcacgctcgcggacctcaatcatcgacaatgctgtcgcgacccttctgccaatccagtcccggtggtgctccgagcatcacaagctggttgagctgctggcctccgcagtcgacgaaccatacaggaaagcactggggttcgagctcaagcgtcatgaggacgagtacctgctgcgtgacctggctgcgcgagcctttctacccggttacggtttcccgaccgatgtcgtgaatctgaatacgtataacgttgaggatttcaaggaacgcagcaggcagcgcgaagaaaggggtcgcgaagacaacatcttcacttccaaggaacagcccactcgcggactgagcatcgcgattcgtgaatatgcaccgggtgcacaaatcgtgattgacggccgcgtctatcgctctgcgggcataggactgcactggcactccggcggcgccagacatgaggcgcagaaatttgacatcgcctggcgatgcagtcattgcgggacagccgggtacaccgaaaatgcgtactccaatagcgacaacattcgctgcacgcgatgcgaccatccggttcacgcgacggaacggaagctcatcctgcgtccgtcgggctttgtcacggacttttacgagtcgacgaccaacgacattagtacacagaaattcatccgggtggcgccaccccgaatccagctcgacggcgaaatgctcgcgctaccggacagccgctgcggatacctgcactttggccacaatggcagcgtcttttatcactcttctggcgagcacgaaaacggatatgcggtatgtcttgcctgtggtcgcgcagaatcaatgacgcttgagggagaagttccaccagcgctccgaccggaaaaattccatcgtccggtcggtggagcaacgggcagtaagcgggataagacctgctcaggtgcagcggtgaagtccaacattcacctcggctatcacacggcgaccgacgtcctcgagcttgtcctgcgaagcccaacgaccggggagtggctcggtgactcccctgacgaggctatcgtcgcaaccaccctggcagtggctctgcgagacgcaattgcggacgaaattggtgtcgcgagtacagagatgggtttcggaacccgactcgacagggacccggcgaccgggaaagtccggtcggtaatccagctcttcgaccaggtaagtggcggcgccgggtttgtgctggccgccttgccgcaggtggtaaacctcctcacacgcgcagcccacaagctggactgcccgcaggactgcgaaaacgtctgttcatcgtgcctcgcaagccgggacagccgcgttgaagcggaggaactggacaggcgtgccgcaaagcgatggctcgatgaccacgaattcctgcaccaccttgagttaccggaccagtttcggaacattcctggcgcaacttactgttcgttcagtcccgaacgtttcattcgggaaagcattaacagaggggcaacgggaatccagttgatgttgacaggcgaccctggcgagtgggaccttgaccatccgtcgttccgcgacaaggtcctgacctggaaagtgaaggacttgcttgaagtttgcctcgccgtgccgtcgattaaagtcctcaccgcagagaatcggcgcagtctgaacttcttgggaaaactcggtgtgcgtgtatgtcagcatgacgccgcgggggatgccgctggcgttgcggtcatcgcgcaagtttgccgtggtgaaaccgcgcagacacttttgaccagcgaagcggctacgggtgttccgggggaaaactggctaaggacacacgataccagtgtctgggtgtccactggtcaactcaagtctttacgcgtcacaccaattgacgtcgcagcctgggaagcccgcgaatctggcgcaacggttctcgaggtggtgacggaactcaacggaccggtgtcatctttggcagcgcgccttcgcgggttaatcagcgaaagggtacccgcgctcgcgagcctgatggcgcatgaccacgcaaccgaggtgagttatagcgaccggtatctaaaatcgccgtggtcgctcatgctgttgggtggcttcctgtcaatattcaaaagtagcgaactccggcgtctggaaatagcgacgctacgccctcaggccacccaagtgagcaaccacctcaagcatgactggaaccgcccagaggacatgcgcaaattgatatgcgcatggctacaaaccatggtgtctgtggaacctcaagtcacgatggtcgagaagccctatgatttgcagcatagccgcgtcatctacgtatcttgggcctcaggcagaaaaacgaaactgattctggaccagggtgttggctattggcaaccgaagacggtatatcgggaccaggcgcactttgattttaacgagagccttgaagcgcaaggcagtcgcatggtggagcagtataaattcgctaacatggtcaatggcgggacgtggccgacattcctgtccgttgtctccgaatag

SEQ ID NO: 28373 - DNA, 3324 bp, Burkholderia sp. H160
gtgttgtcacccatgcgggcgtggctgaccgaatttttattcattcgtgacattttcagggagccaccaggcctgccgttgtaccgctaccaggtcacgcccggcgagtatcacgagcttgagcgaatgctgcgcgaccaccggatgcatgccgtacacccaacgtacggcctttcgtgggcagcagcattttgcctttttgtggccgaaagtttccggcgtgagtacgacgcgaaagacggcggctgggtgtgggcccgtttcgaaaaccgcctggactgcaagttcacgccacaacagcatggcgaactggtgcgacaggggctcggccagtactggaaacgcccgattcgacaatatctggatggcagggataacctcctcggctccctgttcacggagggcggactgccatggccgttggtgcaaagcgagtcccacggattcggccgcgtggttcgaaaggggctcaagtactattaccggacggaaggcgggctccgcacggctgcagatgtgctggctgacttcgagcaggagcttccgcagaccttccgcacacttgagacgcggcagctgctcgccggtatcgtcgaacagcttatgtttctggccacaaaatatgagctccggggtaaagccgaccccgctcaatatctggacgaggtcactccgcgctggtggcacgatttcccgctgcctctggacgagggcaacgcacgccggctgattagcgagtggctccgcgacgcgagccgtcgccgggccgaacgcgaggctgaacgcgcagaggttggcacattctcgtgcgaccaccgcttggtcgagcagcctcatggctggcgtatccgcaccgaggtgacgataccgcgcgaggcactgtttcctcttgacccccttattgccaatacgacacgctacgaactggcttttttcgagggcgaccggctccttgctagcgccggcaccgcgtatggccaccaaagcgttgaccagtccgcgctgtcggtacgcttcattcgcacccagatttcaattgaccggtcgcagccgtgtgacgaactgacgctgcgcctgctcgcaaacggcagctccgcctacaccgtccgcttcgagcaaggcgcgctcgacgagcaggaactccccctcgtcttcgaatgcaggggtgatgaatggtggttcatcgccagcgcgtcgtgctcaaccaccagcgaccgggttcgcgtacaccttccggaacggttcagttattcgtgtgatggccgggtgagcgttcaaaagagtgcagaaaactcactctggcttgaaacatccgataacctgcacctcacttcagacaccggcgaccgctacaccatcaagctgagaacccgtcaggaacaaaacgcccagctggtcctgaaaggcaacacggcgcattttgcgtcggtgccgcaggtggtgtacctgggttggccccagctggacgcctcagcggacgccggggaatcccgaccgcgaatccaggaggttgctaatcgccagcagctcatgcgcataaatggcggcgaaccgctggggggtatccgttatatcgcgagaaatgcgcttggtgagattctgctccagcgacgctttggtgtggttcccgccggtttcgcaatacaggcttttcccgcctcaagcagcaaacccgcccgccttgtattgaagaacgcgcgggcgctcgacctgcaggttattgacagcgcaatcaaaagccgtgtggagatagtcgaccaggacaccacaatcacactcgagccattggccaacgacccaccgtcattcctgacactagaagccaggggacgcacaaattccggatgcgacccgattcagttcaggctggcgtatccctaccagggcgctcggctactgggttccgatggtgcagcaatttctcggcgcaactttacccttgttgaacttgtgggccttcgcattgcactcgcaacgtcgacgtctaatggtaccgaattctgcctgcacctcgaactggcgagccgggaaggtcgatgcgcccgccactattttgtgagagcaggcaacacgccagtgctgctcagcctcttcagttatcaggctgacatgctgcagatgctcggcgcggtcgacgaccaagacgcctatctgcgcgttacggtggagacgaatcagccactcctgcatttcgacgtccgacgctataacggcgccgttcgatgggaagacaaggacacgttcagcctgatgaccccgtctggggggccgctggatgaggaggtggccgtcgaggcgatgctcctccccgacccgaaacaggcgcacgtcgaaatccccgagatgaccagtgaaggagcaagtaccggacgtttccggacgctactatcgatgcaccgcgacggaccgtgggtcatctatcccgccaccggttcatcaactcagttccgccccgtactttacgtacctgaacaattatccgagaccggcataccagccgaaatccgctcgctccataccgccgcgcgggtctttcatcccgtaaaccatccagatgtcatcaatcagcagattgccgatatggcaacagacctggaccacagcggctggcaatatctcgccgacctccggcagcactaccgtcatcttcccctctccgtattcgaatcctggctggcgctgtcacgcaacccgtcagcactcgcaactgctgtattccggcttgagctcgacgaagcgttctgtgaacgcatccatgatgagctcgcagtgctatgggaatgcatcccgctgccgggttgggcaaccgcctatgcccgctttcgcgagtggctcgttcgacagggcgttcctgaagttctgctggatagtttgctcaggaatcgccaagccatgctccctgccgtcgtatcgggcttcaaggaagttggcaactatctggagaccgctgacccgaccagcctgcacaggcttcccgtagaacacatcctgccggactggtaccagcaattgcgtcgaactcacgagggcaacaaccgctggccaaccgacctcggttttcgggtcaaggaatggataaggaagcagccactaccaagccagatagccaatctgtcgatggtcgaatttactgacgccgtgacatacctgccaatattcatggcctatgtcacggccgggatggcgcatatcgaagagctcaaggagaggcgttcctatctgaagttcgccatcaagatggtgtccgacttcgaccggagcagctggtacaccccggttcacggaatgatggtctcctatctactcgcatccgcacgggcctag

SEQ ID NO: 28374 - DNA, 6243 bp, Burkholderia ubonensis
atgcaatatttcacccgcctgattgatcagactctgaaccgtacccgggaagcgacgctcagcattctcggcataagcgatgttccgttgcgaaaccacctgcgcgaacagatgggcgatacgcttggcgcggacggttgttttctggcaccccctgtcgttgagcacacgttcggctggcaagaagcggacgacgtcacgctgggagatctgcgcggctcgctcctgtcgcggcgtctgatcgatacgttgcaaagagccccgcatccctatcagttcacatcggacagccgtccatatgtgcatcagttgaaggcgtggaaggtgctgctggacgagtcgccaagatcgaccgtaattaccagcggcaccggttcgggtaaaaccgagtgcttcatgctgccgatccttgaagacttgatccgtgagcatcaggccggtacgggccagcttactggcgtgcgcgcgctgtttctctatcctctcaacgcgctgatcaattcgcagcgcgaccgtctgcatgcgtggacgaaggaattcggcgcggacattcgcttctgtctgtacaacggtaagaccgaggagtcagccgatacggtgcgcaaggagcaggcgacgcggcccaatgaaattctctctcgcgaagaacttcgcaagcatccggcgccgatgctgatgactaacgcgaccatgctcgaatacatgctggtccgtcaggtcgatgccccaatcttggagatatcccgtcagcaacgctcattgcggtggatcgtgctggacgaggcgcacacgtatgtcggatctcaggctgccgaacttgcgctacttctgcgacgggtagtgcaggcgtttggcaagaagccggaggaaatccgtttcgtcgctacatccgcgaccattgctgaccgcgactcggatgacaggctccggcagtatctggccgctcttgcgggcgtcccggccgagcaggtcgtcatagtcagcggcgcgcgacgcgtgccggatctgccagcaactgtcgtcaagtggcgaagcatcgacgatgtgcgttcgatcgaagctgatcaggaagtcgcccccgctcgttttgccgcgctggtggaacatccggtagctgctgcgctgcggcacgcgattgtcggcaacgggcgaccgcttgacctgaacgaactcgagaagttgatcggcgacggtctgcttgcgaagacgaccggcccgcgtcagcgtgaagtgttggagtggctcgacctaatgagcggcacgcgtcgtgccaagggcgaaccgccgttcatcaagctgcgcattcacctgtttcagcgcatgctgcacggtttgtgggcctgtgttgatgcgcattgcaccgcgaagccgttgacgctcaaagactggccattcggcagtgtttatgtggcgcagcgcccgagatgcgaatgtggcgcgccggtttatgaactcgcattctgtgacgactgcaagacgccccatctgcttgcagaggacagcaacggccaacttctgcaacgcagcccgtatgcgaacgacgagttcgaggtgagttatgaagcgagcgacgaagatcagccgaattcggacggatcagattccttgtacacgcttccggcgacgagactcttaatcgccgcaacgctcgcgagtaaggaaccgtatttgccgatgacgctcgatctgcgcacgctggaactcggcgcacccgcagccgacgcacgaagtctcgctatcgcgccaaacgcgcaagcatgctgttgccattgcgcggcggactttacagcagcgccgcgtctgcttcgccagtcctatctcggctcacctttctacgtcgccaacgcggtgccgacggtgctcgagttctgtcccgatccgttgcctgaagattgcgagggcaagtcgcccgacgagctaccggggcgaggcagaaaactcattacgttcaccgacagccggcagggtactgcacgcatggcagtgcggatgcagcaggaagccgagcgctcgcggctgcggggactcgtgttcgagattttgcgcaacgcacaggcgaagatcgatgccggcccgaaagataagccaaccgcaaactacgaagaaattgtagcgacggcgaaaacgctagaatcgatgggctacgctcagaaggcggccgagatactcgccgacgcggagaagaaaaaggcaggcgtcgacgtccaacgcatgaacgtaatcacctggcgcgatatggtgtacgagcttgctacgtcgaaagacatttcacagtccatcctcgactacaacaagtacgccaacccagaactttttggctacgctgactctgccgcgcccatggcgcgactgctgctcgcccgagaatatgcccgccggccgaagaaccagaatagcactgaaaccctcgcgttggtgagcgtcggttatgaggggatggatcggatccgcagcgcaccgaacgtgttccttcaacacaggccgggaccgatgtctggcacgacccgcgacacgaatctgacgcttcaggactggaaagactttcttaaggtcgcgctcgacttccatgtccgcgaaaatacattcattcgtctcaatccgagcgagcagcgatggatgggagcgcgcttcacctcgaagcaactaatgggcccgcactgggacggcgcagagagcaacacgataaaaaaatggccacaggttcgaggcgctgtggcaagccgcctcgtcaagttgctcgagcttggctgcggtctcgaccggtcgcgcgcggacgatcatgacatcatcgatcatctgctggagcaggcgtggcttgcattgatcgaagcgaagatccttgagccgatcgacgggcgctttgcgctcaatttgaacactctgaatttttcgctcgccgctcagggatgggtgtgtccgcttacgcaccgaatgttcgacacgaccttcgtcggtttgacgccctatctgccgcggcgctatcgggagggcgatttccgctgtcgaaaagtgcagcttcccgaattttcggaccttgccccgggcggtgattccgagccggccctcttgcagattcgccgcctcgtctcggaagacgcgcggattcaggcgttgcgcgccgagaatctgtggacagacgtcagcgaccgaaccgccgaagggggattctattaccgtacggcggagcattcggcgcaacagtcttccaagaaactcgaagtctacgaagagttgttcaaacgtggcaagatcaacgtgctgaattgctcgacgacgatggagatgggcgtcgatattggaggtatctccgcggtcgtgatgaacaatgtgccgccgcatcctgccaactatctccagcgggcaggacgtgcggggcgccgcagcgaggctcggtcgattgcctacactttgtgcaaggcgaatccccacaaccagcgtgtattcgacagaccgacgtggccattcgtgacggcgattccagcgccgggaatcgcgctgagctcggagcgcatcgtgcagcgtcatatcaattcgatgcttctcggccgcttcctccgcacgctgggcgatacgggcacggatcgcaccaagctaacgctgaagtggtttttcggcggcaaggacgattcgttctgtacgcgtttcgttgactggttgcaaagcaagcccgatgaactcgcctctagcgtaaaggaacttgcgcgaggcacgtgcctcgcaacgcgatcgtggcagtcgctcgctgccgatgccgccatgtcgatccagccgttgcaggagcgttggtgcgccgagcacgacaagctgacgcaacttatccagaatgcatcggaagcggcgtacaaaaaagcactcggctacgagcttaagcgtcatgaggacgaatacctgctgcgggatctggcgatgcgcacgttcctaccgggccacggttttccaacggacgtcgtgagccttaacacatataacgtcgaagacttcatcgagcaagcgcgcagaaaggaggacaagacccgcgaggacaatatcttctcgtcgaaggagttgcccacgcgcggcctaaacattgcaattcgtgaatacgcgccgggcgcgcagatcgtcatcgacggtcgcgtattccggtcagctggcgtcgcgttacactggcattccggaggggtcgtcaacgaaccgcagaaattcgacatcgcatgggtctgcaagtgtggagctcaaggttttgtcgaaaatgcctattcgaatagcgatgtgcattgcacccgctgcggtgaaaccattgcgctgtccgctcgtcagctagtgctccgaccttcgggtttcgtcacggacttttacgagtcgacgaccaacgatgtcagttcccagaaattcatccgtgtggcgcagccacgtattcagctagacggcgaaacgctctcgctgcccgacagtcgttgcgggcacttcaacttcggccatcggggcagcgtgttttatcgctcgtcgggcgaacatgaacatggctatgcggtctgtctgtcttgcggacgcgccgaatccatgacacacgatgggcaggtgccgaaagcgcttcagccgggcaagatgcaccggccggtcggtggcccgaagggcagcaagaaagaggcgtcctgctcgaacgaagcggtaaagcctttcgtgcacctcggtcatcacagcgcgactgatgtgctcgagctcgtcctacgcagcccgaagacaggggaatggctcggcaattcggctgacgaccgggtcgtcgccacgacgcttgccatcgcgatgcgcgatgcgatcgctgcggagatcggtgtggcaagcaccgagatgggctacggtacccgcccggagcgggatcatgtgacgagcaagattcgcaccgtcatccagttgtttgatcaagtgtctggcggcgctggttttgtgctgagtgcgctgccgcaggtggtaaaactgctgaccgatgctgccagccgtcttaactgccctatcaattgcgaaaacgtctgctcggcgtgcctcgcgagcaatgacagcagggtcgaacaagaagagctcgatcgccgcaaagcgaagcaatggctcgaagacaatgcattcctagcgcacctcgaactgcccgccgatttcagcgcgattcctggcgcagcatactgttcgttcggcccggaccggttcattcgcgaacgaattaatcgtggcgcgaagcagctcgatatcatcctgagcggtaattccgacgattgggatctcggccattcgagcttccgtgatcgcatgctcagctggaagattagcgatgggcttgacgtccgcattctcgtgccatcgtcggcggtgttgtcggtggcgagcaagcagagcctgagttttcttgccggggccggcgtgcagatcggatgcagagaaggcacggaaatggtagcgggcgtatcggccattgcgcagatcggaagcggagaggtcacggaaacacttttcactctcgatcgagatgcagcgacgccaggggagcattggttgcgcacccgtgacacgagcgtctgggtgtcttcgcgggacgtgggcgtaagccaagcatttccgttggatatcgccggctgggatcttcgcgacaagggggcaacagtcgttgaggtttcgacggaacttaacgggccagtttcttcactgacgacgcggttgcgtaagatcttcatgagtcaggctcctggacttgccgcattgctggaaacagatcacgccgtcaatctggaatacagcgaccgctatctcaagtccccgtggtccatcatggtgatgagcggctttatggcgctgtttcgcaacgagcggctcaagcacttgcagattatcacgctcgaaccatcctctccggctacgccaagcagcgttatcaagcacgactggcccaacgcggcgcatatgcatgacctaatcgaagcgtggctgaccgcaaccgtttcggtgaagcctctcgtgacgatgtataagaagactcatgacgtgcagcatagccgcgttctgacggtcacttgggcatcgggcaagaaaacgaagctcattttcgatcagggcgcaggttactggcagccacgagcacagtacgccgaacaacttgtgttcaacttcaacgcgaaaacggaaccgcaggctttgcggatgttcgagcagtacaagtccatcaacatggtcaacggcggtgtgtggagcacgctgttttatatcgtcgaggaatga

SEQ ID NO: 28375 - DNA, 3141 bp, Burkholderia ubonensis
atgtatcgtcggcaatacgacgcgaaggcgatctcgtgggcgtgggcgccgtttgagaggctcgtggattgccagttcaacccgcagcagcgcggtcagctagtgcggctcggactagaatactggaagcgtccggtacgcaagtggaagcgtccttctgacaaattcgaggacggacgcgacaatctgcttggttcgctattcacggagggtggcctaccgtggccgctggtacagcgggatacgcacagcttcgggcgagtcgtcggtaaagggctgaaataccactatcgaactgaagcagggctgcgcacgactgcggatcttcttgccgatttcgtcgaagacctgccgcagacctttcgcgattctccggaaacgctgcacttgctcgccggtgtcgttgagcagctcatggagctggccacacgtcatgaactgcgcgacaaggaagacccggcgcgctatctggattcggtggaggcaggctggcgcaacgattttcccctgccgctcgacgaagccaatgcgcgcaacctggtcaacgactggctgcgcgatgccagccgcagccgcgcagagcgggaagcgctgcgcacaaagggcacggcgttctcgtgcacgcatcggctgattgaagagccgcagggatggcgcatctgctcggaggtgtcggttccgcgcgtcgcggaactctcgatcgacgcaggcgtcctcaaccctggccgcttcgaactggcgttcttcgagggcgatcggttgctcgcacgtgctggagtcgcatacggctcaaagcgcgaaggctccgacgacgtatcggtgcgttttgtcaagactcaattttcgttggatcgcgtgcgcttcgaggatgcgctcacgctgagtttgctcgcgaatggttgcgatgcatgcatcgttccgttcgatcaggccgcactcgatgagactctgccgctcgtcttcgagtacaagggcgatgaatggtggtatctcgcaagcgcgtcgtgttcaactgcagcggcccgagtccgcgtgcgtttgcctcgcggcctaagctacaggtgcgacggtgcggtgacgatgcaccaggaagcgacgggcgacgcgcgttggatcgaagcggacgaatcgctgctgctcttttcggacgacggggaccgttacgaggtgagtctgcgcgctggcgcgcaaacgtcgcacatgctctcgcttaagggtgtgccgacgcattatgactccgtgccgcaagtggtctttcagggctggccaaagctcgatgccacggaggccgacggcgatgcgcctgtgccgtcgatccgcgagttcgtgaaccggcgacatctgacgcgagccgatcatggcaaattgttcggtgtctttcactatctggcgcgcgatacgagcgacaacatcctcctgcagcgccgcttcggcgtggtgccgttcgggttcgcgatcgaggggtacgccgcctccgggggcaaattggcgcgcctcgtgattagacagtcgagtcagctcgaaatgcagatagtggatcgcgccatccgatgtcgcagagaagtccacggacaggacactgtgatctggctggagccgcagacccagccccttccgacttttctgacattggaagtgtccggaaacggcagcgcacccgtgccgatcactttcaaagtggcctatccggacgaggctgcgcgactgatcgatgccaatggcgcgatcatcggtcaccacgacttcatgctgactgatctgctcggcacacgcgtcgctctgtcgacatcacggtcgaatggcacgcgcttctgtctccaactggaactagtcagcaaggaagcgcggtgcatgcgccactattacattgccgtgcgcggcaagacagtcctgctgagcctcttcagctatcagactgacatgatgcagatgctgggcgcggtcgatcagcaagatgctttcctgcgagtgcgagtggaaacggatcgcccgttgctacagttcgatgtgcgtcgctacaacggggctcattggcgcgacgacggagacccctcgacgttcacggtcacggatctgtcgcgcggcgcgctgacaacgaaagtctgcgtacaagcgatgcttctgagcgatccgaagcaggcgagcgtcaacattcacgagcagttgacgcagaatgtcggcaccggccgcttcagggtgccgccgtcgatgggcgccgaaggtacatggctcatttttcccgcttccggatcgccgactcagttccggccgttcctccactctggcgagcacatcgagtctgatgtacccgagagtgagattcgatcactgcatgaggctgcgcgcgcctttcatccagtcaagcagccttatgtcatcgcacggcagatcgcaaacatggccgacgatctcgaccatagcggatgggagtacctcgcggatctgaagcaacattattcacatttaccgctgtcagtgtttgagagctggctggcgttgtcgcgcaatccggcggcgttggccgttgcaattttccgtctcgaagtagatgaaagtttttgcgcgcggattcgcgatgagctcgctgtgatctgggagtgcgttcagcttcagcaatgggcagcggcttatcagcgctttgaagcatggctcggtgcgcggggattgccagacgccttttcagacaacctgttgttgaaccggcgccagatgctggagtacgtgctgggcagcttcggcggaagcgggttgacaccgtatctgaaaactggcgactcgagagtgatgcaaaagtaccgcatagaaggcattttgccgcatctttaccaggatcttcggcgtgtgcacgacggggaccactggccgactgaactgggtccggcgttgcgcgactggctcggtcgacagaagttgccgcggtcggtccttgagctgtcacggatcgaatatacggacgcggtcgcaattctgccaattttcatggcctacgtaaccgccggtcgcaccactatcgaagaattcaagaccagccggtcatacacgaggttcgcgattaagatggtctcggacttcgatcgctggaactggtatgcccctgttcacggactgatggtttcctatctgctcgcaacgcaagaatga

SEQ ID NO: 28376 - DNA, 6243 bp, Burkholderia ubonensis; identical to SEQ ID NO: 28374

SEQ ID NO: 28377 - DNA, 3141 bp, Burkholderia ubonensis; identical to SEQ ID NO: 28375

SEQ ID NO: 28378 - DNA, 6243 bp, Burkholderia ubonensis; identical to SEQ ID NO: 28374

SEQ ID NO: 28379 - DNA, 3141 bp, Burkholderia ubonensis; identical to SEQ ID NO: 28375

SEQ ID NO: 28380 - DNA, 6255 bp, Burkholderia ubonensis
atgaagtactttaccaacctgattgaacaaagtctgagtcgcacccgggaagctacgttgagcgttctcggcatcaacgacgagaatctgcgacgccatcttggcacgcagatgaacagcgagcttggctccgacgggtgctttctggctccgcctgttttcgagcacacctttggatggcaggaagccgaggaaacaacgctgaatgacctaaggggcaagctgctgtcggcaagtctgctcgatacgctccaaagcgcggacggcccctaccgcttcgcaccgaatgcgcatccctacgtgcatcagttaaaagcatgggaaacgcttctggcgcccactccaaaatccgccgtcgttacgagtggcacgggctccggaaagacggaatgcttcatggtgcccatacttgaggacctggtccgtgagcgtgcaaagctggggcagccactcgtcggcgtacacgcgcttttcctctacccgctcaacgcgcttatcaattcacagcgcgaacggctccacgcctggacgaagccgtttggctccgacatccgcttctgcttgtataacggcaaaactgcggaaagcgcaagtgaagtgcgcaagctgcagcacgaaaggcccaacgaggtattgtcgcgggaggaactgcgcagacagccgacgccggtgctcatgaccaacgcaaccatgcttgagtacatgttggttcgccaggtggatgcacccattatcgagctgtcacggcaacaccaatccctacgctggatagtcctggatgaagctcacacctatgtcggctcccaggctgccgaactagcattgcttctgcgacgcgtggtgcaggctttcggaaagcatcccgaagaaatccgatttgttgcgacttcggccaccattgccgacagcaacgcaaatgaacgactgcaacagtatcttgcaagtctggcgggggtgcaccccgagcaggtagtcgtggtgggaggctcacgaaaggtaccggacgtcggtagcatgggaacaccggacctgcgaagctatgaagcggcgtgctcaattgacgccgaacaggaagtttcggccgcccgcttttccgtactcgccaatcatccggtggccagcgcacttcgccatggcattgtcagcaaagggcgtccgcttgacctgaatgaactcgttgatatcggcgacaataggctgcaaggcaagactttggctgaacgacaacgggaggtgctagagtggctcgacctgatgagcgggacacggcccgcagccaacgagccaccgtttatcaagctgcgcattcatctctttcagcgcatgctgcacggcctatgggcctgcatcgatgcctggtgcagcgccaaaccgactgggcttgaagcatggccgttcggcaatgtctacgtcacgcaacgctctcgctgtgactgtcatgcgccggtcttcgagcttgctttctgtgacgaatgcaagaccccccatttgctcgctgaagaccggggggggcaactgctgcaacgcagtccgtacgcaagcgatgagttctcgctcagctacgaaagcccggccgaggacgaaccggatatcgacctgtcatccggcccttcgcggcggcaggccgccgagaagttcgtcatcgctgcggcagatacccaacatgaaccgtattttccgctacaggtcgacctatcaaccctcaatgtaggcgccctcgcgtcaccggatactagagaacttgttgttgcaccggaatcgctggcgagctgcagcaggtgtgaagcgagtttcaccggttcacatgggccgcttcgcaaggcctatctcggcgccccgttctatgttgcaaacgcagtacccacggtcctcgaattctgccccgacccgacgccagaagattgcgaaggaaaatcgcccgaagagcttccggggcgaggccggaagctcattacgttcaccgatagccgtcaagggaccgcccgcatggcagtgcgcatgcagcaggaagcggagcgctctcggctacgcggactcgtctttgaaatactgcgtaacgcccaggcaaagctcgattcaaaacccaaagatattcctaccgtcggctacgaagcgctcatcgaacaggcgaagcgccttcagagtatggggatgaacgacatggccgcacagatgctccgggcggcagaggaaacgaagtccggagtgtccacaagtgggaccagcgaaatgtcttggtccgacatggtcactgaacttgcaacgtcaaaagacatcgcgctgtcgattcgggactacaacaagtacgcaaatcctgaactcttcgacgggcacgacgccgccgcaccgatggcgcggctgctgcttgcccgagaatatgcgcggcgccccaagaatcagaacagcactgagacattgggtctgattcgcgtgagctatcgtgggctcgatagcattgcttcggcgccagcattatggcttgaccgcaaagcggctcccctcccgggtgaaaccacctcctccaacctgactctgcaagactggaaggattttctcaaggtagcgctcgactttcacgtccgcgaaaatacgttcatccgcctcgaccccacgatgcagcgatggatgggggcacgattcacgtcgaaggtcctcataccgccgaagcgggaggccgacgaaagcgccacgctcaagaaatggccacaattcaggcaaggcagggctcatcgcctcgttaaattgcttgagctgggatgtaacctcgaccggagccaccccgaagaccaggacatcattaaccacttccttgagcaggcgtggacggctctggtaggcgcaacgatactcgagcagtttgaagggggctacacactcaacctcaacaccttgaccttttcgcttccctctatcgcctgggtgtgtccgctcactcaccgcatgttcgatacggcgtttcgcgccctgacgccatacgtgccggaccgctttcgcgaaggcgattaccgctgccggaaggtgcaactccccaccttctcgctgctatccccagccggcgatgccgaggctgcgcagtcacaggttcgccgactcgttgcggaaaatccacaaatccagcaattgaggtcacaaaacctctggactgacctttgtgaccggactgccgagggcgggttctactatcgcactgcggaacattcggcgcagcaatcctcgacccggttggaaacctatgaggacatgttcaagcgcggcaaaatcaacgtgctgaactgttccaccacaatggaaatgggggtcgacatagggggtatctcggccgtcgtcatgaacaatgtccctccgcatccggctaactacttgcagcgagccggccgagccggccgccgaaacgaagcccgctcaatttcctacacgctatgcaaggcggacccgcacaaccagcgggcgtttcgggaaccgaagtggccgttcatcactgcaattccggcacccggcatcacgctcagttcggagcgaatcgtacagcggcacgtcaattctgcgctgcttggtcgattcctgcgaacaatgggcaacgccggaacggaccgaacgaaactcacgttgaactggttctttggtggcgagacgtccgcctgtacgcgcttcatcgactggatgcaaagcaaccccgagggcctcgatggcagcatcgcggatattacgcgtggaaccagcttggcagcgcgctcgctgacgtcaatcatcgacaatgccgtgacgaccctgctgccaatccagtcacgctggtgttccgagcatcaaaagctggttgagctcctggcctccgccgtcgacgagccttacaagaaggcgctcggttttgaactcaaacgtcatgaggatgagtacctgctgcgtgacctggccgcgcgagcctttttgcccggttacggctttccgactgatgtcgtgaatctgaatacctataacgttgaagatttcaaggagcgtagccgccaacgcgaagaaaagagtcgtgaagacaacatcttcacgtccaaggagcaacccacacgtggattgaacatcgcgattcgtgagtacgcaccgggcgcacaaatcgtgattgacggtcgggtctatcgctctgcgggcatcgggctacattggcactccggcggcgccaggcatgaggcgcagaagttcgatatcgcgtggcggtgcggccattgcggggccgccggtatcaccgaaaacgcgtactccaacagcgacagcattcgctgtacgcgatgcgaccatcccgttcacgtcactgaccggaagctggtcctgcgaccgtcgggctttgtcacggacttttacgagtcgacgaccaacgacatcagtacacagaagttcgtcagggtggcccctccccgaatccagctcgatggggaacttctcgcactaccggacagccgttgcggctacttgcattttggccacaatggcagcgtcttttaccactcgtccggcgagcatgaaaacggatatgccgtatgtctggcgtgcggtcgagcggaatcgatgacgcacgacggcgaaattccgccgtccctccgtccggataagttccatcgcccggtcggcggagcaacgggcagccagcgggacaagacctgctcaggcgcagcagtaaaggccaatatccacctcgggtatcacactgcgacggacgtcctcgaacttgtcttgcggagcccaacaaccggggagtggcttggcgactcacagcaagaaattatcatcgcgaccacgctggcggtggcgttgcgtgacgctattgcggacgaaattggtgtcgcgagcacggaaatgggcttcggaactcggctcgacagagacacggcaaccggaaaagttaggtcggtagttcagcttttcgaccaggtaagtggtggtgcggggtttgttttggctgcattgccacaggtgataaacctgctcacgcgcgcggccaacaagctggactgtccgcgggagtgtgagaatgtctgttccgcgtgcctcgcgagccgtgacagccgtgttgaacaggaggaacttgaccggcgtgcagcaaagcaatggctcgatgacaacgaattcctgcgtcaccttgagctgccgggagagtttcagagcatctccggcgcgacctactgttcgtttagtcccgagcgcttcatccgcgaaggtattaacagaggtgcaacggaaattcagttgatgttgaaaggcgaccccagagagtgggaccttgaccatccatcgttccgcgacaggatactgacgtggaaagtgaaggattcgcttgaagtttacattgtcgtgccatcggtaacgcttctttcatcggagaacaggcgcagtctgagtttcttgggcaggctcggtgtgcatatttgcgagtacgacactgcacggaatgcattgggcattcctgccatcgcgcaggtttgcaatggcgaaaccacacggacgctctttaccaacgacgtgatggcgggtcttcctggggaagactggctacggacgagcgatagcagcatttgggtgtccaccagtcaggtcaagcctctggacctcaccccgcttgatttgtcaggctggtataccgacgagtcaggtgtaactgttctcgaggtcgtgactgaactcaatggaccggtgtcgtcgttggtctcgcgactgcgcgagctaatcagcgaaaaggtacctgcccttgcgaacctgatagaacacgaccgggcaaccgaagtgagctacagcgaccgatatctcaaatcaccatggtcactgttggtagcgggtggattcctatcattattcaagaatagtgggctgcgccatctggaaatcgcaaccctgcgccctcagcccaccacccaagtcagcaacagcatcaaacatgactgggggcgctcggaagacatgatggaactggtcaaggcgtggctgcaaactatggtgtcgtttgaaccccaagtcaggatggtcgagaagtcttatgacctgcaacacagccgagtcatctccgtgtcttgggcttccggcaggaagacgaaactcatcttggaccagggggttggctactggcaaccgaaggcggcatatcgggaccagttgtatttcgattttagcgggagccttgaggcgcaggccaacagcatggtggaacagtacaaaatcaccaacatgaccaatggtgggacatggccgaccttcctgtctattgtctcggactag

SEQ ID NO: 28381 - DNA, 744 bp, Burkholderia ubonensis
atggcaacggacctagaacacagcggctggcagtatctcgcagaccttcgacagcactaccgtcatcttcccctttccgtattcgaatcctggctcgcgctgtcacgcaacccgtcggccctcgcgattgctgtattccggcttgaattcgacgaggtgttctgcgaacgcattcgggacgaacttgcagtgatatgggaatgcatcccgctgccgagttgggcaatcgcctatgcacggtttcgcgaatggctcatgcgacagggtgttccagaggccttgctgggcagcttgctgaagaatcgccaagccatgcttccggccgtggtgtcagggttcaaggaggttggcaactatctggagacgcatgacccgaccagcctgcccaagcttcctatcgaagtcatcctgccgggctggtaccaacagttgcgccaaacgcacgagggcaacaaccgttggccaactgacctgggctttccgctcaaggaatggataaggaagcagtcgcttccaaaacagataaccaacctgtcaatggtcgaatttactgatgccgtcaccttcctgccgatattcatggcgtatgtgactgccgggattgcacatatcgaagagctcagggagagccgttcctatgtgaggtttgccatcaagatggtgtccgactttgacaggagcagctggtataccccggttcacgggatgatggtctcctatctacttgcatcagcaccggtctga

SEQ ID NO: 28382 - DNA, 6243 bp, Burkholderia ubonensis; identical to SEQ ID NO: 28374

SEQ ID NO: 28383 - DNA, 3141 bp, Burkholderia ubonensis; identical to SEQ ID NO: 28375

SEQ ID NO: 28384 - DNA, 6189 bp, Candidatus Contendobacter odensis Run_B_J11
atggaacgcagccagttttacagtacgctcattgagcagttgagccgacgcgccacccacgccgttttaggtttatgcggttttcgcaatgatgcgctgcgcgaatatctgcgcgatctgtttgatcgggatgcgggaatgccgggcgcatttctggccgatccggtgtttgaagccagcttcggctggcaactggcggaacgaacgctgggcggactggagggcaagctgctgcatcctgatctggtgcgggcgctgcgcgaaccgcagaaaaaaggcttgagtgaggattacagctttccagcgcggcagcgtccctatcgccaccagttgcaagcctggcaaaccttgattgagggatcgccgccgcgttcagtgctggtgactagcggcaccggttccggcaagacggaatgctttctgattccaattcttaatgatctagcgaccgagcttgaacagcgccagaacgcgccgctgattggagtgcgagcgctgtttctgtacccgcttaatgcgctgatcaagagccagaaggatcgactggtcgcttggtcggaaccgttcaggggtggcctccacttttgcctttacaacggcgatactcccgaacaggccaaaagcgactggctatgcgaagtggccgaccgccgaaccttgcgcaaagacccaccacccctgctgattaccaatgcgaccatgctggaatacctgctggtgcgcaatgaagaccggcccatcattgagcaatcgcaaggtcagttacgctggatcgtgattgacgaagcacacacttatattggctcccaggcggcggaattgacgctgttgctgcggcgggtattgcacaccttcggctgtcatcccggcgaagtgcgtttcatcgccacgtcagccacgctgggcgatgcgactgaagcctcccgtcgtcatctagccgaatttttggccgatgtggccggcgtatccgtggatcgggtgcgggtcatcgaaggtcagcggcagacgccagccttgccggagacgctgcaaaaacttaatcaaccatttcccaacttggcaacgcttcgcgccgcttctcccgttgaacgctttaccgccttggcgagcaatcaaccgttgcgagcagtgcgcgaacaattggttaaggaggccagccgattaagccagcttgcctgcattctgctggataacgatgaagctcctgcgcggcgggaagccttgcaatggcttgatctctgcaccacagctatcaatgcgcaagacgaaccgtttctgccattacgcggccatttctttcaacgcaccgtcagcggattgtgggtttgcgccaatagtgcgtgttctgggcgagcgaatacggcactggatcatgctgattggccgtttggcgcaatatttctggagcgacgggaacattgctcacattgcgattacccggtttttgatctggtgcaatgcggggaatgtaaggccgaatatctgtccgccgtcgaagtgcatgagaaaggtcaagaatggttgcgtccacaggaatacgatcaggatgaagatgaatttcaacaggaattggaaccgctggcgaatgatgaagaggagaatgaggctaaagaatccaatacaatctctaccaaacagccgcgtctattaacttcattcgctcaagcaaatgtgtggaattggagattagcacaagatcatagccttgatttatccggccaaaaaggaattctgatccaactgcgcatccctggcgagaacggcttggaatgtccggtatgccgtgagaaaaatggtgagcgtaaattatttaatccggttcgagttggcgctccttttttattgggtgttgcaattccaactctgcttgaagctatgccaccattggcggataagctggaagcgcttcctctcgatggacggcgtttaatcaccttcactgatagccgccaaggcactgcccgcattgccgttaagttgcaacaggaaagcgagcgcgattatgtgcggagtctgctttatcactcgctgattgccagcgtccagcctgccgatcctaatcaagttcaaaagattcaggtagaaataaaggcactggaacctttggtacgcgctaatccgggtctgcggagcatactgggacagaaacgtcaggagttggcgaaactcgaagcacagccactgggccgactgacttgggaagaagcagaaaacaagctgtttaacacggacgacttcaaacgctggctactgccgacgctcaaagaactgacctttgatttacccgaacgtcaattagtcaaactttgcctgttgcgggagttctttgtgcgcccaaagcgccaattctcattggaaggtttgggattagtgcaactccattatccgggtttagataaggctgaaccaccagccgtgatgcagcagcgcggcatcaaaccggaagaatggcgggcgttattacaaatgacgattgattactttatgcgaagtggtaaaccaatgattcaagccactcctgatgtaactcgctggcttagttatcccggctggccgagtgttctgattccacctggtaaatttatcactgaccgaaaaacacaacgctcttggccttcaacctattcacgccgcgccaaagataaccggctcattcgtctgctcagtcatgttttccatctggatattgagattaaagaacagggtagtcagattgatgaaatgctcatcgctatttgggatggcattcgcccgctgctctcccaaaccgaaagcggttttcaattggaactggaaaagcaggcggtattcaccgaagtacgtgaagcctggttttgtctaatgacgcgccgcctgttgccggtgaccttccgcgagatcacgccttatttgcccgtactgcccgcgcctgctgccctgattcagtgtcagcgggtcgtcatgccccgtgtgccttatcccttctggtttggccgcgaccctgaagaggccgacgcttggctggaatccgatcctcaggtgcaaaccttgcgggcgctaggcgcgtggcccgatctcagcgaccgcctggcccgtcatcgccgctatttccgagcggtagaacattcggcgcaaatttccggcccggaactcactcgctgcgaaacagcattcaaagcgggacaaatcaacctattgagttgctcgaccacgatggaaatgggcgtggacatcggcggattaaccgccgtcgccatgaataacgtcccgccgcatcccgctaattttctgcaacgggcggggcgtgccggacgccgaggcgaaaccgccgccctgagctttaccttgtgcaaggccacgccccaaggcgaggcggtgttccaaaatccgctatggccatttatcagccgattgggtttgccgcgagtggctctgcacagcgaaccgattatccaacggcatttgaacgccttatcgctggccgcttttctgcgcgaccgggcacctgatattcgtcggttgcacaccggctggttttttgaaactgccgacgagcaaacctcagcgccttgttaccgattcatcgcttggtgcgaggaagtggaatctacggcaagtttgagcgatgggttaaccgcgctgactcatcgcaccgtattagccggtcaatccagcgcctatttactgggacgcaccgctgaaatgatgcgccgggccactgaacgctggctgcgcgagttaaacgctttgctggatcagaaaaagatggttcagagcaacgaagatgaccgtaaagcgcaacaagcggttgaaattcagttgaagcgcctgcgcggcgaatacctgctgggcgaattggcaaatctgggttttctgcccggctatggctttcccagcgatgtggtgcagttggtcacgactacgctggaaagcctgaaactgagtagcaatgagcgtgaagacaaccgctcgcggcgggcaggttatcccagtcgtaatctcgccatcgccatccgcgactatgcgcccggcaccgatacggtattaggcggacgggtttatcgcagcggcggagtgaccctgaattggcaactccccgctgaattagaagccgcgccggaaattcaaaacctgcgctgggtctggcgctgcaaaagctgcggtagcaatggcacgcggctgacgatgccggaacgctgcccgcattgtggtgaacgcgacggcaataaactgacccgttaccgctatattcaaccagcaggctttgccgtggacatccgcgacaagccgcataataacatcactgttcctcaatatattcctgtgcgtgatccgctaattgcgctggaagatgcggattggatgccattgccgaatcccgcgctgggccgttaccgaatgacaatgcaaggttctctctttcaccatagcgccggcctgaataaccaaggctatgcgttgtgtctgcgctgcggactggcagattcggagaatgagcaagaaggcgtactaccgaccatattcaagaatcacaaacgactgcgtggcggacgcttgaatgaccgggaaaaaatctgtcccggcaatgaagaatccagttgggcaattttgcgtggagtgcgattaggcattgccactcataccgaagtgtttgaattgcaactgcacgatcttgatggaaagcctgttgaacagatcgcggcctacaccgtagctgtagcattacgccgcgctttgtgcctgcatttgggaatcgaggaagcggaagtcggtgcattagcggcatccagtcgatctgttgataaaaagcagaaaatttcttcaatttatctctacgacactgcgatgggtggcgcgggttactccactcagattgttgctcacctatcggcattgttacgccaggcgcgtcagattttagagtgtccgcgtgattgtgatatggcctgtcagagttgcctgttgacccatgatactcaacatcatttggatgatttgaaccgccatactgctatcgcattactctcggagccatttttgaccgcgctggacttgccggaagaattacgggtgtttgggccacacagtcaattggaaatggaaccgctaccgctggccttaaatcgggaatggcaacagcagacggtccaggaattgcggatttatctcggtggcaaagcgcgggattgggaaccactggcttggcggttgcgcgatgatttaactcgttggcggcaaaccgacgcgatcatccaattgattactccagcaacaacactcagcaaattgaatagcagccagcgtgatgaactggcagcgttaattgcctataccggtgcagaactgtatcgatctctcgatttaatccaggtcggggatttgccgctcatggtggaattgggtagtgcgaatcaacagatacgctgggcagccagccatgccgacgcgctgattccccgtccgcattgggacggcggcgaaagcggcgggccattggtgcgagtgattgataatcaaccgttatcaccattgcctgagacatggcgacaccttgattcggcggaaattcgtcaaccagtgccgggagtgatcgcactgaccataacccgcgaactggacggcccatcggctgatttcggtggccgtgcctggacccttctggaacagcgggttcccgctttagccgagtacctgaacgagaatgcgcctttgcaagcggtgcattacactgaccgttatctgcgctcgccgctggcgattgtgctgctttacgagttgttgaatggtctggcctgttattccggcggcttgcaacagaccaccgacattcaaatcgaaaccaccaacctggatcggacggacacaaaaccatcgcgctggttattccatgactggcgcgatggtgaagatcgccgacaagtagttgaaacgtggtttgccgaaacttggccgaccttcgcatggcgtgaagcgccgttacacaaacggcctcatgcccgcgaattaaccttgacttggagtaatgaccatcgctggaccatccggctggatcagggttttggctattggggaatcgcgcccggagtgcgtcccgaatttccctttgataacgatgtagcgcggcaagtcgaaaaattgcggaaaagctgctttctgcttgaaccgttgaatgcgaattatccgacctattggcattgtaatcggaactga

SEQ ID NO: 28385 - DNA, 1968 bp, Candidatus Contendobacter odensis Run_B_J11
atgatcccgcaaaacctgcaacaacgactgctgtatcgtgggatgccgcgcattcaggcgcttgacccggagggccgacggttgcccacagccggacggttgcaatggcgttttctgggtgatgccgcaccttggcgcgaaatctacgaaggggcgcacgggcggatttggctacgactgatcgctgccaatggcgttgaacgctggcggcggcaggtggatgtagcgccctcgacttttcgcattgaagccgatattggaaccggaaatcaggcgggcgtggtgcgtctcagcgaattggccggagccacggtgcaacccggcgtggactgcccggccagcgtcactatgagctccacttccgatcaggcgcggatcgtttgcctgtctgtatcaggcattgcgccgctcctgacgcttttgctgcattggccgggatcgcaaccgatcccgctgaccctgccgtatccgcagcgcggcgcgttcttccagttggccgggcggcctttgctcaatgatgattggattccgctggatcggctgggcggactgcaactgtttattcaagacccggcgggcggctgccgcttttggctggaaagtacgttgatcgccgattcaaatgcggatgttccggtttcccgccaaggttttcgcgaccgtctgccgcctctcgcgcaaagtcagctcgaaatctcattattcaattggcaagaacggattgcctcgctgttagccagcagcggccatctggaagcacaggtgcaattattgattaaaaccacacaaggtgaacggctcacccaaatacgagtggcccgtttcgatgcactgattgaaccggatcgagaagccggaattgtgcggattgcggcggactcattgaagcggctggggcgggattgggaaacgcgaattcgcttggaaatgatccggctgtgggagccaggaacaacaccggttactctggctggcccggatgaaaccggcaattgggcgattccgccagatttggaacccggcccgtggtggattgtgggaagagacggcgactgggcgcgatttcggccactgctttggactgtagccgtcagcgagaacgcggtcgaatcggttgattcccgattagtcaccgctatttgggaagctaaccgtgaacagcgcgatcaacaattaaataggctgctgactgagttgggacaagacccggatcacaccgactggacattgttgttcgattatgtgcgactggcgcgggaatttccgccgagcgcgttggatgtattgcgtctactcatccagcatccgcgcatcttggcgctgaccttattcaatgtggatgaagaaacttttgaatcggtatgggcactgtccaaacaaatgccgtttttgtggatgctggtatcagtcgccgattggcacaatgcggcagtcgcttattttggcggactgcaaataacattggccgaagtggacactagcggggaaatcgtttttagtctgtttcagggattccgcgaacgcgccagcagcacccgtcgcgattattggcgatccttatgcgattggcttcaagagcgactatttcccaaccggccattaaatggaagcagcgaattaaagatggcgcggcgtcatcccattttcattgagcaacagatcgaatctgccgaacaggaattgatggagcgacatgatgcagaggaacaatggccggagggtaatcaagtgataaaccggttgtcactgatcgctgaaaaataccgctatcaacatttggatcagttttatcgtccagtgcgttacgccccatttgtcgccgctcgtatcagcctgaacggcattgatcctcctgaatcgttgatctacgaattacgcttacttcgcgcttttgattcagaatggttcgatagtgtctatgcgattgccctgactctgggattagctaccttagcgatggaaatctga

SEQ ID NO: 28386 - DNA, 6174 bp, Candidatus Magnetomorum sp. HK-1
atgactgatttttattcatccataacaagcaaactaactcttggcgcaagccgcgcagctttgggcttacgcagttttcgaagtgatgctttgcgtgagcatttacgcactgtatgggaaggggcgccaggaagtaaaaatgcatttttgtcagatcttatttttgaatccacattcaactggtgcctttcaaggaaaacctttaaatcactttcaggaaaattattacatcccgatcttgtgaatgccatgatttatccattaaaaagccataaagatgaatatgcatttccagccaatagacaaccttataaacatcaacttaaatcctggaaacaattgattcaaaaacaaccagcacgttcagtgcttgtcagcagtggtacaggttctggaaaaactgaatgctttttggtccctattttaaatgatttagctcatgaatcccaaaaatcaagtggtcggttaattggcacacgtgctttatttttatatcctctaaacgccttgataaaaagtcagcgtgatcgtttgctggcctggtcagagccatttgaaggccgaattcgattctgcctgtttaatggagatacacccaatgaagctaaaaaatcagatctaaaaagcgaaatacgtgacagaaaaacacttcgagcatcaccaccacccatcctggtaactaattctaccatgttagaatatatgctggtaagaaatgaagaccgacccattattgaaaaatcacaaggaaaacttcgatggattgtcattgatgaagctcatacctatattggttctcaggcagctgatttgacattactgattcgacgtgtgctccatgcatttgcctgtaatattgaacaggttcattttgttgcaacatcagcaaccattgcaaatacaaatgaaaaaaatacaaatacccttcgtgaatttcttgcagatattgcgggtgtaaatcccaatcgaatttccgtgatcactggttatcgagaaacccctgacttaaagatgctgaaaaaaaataaattaatatctgaacttcctgaagtaaatgacttaaaaacattatccccagaattattatatgataaattttgcacatataagcctttgcgtaaaatacgaaaaatcctgatgaaaaagccaactcctttgacagaaatcacaaactacctggtatccaaaaagcaaaaaaatcgtacccaacaaactttacaatggttggatctatgttcccaggcaatcaatgggaaaaatgagccttttttgccgctcagaggacatatatttcaacgcgctatcagtggtatttgggcatgtgccaatgataaatgcagtggcctttcgggaacacatctatgtgatggtgactggtcttttggtaaaatttttctggaaagaagactctattgtgattcctgcaaaagccctgtttttgaagttgttcaatgcaatgtgtgtggttccagctatttaattgctttggaagaatttaagaaacactcgtttcttaaacaatatcaatataatcaagatgaggatgagtttcagcaagaacttgaaccgccagatgaaggtgaacaggaagatatcgaattatctgatcaatttcaagaattccgacgattacttgttcaaaaagatagtgaacatggatcaactgcttatttgttgaacaatagacaaatagactcaaaagaaggcatttcaatatgcctgattgtgcctgatggaaatgatcgcctgcgctgtccttgttgcgaaagtcgagagcttaataattatttatttagccccatacgtattggcgctccttttttacttcaaaccgccattccaatcatattaaataaaatgcctgcttttagaaaaaaaaatgatcatcttccacataaaggtcggcgcatacttagctttacagacagcagacagggaacagcaagattttccacaaaacttcagttagaaaccgaaagaaattttgtgcgaagcattttgtatcacagtgttcatgatcgtataaagtcagccaaccagaatgacattgaaaagatcgaaaaagagataaaagcattaaaacagattaagaatccgagttccacgtttcaaaatatgatcaaagaaaaacaagaacagttaaaagaaatgaattcacctgctttgggaagactttcctgggatgatgcaatcaatcgtttacttaccaataatggctttagagattggcttctacccccattaaaagaacaaacatttggattcaaggatcgccatttggctgaattgtgtttatggcgagaatttatgcgtcgtcccaaacgtcaattttctcttgaagtttttggcttgctgcggcttggatattctgaaatagatagaattcgtgagctgccatctgttgcaaaacaatataatatcacgatagaagattggcgtaaccttgctcatatttttatggattttaaaatcagaacagaaatgtcagtggccattcccagagatatgaaacgatggatcggatatcctggaagtcctggatatattattgcacctgatcaagataaaacaaattacttacaaaaatattggccctctaccaaaacacgcataacacgaaaatctcgcattgtcagattaattgcgattgctctgaattttgacctggaagatccttcagaccgatcggtgattgaagaattattaattgaattatggagagtgattcatcccattttatctcgaacagaatatggatatcaccttgaattaaatcaacaagtggattttgttcaagtacgtgaagcatggatatgtccaatcacgcgtcgattactccccatgacatttaaaggtattactccatatttgcctcctaataaaactgcaccatcattatcagaatgtgtaaaagttaaaatgccgagcactaacaatccattttggttagataaaaatacaatatcatcgcaagaatggcttgagactgatcctgatatcaataacttaagaaaatcaggcgtctggacagatcttagtgatcgtattgctgcattttcaaaatattttgttagtacagaacattctgcccagatttcaggtccaacattgacccaacgtgaaaaactatttaaagagggcagaattaatttgttaagttgttccacaacaatggaaatgggcgttgatatcggtggactttcaaccataaccatgaataatgtgccccctcatccagccaattttttacagcgtgcgggacgcgcaggtcgtcgcggtgaaacaaaagcgttaagctatactctgtgtaaaagtacgcctcatggggaatcagtttttcaaaatccattgtggccatttacgactcaactatcgattccacaggtgtcgctccagagccaacctattgttcagcgacatattcaatcattggttttttcttattttttaaatcaacaatcacctgatgatattttaaaactttcctgtggctggttttttggagccgatcttgaagatcaaagttcgccatgtaatcattttactcatttctgtcaaaacgatgctattaataatcaattacttcatgctggaatcaatcatgtgacacagcgaacgatactggctggggtatccattcaaaatcttttgcatagaactcgggaaatgatcaaaaacattattgaacaatgggaaaatgactataaatctttgcgtaataatttagatcttgttaaaaccgctaaaggaaacagtaaagcagagcaagccattaattttcaaataaaacgaatgacaaatgaatatttgctaaaggaattggccaatcaaaattttattcccgcttatggatttgcatcaggattggcctgtttgatcacaacaactattgaacaaattaaattaaaaaaagaaaaacaaaaaaagtcaagagaagataataaagctatgcgagcgggttatccatcaagacctttagccattgccattcgggattatgcacctggaaccgatactgtacttgatggtcgagtctatcgctcatcagggataacgctgaactggcaactccctgcagaacttgaaggaccaccagaaatccaatcattgcgatgggtgtggcaatgcaaaacatgtgggggaaatgctaccagaaatacctacccatcggcctgtcctcaatgtggggaaaacaattctgataaattaaggcgatatgaatatattcagccttcaggttttgcagtggatattcgatgtgaacctcataatgatatttcaattccgcaatatcttccagtacgtgatccattagtttctcttgaaggctcagactggttatctttgccaacatctgtgttgggccgatatcgttttagcaataatgggtcattgttttatcgaacagatggcaatcatggtgaaggatttgcgttatgtcttcgctgtggccgcgctgatgccatgcttccaggtggtgatccacctgtcatatttacagaaccgcataaacgattgcgcggtggaaaagataatgatctggaacgtgaatgtccaggaagtcatgaagaatgggcaataaaatacaatatacgcatgggagtcaatatcattactgatgttctggaattgcaattgaaccagctcaatggccagcccctggatagagaacttgcatattctactggtgtttcgttgcgattggcattagcaagaaaattgggggttgatgatcaagagattagttctgtggttaatccctcaatagatgcccatggacataaagcatggtccatatatttgtttgacacaacacaaggcggtgcaggctttgtcaagtatgcattacaagagttacccacaatttttagtcatgcccaaaaaattgtaagatgtcccaaaaaatgcgatactgcctgccatgcgtgcttaatggattttaacacgcaatatcatctggatctactcaatagcagtcgtacattggaacttcttaataacacctatttaaatgcatttgaattgccatcccacctgaaagttttaggtgccaatgctaagcttgaaatggaacctctgtctatggccatttatcgggaattgcaacgaatgaatataaaagaaatacgaatctatttagatggaaatactcaacattgggagttattagattggtggatgtaccaggaactgttgtcaattgctaaaacagattgtaaaatggttatcattgtacctcaaaatattttaaaacacctggaaaggtcacaaaaagatgagttatttgtaattgcaatatcaacacacgcaaacttatatgctatatctccagaaggtacgaaaaaaagtaaagccccaaaaaatgccaaaataattgaaataggcgataatacagtttctgtatgctggtatgcgacaacacaggaaagtttaattccaggcaatcagtggggaagtggtatcaaaaacacgcaatatgtcagggttaaaagtaataaggaattaacaccagttcccaaaggtggatcatacattcaaacagaggaacttaaacagtcagaaaaacattttactgaaaccatcattaccagtgaactgaatggctcaataaaaacctttgggaaaaaagcctggcagttaatcatgtcaaatgtgccaaaactggaaaagcaattaaaagatcatatggctttggaaaaaattgtttatactgatagatatttgcgatcacctatggtattaatgctgttaaaaatgttattgaatgaattgcaaagttttaaaggtggattgcacaatacgacaagcattgaaattcataccacagaattggataataggaatattcgatctccctatttaatttctcatgattggctttatcctgatgatcgtaaaaaagtgtttgaatcgattcttacatttcataataagccactatttattgaaaaacatcgaaacgcaatcccccatgcaagagaactttgcttaagctggacagataaggtacaatttattatccgctttgatcagggtatgggatattggaaagctgagcgtgaaccttttccatttgattatagtgtagaggagcaggttgaaaagctgaaaaaagctaattttaatattttggggattagtgaggcgtatccatcacatttgtatattaaataa

SEQ ID NO: 28387 - DNA, 3396 bp, Candidatus Magnetomorum sp. HK-1
atggatttgtcccattttttatttgttcattccagaaaaacaaggccagatggtaggcctttatatgcttataaatgtacagataaattctatattaaaattaaagcatttatgttgaatcaatttcaagtaactgtaaaaaagaaacaaccgcctttattttcaattcttttttgtttgtatgcagcagagacatggcgacgaaaacatgaaagtggtacgtggaaatgggaaactatttttaaagaaatatccgctacaacgccttctcatgcttccattcatgaatgggttaaaaatggtttacactattgggaacgtgatattttatccgacaagaatggaaaaaatttatatcttgtgaccattgcctgcgagggcggccttccacttttgttgctgcgtaaagaaaatgcaaaattaaatcggttttttaaaaatttgcttgaaaaatatcattataaacgccagttgcctgattgtaatattaacaaaattgcacaaaaattatctttttcattattaccccaatctctttgcaatgatattgtatgtaaactcagcagcgatcttgttcaaaaagtcgttaatcttcaagaaaaagtacgtgattcagacaagcccattgctgccctggattctgattacccacactggcgtgatgcactacccttatctcttgaagacaaaacaattgaactccttttaaacgaccttgtcattgatgccaaaaaattgtcaacatccatacccaaaaatttacaatggcaacttttccttgttcagaaaaaaaatcgctggtgcgttgaaaagcggttgcacctgtcaacaaccatttcgggatctgtactaaagcaatggattcaaaaaaaagacttgccctatcgcatgcgtgtattgttagaaacatctgaaggaattgaacctctggcattaatgacacacatgtattctgaaaataaagatcgattatttcgttgtgaattattgaatccatatcataaaaacataacagcattattgagcattattgtatctggtaataaaattcttgaaaatctgcgtcttatccttacagatgggacttttgaatcagaattgcagtccgctggacaggatttgggagatttaccctggatatttcatgaacataatgatcaactaaaatttattggtgaaggttcaattaacgcaagcagtgaactattaacaatcctttctccttcaggtggaaagtggtcaaccaatgataatgtcattgatttcattacccatattgatgatatggatcgagatatgtatcaggtgatgggcacttgtgaatggaatcatcccgaacatggtaaatgtttgatttgttcgtcttcacaaagcacttctaatgatatcttaatgattcagggaaaaaaaatcagaagtacgatagatcgcgacccaccctttcttggtatgccagatttgtataaaattgatcaacataatgttatacaaaaagagaacaatcttcagatggaatgggcaccttctggaactggaaatcttaagtggaatagtgaccccacacactgctcaggtcctttatgggtgagatatatcaattcttcaggatatcaagtgttgcgacgaaaaattcgtgttgttccaaacacaactcaggtaaatattgttcaaacaggtgtcaatgaacacccaggtgtgattgagatcaaagggctttcaaatattgaaatcaactgtgctgatacccgatgtacataccaaagacaatctgatcatcactatgaaattcattgcctggcaaaagacaatcaattgaaaacagattttactgtcaggctggaatggccagattttcgatatattgatctacagcttccttttccttgtgcaggtgctgcttttctttgcggggaaaaacatattctttcaaatgaacgtattgcaatttcacgtttatctgccattatagcagttgctcaggctgccagcgtgaatcaaaaattttttattcatatcaccatcaaaacaagagaaaagttgttttccacgaaagtcagaaaaacgcaatatcgctattatcaagattttgaattccaggagcctttttgtcttgaaaaagatggtagacatatcttttatttacatcgaattcaagagagaataaaatcactactttcccttactggtgatattgacagtactgctgatattaaaataaaaaataatgccaatcaaatgcttgcagaaattgaagtgggtacttttgatctatggtttgaacgaaaactggatgaaaaaatggttactattcataaagattgttccaacgtgcttaaaaattatataaaagaaagtatttttatcaatatgcttcctttatgggatcctgagatatcttcaatagaacttatcagaacttcagatgaaacctggaaaatacctgacgatttaatgcctggaccttattggatagtgggtgatatcaataaggtcgcgcgatttcgtcctattttatggacaattccaggacaggttgaaaaaagtaagactcagatcgaagaagctattcgatctgaaaatgcaacaattcgaaaatctttacaaaatcaatgggttaaaagtattgcaacagatcctaatcatcctgaatggacacttttttttaaatttttacaaatggttggtccttatcctgcaagtgctttggattttttttcttgtatgattgaatcaccagaagcaatggttatggcgcttttaaagagtaatgatgatgattttgaagctgtttggttattatcttaccaactccctttctcctggtatttagttcctgcaaaagcatggttatcttcagtaagattatatattcaatccattcaagaagagctttcaagtattgatcttgatcctgatggagaattgctgttttctttttttgaaagttttcaaaatcggttgattattcgtcgacctttttttaagcaaatttgtgactggttgtgtatgaatatttttccagaaaaacaactacaaggcagtgaacttcagattgcgagtattcaacctgaatttatagaaaacaatatcaaagaccatgagcttaaatttcaggggcgctatggggcagatgaacactatcctacaggcccagaagttcttaaatggacagattctttggattttccagatcaacataaatatttaaagctgtcgcaccatatgcgggccattagatgtgctccttttgttgctgcatatatttgcctgaaaggggaaatgtacagtcagcaattactatttgaaataaaaaaaatacgccattttgacaaagaatggttttctcaggcatatgcaggcgctctttgtctgggactaagcaaaaaaacaacataa

SEQ ID NO: 28388 - DNA, 5937 bp, Cellulophaga baltica NN016038
atgtccttaacagaaactaaacctatgaattttaaagacttttattctaaaacagaaaatagattaactgatgcaattctctcgctttgggctacaggagataaagaaatgcaagactattttagatatttactttctcaagagcctataatggcagatgctgtttttcaaaatacatttccgtgggaacaaggtaaaattgagtttggagaatctgcagggatatttgatcaaaagtttataaatgctttagatgcaattaaggacaaagattttagatttccaaaagatagaaaaccatacagacatcagttgcaaagctggaaaacgcttcttgaacaaaagaaatcaattgcagttactacaggaacagggtctggtaaaacagaatgttttatgctacctgttatacatgatattcatgaaaattgcaaaaataaagatggtgtgaatgctattttcttgtatcccttaaatgcgttgatagctagtcaaagaaaacgtatgcatgcttggtgttctgctctagacggggttaagtatgcgctgttaacaggtgatactcctaatatagaaagtggaaaggagaaaaaagaaaaagcactgcctgaattaatttctagagaacaaattagagcgacaccgcctcaaattttattcacgaacccaacaatgttagaatatatgttggtccgtaatgctgatgtgccaataatagaaaagtctaaaggagctttaaggtggatcttattagatgaagcacatactttaaccggttctaaagccgctgaaattgcgctgctaataagacgtgtagtatctgcattcgaagtaaatatagaagatataagatttgcgataacttcggcaaccgtgggcagtggaaataccgattcacttaaaaaattcatgtcagatttatgtggaatttctaaagaccaaattgaagtcattacaggtgaacgtgtaaacaatcaaatcttagatcaagatatacctagtttgtctcctatgttatctaaaaacaatataaaattactgagacaaaaatttttaaatagcaaagcgatttctcaaagtgaaataggtaaagattttaaagtttccaataagctagaacagcttgcaataattgatactctttcagagcaaaagataaataatgaaaatttacttccagttagagggcatttttttaccagaggaataggtggtgtctatgtttgtacgaacaaaaaatgtgataaacataaaggagaaaaacctaataaagctatgggtaccatgtatactatcgcaggtaaaaaatgttcttgtggtcatcctttattagaacttattgcttgtagaagttgtggtaatatgatgatggaaggagaaagagttaaaggagcaactccaaaattagatagaataagacaaaaagcatctttaggttatgaagcatttagtgtggaaaatgagaccgataatgaagacgaagaaaaaagaaatgatgaaagaagagacaatgccctaattagacttattaatagagatcaaattaatcaagatattgatttaaccccatgtagtattaataatgatgatactattgattacggtagtgaagatttttttatgacagatgatactcattgtcctcattgtggaaatcaaaatgagtatccaattcattttagaatttcatctgcatttaccaatagaattctttctgatatagttttagatcaaactgaagttgccgaaagacaaacgacaaaaactctttataaaggaagaaagtatatttcatttactgatagtagacaagggaccgcaaagatttctgccttaattaatatagatagtgaaagcgattggattcgttatcaagtttatcactttctgcttaaaaaattgaagcaaaatgaagttaatgctagtactgatgaattaatacaggccagggcaatgtatgtaagtcaattagatacggctccgccattcatgaagataaaaattgagcaggatattgctaaaattaatggattgcttggttctggtaattcatcaaatttattagctagtagatcttcatggagagaaattgttgatttcattaaagagaaagaggattttaaaaccttatttaaaaaaggtgctagagggaataatttagcaattaagaatgaggcatatgctaaatccttattatacgaccagttcgcaagaagaataccaagagagcgttcattagaaaatcttggtttaataaatatagtttatccaagtcttgataatcttcaagcacctgatatagctgtaaaaatggggatagataatatggagtgggtagatcttttaaagattgctacagattatataattaggtataattttaattttttcttagatgattcgatgcgagagtttacctctaaattctaccgctctgaatctatttatccttcaaataatgaaattgtaaatgccaaaaaatggcgattatataattcacaatcaattgctcaatctcgattggttttattgatttgtgcaggattagaatggcatgatagagctgaaattaatgaagaaagagaagacttgctaaatgaattactagaaaaaatatggagaacattacagcaaaaggttttaaacgaagacggggctgggtttaagcttgatttttttgagagtaccaattttgagatagcaggtaaagagtttttatgtccggtgactaatagattaattgacaaagtattcagagggtattctcctttaattaaaggtaatttagagtcaaataatattgataactataaaatagatgagtctaagaattatgagtttcctgtattttctaaaccgtttcataagaatgcagaaaatgtaaccatatcaaatgacgaggtgtcatcatggttgaaagaaaatagtattggagcaagagaaaaaggactttggaatgatttacacgaacgtatttttgatcattctaaattatatttggcaggtgaacactctgcccagcaagataagagaagacttaaagaattagaagaacaatttgaaaacggagaaataaatgttctaagttgttccacaactatggagatgggtgtggatattggcggtatctcagctgttgtaatgagtaatgttccgcctatgccagcaaattatctacaaagaactggtagagccgggcgtcgttccgagaataaatctctggctttgactttttgtgctccaaaccctattggtctgcgtactatgaacaatcctaagtgggcgttagagcataaaatagcttcaccaattcttgctttcgatagtaaaaacatagttgaaagacatgtgaattcattattgtttggcttctttgttagatctcagcagaacaccaatagaggtttaaacgtaaaagagaatattgagaagttttattatgaagatacaccaagcatagctgaaagttttctcaattggttagatggagatgaagttttgcagtatcaaaatgagcttagttatattgttaaagacacgcaattatcagaagcaagttcagaagaattaatttcaactgttaaggataattttaaccgaactataattaaaattagaagtcaaaaagaaggcttcgaaaagaaactttcagaattaaaaaaggagtttggagattctagtcctgcttataaagcgatagggtacagaaaaggtcaattcttacagaaattcgtacttaattatctagcagaagagaactttttaccaaatgcaggtttgccaacaggcatagttgattttgaaaaaatcaccttatccgatttacaaaagagtaaaggcaaattcaaatccaatccaagttataccatttctagagcgcttacagagtttgctccgggtaataatattcttattgatgggcttaattataagtcttcaggaattgtgatgaaaaacaattgggggcaagctactgaaagaaatgttatacaaggttgtcgaagctgtggataccaacgcacagttgatttaggagagaaagtaggagataactgtcctgaatgtaacgaggttaattcttttaatggtttagatttaggggaagacagaaagtcgtatacagagttagttgaaccagcaggattttccattgatttattcagtattccaactagagttatttctgaaaaaagtaagcctcaatatttagaacctctattattgaatattaagccttgggctaaagatcagaatcaattcattgatttcagaactagttcaagtgaaacggaaacccaagtactattttataacacgggagaaggcgaggggtatagcttgtgtctagattgtggaagggtagagatgtctacggaacgtttagaaggtcatagacgtttgagaggaggaaaagatagtaaaggcgaaagcttatgttctgcccaaaatgtacgagagcatataattttaggaagtagatttaatactgattttaccgaaatacgcctaaaaaacagaaatcaatcattcgttaatgataaaatgctagcatattcattaggggttatttttagtaaatctcttgcggagtatttagcggttgaggaatctgaattaggttttggtattaaacaatacaaaggttatcaaacaatatttatatacgatactgcaaaaggtggtgcgggctacgcatcgcaattcaggttgtatgcagaaaaaatattgaatctagcattgcaagttttagataattgtgattgccaaaacgcatgtactaaatgcatgatagatagaagtacacaatggcatattgaagatttagaccgtcatatggctattgattggttgcgtgctgcactagaaaatcaacttcctaaagatttaaatactcctaataatgatgttagtttagtctttgtttctatgcatgatgaacttaaaagacttaattatcactatggtattaaatcaattaatattcatattaacaataccatttccgaatgggacattgaaagtttaaagtggttagaagaattaaagagagaaagaatagttgtcaatttaatagttgaaggtgaaatttcatactcaaacaatcaagagaaaatctccgcacacttattatcttataattttaatctaaaacaaggaacaagtaataagcttaaaaattatgcaattcatgcatctgtaattttgcaaaataacaaatgtgttggttatatttctaatgaaggttatgatagcttaagtccagaatggtctgtagattttaaagaaaagatttataaagttgaaaatttcatatcgttggatcatgctggttatgtcgtgccaaacttttcaaccagtaatttatacgaatctagaattaaaggaaatctacctagaaacagccaaagtaatgatgtagcgttgttaatgtctgaaaatctttcaaattttaaagaattgttgtcaaaggtaagtggtaagaaataccaggtttcttatttcgataagtataatcagtccgagttttcgttacgtctaattttacagtttatcaatcaaattagagaaatctggtcaatagaggtttctcagttcaatgtgcatttatctaaagcagattttaaaagtttcaattatccagagtatataatccacaattataaagaacttgatgattatgtgtatgaccttaaggagctttctgcaaattttgattttgctatcgattttaaagaagagcgacgattacctcactatcgttattttgagtttaaatcagaagaaacatcatttagtattagaatagatgcgggtatcgctcacggtttaaaaccaatagataggttgacatcaaatgatatgaaaatggacaatcaggtgtttgagattagaaaagatgtcagtcatgatatcatttataacattagtatagattaa

SEQ ID NO: 28389 - DNA, 3021 bp, Cellulophaga baltica NN016038
atgtcattttttcaaaccttaacaatatcaaaaaacagtgatcaagataaaaaacaagctttatggaaatatgaaataagtgatgaagatttagatagacttatttctactctacaatatgggcaaatttataatatagaccctaaagacgtttgtttatactatgctgtatggtggaaaagaaagtacaatggtggtatacctagtaagcaagaaatatttgaatcgatcgggggtaatcttaaatataacctgacgaaagaagagttttttaaacttgctaaagtaggtgcgcgacagctaggggtacaatggattaaaaaacaaaatacactttattttaaaacattattgttgcaaggagggttgccattaaagcatattgctgaaaataaaggagtttataaggtttttttggaggcagttttagaagaacaaccggaatctatagaagattttatttttaaaaaccatattatagatttattacctaaatctagtcagaacgatactatttatgaaaattgttttgaaatagttagatctattttaaatgaagacggggcatatgattcgttatttgaaagtgaggaatcgttgaaagagatttcaactgctttaaaaattaaacggaattccttagttaagaagaaaagacaatctaaacctaagaattattggttattaaattttaaaaatgatacgcccaaaattacgctaagattaggttttgcagatacttatacaatagaagccttaagtgatattttaagatttgaacccactgaaagaaattatcaattctttatggatgataatcttgtgtgtgtttttcgtaaaatggctagtggtaaatataaaacggattggtacagcagtcaaaatgaagagagagatattttagaaggtatccctagtacttatgtagttggtgatgatttaaaaactgagttacctgaatttattcaaactattcccaatttaaatgaaccaagtttatggtcaagatttaatgataacgaatggagatcggtcaaagggtatactgtatcgaataatgatgctgctttacttttcccaaataattggcaatgttttttaccagcaactaatatttctatttatgataagactctttcttgggtttcatttgaaggtgaaattgaaattcagagtgagaatgaacaaaacacctatataagcggtgtagattcctttgattgggttattgaaagtaaacgtccgagttggatgttaaaatcaaatttagccgttacccagggtgttcctaaaattcttttatatgatgattctggttatgatataaacaatactcgttttgcaacttttattaaaaggcataatagtaaagaagaatgggaaagtcttggtagaataaaaaacatttcaaaaggctgttatgatttaaaaatagagaaagatggggtaattgctcatgacactttcttcaatattggaaatttaaaagttagattcttagagcaaactattgattctgctatcgtcgatttcagtaataatgatttttatgaattgaaattaagtgaaacagatttgatgcaaatagagcaaactgaaaatcaatattcactgaaagtaaataaagaaaagctcaaaataccttcatttataaaaggttcttttggactttctaataaaaagaaattgtttttcgatatacgttcaccatttcaaggaatggctatcactgatagtgaaggcggaattattgatgagattcagcctttgtctcttgctaacctttatggacttagaatattaagtactccaaaacgagaaacattattaaagctaaagaatagcttaaaaccagatgttaagattacaaaggaaatcaaagaatcaacacagccattaatagcttataaagatgaaattgttaggcttttgtatttggctgacgctatgaatcatgaaaatactgttactctagagctattagagggtagttatagaaggacttatcgaatttcgggatttagccacacattagatgttagcaatcaattggaacaccgcgtagatgtatttaactcaaatgatatattagaattatatgctgtagctctaaattgcaattctgaaaatattgcaccaatttctttaactaaaatagaaagtggttatgaaattccaacatctattgaatctagtgaattgatagttttttcttctaaaatagatggtaagcaattgatgccaagatttgttagaactactgaattttactcgggtattgataaggcagaaagaattgagaaatatcataccaatctctctgcatctggcttcagcgatgaaatttggaaacaagtattgtcttattttaaaatctgtatagattttgatatcccattctcaacctttgaccaattaagagcaatttctagaagttcaaatgttgcgtcaagggcttttctttatttaggaaataatcatcatgatcgtaatgaatatatccaaaaggttatcccagagatggagaaagatttaggtttttgttttcattggatttcgaaaatagattggggcaatgctattgaagaagttaatgagctcaccggaaatagctactacaaagatattctagaacttctttcatcctatttaagtttaaatggccagacaaaacttttcaaatttattagcggagccaaaatcgagactaacagtattactcaacgagatatattagatctacgacaacaattaggtgagagagtcttaaaagaacttccatatcatagtcctaaaattaatagtacttatagtgttcaaattgaacagcataaagtagtaaaagtattattgagatcgccaattgcagttgcggaatcaattaacaacattgaaaataattaccctatatggggaggtgatgaatttagggatgtaattagaagaaacatccaatatagccaatatttgaaaccagatttttacaatagtatcattttacatgtccttaacagaaactaa

SEQ ID NO: 28390 - DNA, 5463 bp, Chondromyces apiculatus DSM 436
atgcgctctaacgagttcttttccgcgctgacacatgaactagcgcagcgcgcggcccgggcgaccgcgagccagatcggcccggccagtcgcggcctccgcgactatctgcacacgtcgctcgagagtgctcctggaaacaagagcagtttcctggcgccacccgtattcgaagctctgttcgattgggagcggtcgcccatgacactcgagcaggtaccgttcctcgatcgccgccttgtcgacgccatggatcagccgccgccccagctcgcgcgttaccgcttcgcacgcgaccagcagccatttgtccaccagcaccgggcctggcagcttctgcggcgcgccgaggggcgctccgtcgtcgtgcgcactggaacggccagcggtaagacggagtgctttctcgttcccatcctggatgacttggcgcacgaggtcgccgcctcagacagcagggagccgctcgaaggggtgcgcgcgctttttctctatccactgaacgcgctgatcaatagccagcgccagcgcttgagggcttggacccacggctttgaaggtcgcatccgcttctgcctgtacaatggcgcaacgccaaggcgtgagaggggagatacgcaagcgcgctcgcccacggaggtcatttgcagggagaagctgtggttgaaccctccacccatcctcgtcacgaacgcgaccatgctcgagttcatgatggtgcgcaaggacgacaagcccatcgtggaaaaatcgcggggaaagctacgctggatcgtgctcgatgaggcgcacacctacttgggctcgggtgccgcagagatcgcgctgctcctgcgccgggtaatgcatgacttccgcgttgatcctagacaggttcgcttcgtcgccacttcagccaccattgccaggcccggcgccgaagagctgctccggctctacctggcggatctcgcgggagtggacccatccagagttgaagtcataggcgggcatcgtagcgtgactcccctcccggagcggtttgaggccgtgtcagcaccgctgcccgacctcgctgaacttaaagcgctcgacgatgcgacgctgttcgagcggctggcttcggtgcctgccatccgcgatctgcgcctccatttgtccgagaatccgaagcctctacctgtcgtgtccgaatgggtcttcggccgggagtgcgaggctgcgctttctgaggagcgacagcgaacgacccttcaactactggatctttgctctcgcgcgtgctcggccgagaatcacctgccgacgcttcttcccctgcgaggacacttctttatgcgcacgcagcaggggctttgggcctgctgcgacaatcggtgcgacaagagggcgggcacggcgctcgccgaatccgactggcccttcggcaaagtctacttcgagcggcgcgaagagtgcgactgtggagcgcgggcatatcccctcgtgatttgccaaggttgcggcacggcctatctggccgtgcgcgaccaccatggcacgctggtccagcccctaccctcgaacggtgatttcgatgcggccgagggtgttgatgacgacgaggaaagcgaaagcgaggtggcgaaccctctcacgtacatcgcggggagcacacaaaacgaccacacctccgcacccatatcgctatcgatggacaccggcatcctcgaaggtggcggcgagcgacggcgacggatcgtgctcctccgtcaggagaagggttctcaccgctgtgctcgttgcggtgaccgcgagaacctccaaaacgagatcttccgtcccgtccgcctcggcggccccttctacctcggcgtggcagtacctgccatccttgagcggttggcaccgaaaaatgaccgcacgacgcgtctacccgcggacggccgacgcctcatcacctttaatgatagccgacaagggacggcgcggttcgcagcccgggcccagctcgaggccgagcgcatgtacatacgcgccaaggtgtatcaccagctctggagcaaagtgggcaaagccgacccggtgagagaagctgaactcatcggccagattgcaaagctgaaggcgatagaagatcctgatttcaaggcgatgctgtccgagaagcaggacgcactggaccggctacgcaccactgcgcgctccggcgcggtgccgtggaaggagatgcgcgagtggctcgagggcgacaccgtggtgggtgagtggatgcgaaccagcttgaagaaccgctatgcccccgcggaactgtcgactcaagacatggcccgcctatgtctgttccgcgaattcgtgaggcgtccgaagcggcagaactccctcgaaaccctcggcatggtagcagtccagtatccggatctcgcgaaggaaacgcgggtgcctgctccatggtcgaacctcgcagggaacgatctcgcatcttggataggctttttgaagatcgtggtcgacttcttcgtcaggagccacacagccatcgatttgccaaggtccttctttcgctggatgggcgccaacatcagtccgacccggatcaccagtccgggcgacaggaccgagaagaacaggaagtacgcttggccaaccatcgtgaagggcaagcgacttccccgtctggcgcgcttgctctttctggccttccgcctcgacgagaaggacccgagagcgcgctccgacgtggatggggtcctgcgcgaggcatgggacgtgctcaggacgcggttgctcaccgacaccggcgaggggctcgtcctagaactggaggacaaggcgcaactcgcgctcatcaccgaggggtggatctgccctgtgacgcgccgtgttctggatacgacgctgcaggccttctcgccctaccagactgaacgctggctcgattctcaacagcgctgcgagcccatccagatgccccagatttcgttccccttcggggagcgcggacagggggtctcgcccgaggacgtcgccaggtggctggaccacgatgaacaggtgaagcaggcgcgcgcaaaaggagtatggaccgagttctcggatcggatcgcctcgttcggccacgcgctctacttccaggtggccgagcattccgcgcagcaatcgaagtcgaggctcgagtatttcgagcggtccttcgagcaaggcgaggtgaacgtcctcagttgctcgacgaccatggagatgggtatcgacatcggtgcgctgacggcagtggggatgaacaacgcccctcctggccctgccaactacctccaacgtgctggtcgcgctggtcgccgcgacgagccacgcgcgctggcttttaccctatgccagggctcaccgcatggcgaagccgtgttcgccgacacctcgtggcccttcgtcacgcccgtgcatgtccctgtcgtgtcgctcgagcgcaagcgcatcgtggaacgtcatgccaatgcaatcgcgctgggctacttcctccgtgaggtataccgaggcgacggagcgagcctcctctgcgaggcatttttcttgcgtgacggtgaagagcggtcaggctcgcccgcgaacgcattctgcctctggctgcaagaccacgccagttcggacgagatcctcatgcgcggcgtgcggcacctcatcgcgcggaccgcgctcgatggcgtgagcggcaaggagctgttcgatgctgcgcgtgagaagatcgagacagtcgcgcggaactggcacgccgaagacgaggcactggcccttctgctcgccgaggccggcttcaagccaaaaggaaaagacgagaagcccagcagcccgatccagcgtgccctgtggattcagaggcgacggctccgggaagaatacgtcttgaagacgctcgccagcgagggcttccttccctcgtacggttttccccttcatgtggtgcccttcatccacaccaccaaagagatgctggattacgagaaggagcaccgagagcgcgatgaggggtacgggcttcagcggggttatccggcccggcaccttgcgctggcgatccgcgaatatgctcccggaagcggcatcgtgctgaatggcatgatctacgaatccaagggactgacgctcaactggaagatcccagcgagcgatgcgcaggttcgagagattcagtcgctgcgctgggcgtggcggtgcgataactgcggtcaatacgggacgactgcgacaaagccttcctcatgcaaaggatgcaatagcgatcggctcgcgaaaaaacattacattcgccctgccggctttgcggtcgatattcgcgagaagccccacaacgatttgtcccagcagcgcttcgtgcctgcacgtgaaccctggatatgggcgggcaacgagccttgggtaaggtttgaagacttcccggtgggccggtggcgctacatgcaggatggcatcgtcttccactggaacgatggtgttggacaccatggttatgcgatctgccttcgctgtggacgagcggcgtcggagcgtggactagggggacggacctccatcccgcacgagctacaggaacactcaaggctgaggggtggaaaagaggacccgaagagcgcacgttgcccaggaagcgatggtggcttcgccatccagcgcaacgttgatctgggcggcgaggagcatactgacatttttgaactccagctcacgcggcctgacacgggggctgacgtctccgatgcgacggagtgcacatcgatcgccattgccttgcgccaggcgctagcggagatgctgggaatcgagccccgggagattggctgggcggttcctgtatcaagcacggcgcagcagactgcgggtcgctcgatcgtactcttcgacgcgactgcgggtggcgctggccatgttgctgttgcgcgcgaccagcttcccagcctgctatggcgcgcgcgcgccatagtcgcctgcccgcggcggtgcgaccgcgcctgccacgggtgcctgctctccttcaacacccagactgtgatcaaccgattgaacaggaaggccgcacagagcgtcatcgacgcgctcctcctcgccgcgtcccgggatgctgacagggcggatacaggcgccagctctgcgttcctccaggtcacggcagggttcctcggacaagacggaattgcccctgtgcgccttaccagcggggtcccagcgcaattcgaggtcatgatcgatagggagcggtcgtcgaacatcgaactgctgagatctactcccctggacgtgatggtgttctgccctggagcccaggtgacgccggccagaaacaggttcgagctgccacagcacctcggccacatggcgacgtggacgatcacgcctcaatgcgaaggtcgactcgctctggatgtccttttgctcatacgcggcgaacctattcaccgcaagacgttcaccttcatcgctgcagagagttcttcccaggagcaggagccacggtcatga

SEQ ID NO: 28391 - DNA, 3408 bp, Chondromyces apiculatus DSM 436
atgaaggaggggggaggcggtaagaaggagcagagcgacgcgctggtgtctgaccttcgcacactcgtgaggcagatcctggccaaccatgggctcgtggcacccgatcagcggcctctctacgcctaccgtgtcgatgaggcgacgctacacgcactacaaacggcgctcacgtcgcgattgagtgctcggcatcgccttgatgatgacgagagcgctgccgcgctcagcctcttcgccgccacctatttctgccgaacataccaggggggcgcgtggtcctggcgcgacgtgctcgcagctctcgaccatcaaggcagctatacggtcctgtacgaacccgtcgagcgcggactcgcatactggcgtcgtagtctcctcgttgctgcccatcaccgaggcttcttgctcacgctcgcctgcgagggtggcctacccctcaaggtcctgcaggcgcccgagcgagagtcacacatcaagcgctactttcgcgagctcgtgcgcgtgtctgaggcttacaaccgtccggctgcggatatcgtggcgcgccatgcagacgttctaccagtcagcctccacaacgatctcgtcctcgagctgagcgcgaacctcgtcgatgcggtggtcaagctccgcaagtgtgtgcgtggacaggccgaccccattcacactctcgacacatgcctacctgaatggcggaagtccgtgccgctccaccttgatgatgacgttgcgcgagagttcctcgatggcctgctgcgcgcccccagggagcctaccaccgcggaggagcctggccttcttgtcgatacgctgctccgtaccgaagggtcgctccgcgtcgaacgtcgcctcggaggcccgcccgatctcgcggccgctaagctcgcggagcagctccagatttcagaggaggacttgcccgcgcgtctctaccttcatctcgtcacagcggacggcgagcggcggttatgtgcgatcgcgactgcctcggttgctggtgaagggcgctacgaccttcagctcctcgcaagtaggccgatcgaccacaccgccgtcgtccagggtggggtcctgctcgtggcagccgtgggagggcgggacatcgcatgcatccagcttcccggcggtgaggccctcgacaatgttccctggatcttcgaagggcatgagcagcatcccacccatgttctcgtcggcgtaggggcgtaccgcacccgcgctgaaagcatcatcgccgtcgtcgcgaccaccgaggtcctggcacccgaacccggggcgcgcgtagaggactggggcgagatcgcagggttggatcgggtcgtgaagcgggtggagggctcggtccaatgcaaaggcgcggaggagtctttcgtcatcgcgacccggcagcccagcgcctatgccgtccgcttcatcctcaggggcaagccttggtggagcgcttccaccagcgctgaagcctggctcggaccaccacagatcaaagaagtcggtgctgacggtaccgagcgatgggttccgcccgacgccatcgagtggcgcccccgaaggtctggtgctccatggcaacgtctcgacgccactgcgctcggagcgggcaagatacgcgttatccgtggtggcgagcaggtcttccgcacttcttgtacgattctcccgcctgattttgaccttcgcatccatcctaaggacggtggtggtggccatatccgcgtggagagtcgggccctcgctgacgtgggtgtgatcggccctggtggggatgtggcgcgcaaggagcatgcagaggccggagttaacgtcactctccaggcacctgcgacaccgccggccttcgtcgacgtatggctccgctttcgcgggggcggggaggctcgcttcaacgttccctacccggcacgggtggtcgtcttctctggtcgcgggggcgtggctctgcgcaacggagatcgcgtctcgctggacgggctcagcctcgtccgtgcgcgggccgtctccccggttcgccaggagcgtttcgccctcgaggcacgcctggaaggtagcacgtggatcccaattcagcctctgcatgtcgttggcaacgggtgcttcgagctaccgctcgacgtggtgcgcgacacgctccgggctgtccttgcctcgtgcgacgagctagaccacaccgtctcgctgcgtatcgtcggaacacaggcgaccgcgccgtgtatgttgagggtcggctggtacgaagccagcctcgagaagcgcgattcgcccgacggcagctcgaccctgttcctcgcggacgacgcacggcgcgtgctcggcgacgatgttgtggagaggctgcggctcgtcacgcgaccgctcctcgagcctgaggcgcccgacctcgagttgccaagcgagaatggcaggtggtccttcgtgccgcagggcaaggtagtcggcccgtggctgcttctcggcctgcagggcgataccttgcggctccggccactgcgaatcacggtaaagggagaagaggcgccggagtctacgtctcttcttgagcgggcagctcgcatcaaacagatgcaggcgcggcaacgcgctttcagcgaggtggtcgagacgctcgcgggtgacttcgggcacccggactggcctcgcatgcagagctttttgcgcacgctcggcgtttggccggcgagcaccttggatgccgtgcgcgcgctcgccagtcaccccggcgcctcagcagtggctttgctgaaagcctccagcaacgattttgatcggctgtgggacggacttgagcagctttcgcttctatggtcgctcatacccatctgtgcctggctccgcgcggctcggcagctcttgcgctgggtgacgtcgaaaccccagtttcgagaggcgcttgattggtccacgtcgcgtgcggtgagcgagttgcttgccaattttgccgcctgtggccctcaacgtgcccgctttcttgccgtcgtcacggagctcatccacctgaccttgctgggcatgccgccccagcctggcgggtcaacgctagggcattccgatgcgctgcacgcacgcctctcatcctcagagaggcctgcgctcttgcggcggcatacgcacgacacgtggccagcatgggaggtgaggcaggcggcggtgatctatcgtgtcccgaactcgctccttgagcccgaactccttttgcctgagttcccttgtcgcgatggcatcatcaacgccccggcgcttgccgctgcaatcagcatgcatggcattacgacagacgatacgctccgcttccacatgcgacgacttcgcgccttcgacgagacatggttcgatgtcgcgcatgcgacggcactgacccgcatgatcgcacgaaagctaaaagaggatccggggtacttcaatgcgctctaa

SEQ ID NO: 28392 - DNA, 5871 bp, Chryseobacterium sp. Leaf201
atgagtaagcttatatttaataaaatctacacagaaattcaagacagactattagattcgatactttctttgtgggcaacaggagatgcacaatttcagaactatcttgaagagttactgaacaaagaaaaacttttggctgaacccgtctttcaaaatacctttccttggactccagcatcacagacatttggagacttgacccacctttttgatagcaatcttattaaaaacttagataaaataaaaggagagtacgaatttcccaaaaatagaaatccatatgtacatcaagtgacaagctgggaaaaacttctctcagacaaaaaatctattgcagtaacaacaggtacaggttctggtaaaactgagtgttttatgttaccggtcttacaagatttatatcaaaactgtgaaaacgaatctggagtaagagcaatttttctttatccgttaaacgctttgattggtagtcagaaaaaacgtattgatacttgggtaaaagcaatcggtgggttgacttatgcagtatacaatggaaatacagacgaaaatgctacagcggctcatgcaaaaaatgctcttcctgagcttatatcacgaaaacaaataagagatactccgcctcaaatactttttacaaatccatcgatgctggagtatttgttggtaagggataaggatgtttcgctcctcacaaattctaaagggaaattaagatggattttgcttgatgaggcacatacattggttggttctgctgcgacagaaatggcattattaattagaagagtagttgatgcctttgaagtcgatgtaaaagatttacgttttgcaattacttcagcaacggtaggatcaggggaagaaagtgatagaaaattaaaagatttcatggcaaatctttgtggcattgatagcagccaaatagaggttattacgggaaatcgcgaactcactccgctgcaagatgattttgaaattgaaaacaaacaaggaattgagcaacttagaaccagaacctacacatctgctgctattaaactttctgacatgactgatggctttgtagttaataatagttctactgaagataaactggattggctggatcatattgttgagaaaaaagatcatcttgataattctattttaccgctaagaatgcatttgttttcccgcggaatcggaggcgtatatgtctgttcaaatccggaatgtgacaagcacaataattttaaaaacataagtcacatggggaatttgacaacgtatacagagaaaacttgttctcattgtaactttccgatgttcgagttggttgcctgtagatcttgtggcaatgaactattaaaagcagaaaaagaaataaacaaacagggaattcaaacgcttcaactttcaacatctctcaatcaggataattttgtattagacgatattgataatgatgaggattctgaagaaaagcttcctacgctttcttttttctttacaaggaaaaatcctaacaaaagatttgtcttgggaactaatgaatttggtattgaggacaccggtaagatagatagaaatagaaatgaattcatagaagcagataataacaatggtgaatgtgtatgtccccattgtgcaacttcattagaaaaccctttgcattttagaatttcttcttcgtatatgaacagaaatttatccgacatttttcttgaaaacacaccagaagcgggtgaaattagacaagaaactttatggaacggtcataaatatatttcatttacagatagtcgtcagggaacggccaaaatatctgcacttattaatattgataatgaaagcaattggattcgatcgcaggtctttcataagctctcattagaaaacattaataatgctacgccagatccttacaggagtgttttggaagctcaaattcataatgcaactaatccagttttcaagagagaatttgaaagacaattagcagaattaccaattccaatcaccaactcaataagactaagctggaaacaagtttatgactttgtaaatccaaaaacagatttaaagacaatatttagaaataacaatcctcgggaagaagatattgtaaacattgaaaaatattcacgtgctcttttattcgataatttttcgagaagattacccagagagcgttcattggaaaatttggggttggtaagtttggtctatccggatttagataatgtacaattgccatcaattgcagaacgctgcaatatttctttagcagaatggaaaagtcttttaaaaattggtttagattatattatcagatataaattcaatttttttgttgatcccgtaatttatccttactcaacttctttcttaagaagttctctgattcataatccaaattcaaatgttgttggtgcaatagaatggccaaccttcgagaaaaacaatctacgaccaaacagacttgctttactactgtgtgttggtttaggcttttctgaaagggatgaaattaccaatgaagttgaggacaatattaacgagttactaaaaaatatatggcaaaatatcaaaccccttttaacccaagatggaaatcaatcttataaattaaacttagaagaaaaaacgagatttcaacttgccaatggactttggctttgccctgtaaaaaaacgtctgattgacgctcatttcaaaggtgtttcaccttggattaatggaactttcacagacgagaatgttcgtcattaccgaatcgaaaacatacaatcaataatatttcctgaactcaaattgaaaatgggagataatgatgtaatgcaaacggtaaaagaatggattgctgaaaactcagtagattggaaacaacagggtatttggaataacattcacgaaaaagtaattctaaatagacctatttatttatctggggaacattctgctcaacaaaatgagaaacgtttaaagcagcttgagactaaatttgaaaattcagaaatcaatattcttaattgttccacaactatggaaatgggtgtggatatcggcgggatttctacggttgtaatgaacaatgttcctccaggccctgcaaattatttacaaagagcaggccgtgcgggccgccgtaaagaatcaaaatctctggcctttactgtatgtgcgccaaaccctgttggtttaaatgcattcaatacacctacatgggctttgactcataaaattgcgccaccttttatctctttcaatagtcagcaggttatcgaaagacatattaatgcattctttctaggaaagtttgttcagactgagcaagtaggaggtatgagagtaactgataagattagcgactttttctttgctgaaataaatcctattgcttcaagattcataagttggttactcaatgacgaaatttcttcattagatggcaggttgaagagcattactaaaaacacaagtttttcagacaggaattttaattttataattaataaagtattttcaaatttcaatagaatactacactttacacaagctaaaaaacaaggatttgagagaaaaatggcagagtttgagaatgaatttggccaaaattcccctgcttataaagctgtaaatattcagtatatacagtttatagaaaaaaacgcactttcttttttagcacaggaaggatttcttccaacagcagggcttccaaccggaatagtagagtttgaaaccacaaatattgataacctaaacagaaagcaaaaaaaggaaaatccttcttattttatcaccagagcactgacagaatttgctcccggtaacaatgttgtcattgacgggatgaattacaaatcttccggaattattttagataataatcgcggttctcaggccagcaaagaaattatccagttgtgtaatagttgtggttaccaaagaattgtggaaatagcagataatcaaactatcgattctagctgtccacattgtaataatcaaagttttagaggtttgattttcgatgatgaaggcaatcggggaagtttcaccgaaatgattcaacctgccgggtttgcagtagatgtctatcaaatgcctaataggaagatatctgaaacttcaagaacacagtatgttgatccattattgattaatgtaaaaccgtgggagcaaaataccacgaatatcattgatattagagaaagcgaggataatggggaaatattatattacaacgttggtaacggaaatggttttcatgtctgtttaaattgtggtaaaacgggattttctattgaagaattggaagatcacagacgtttgagaggtgggaaagacgaccagaatggtgcaatttgtcagggaaattttacaccatcatctattcgccccaacgttattttgggtggacgttttaaaaccaatttttgtgagattagaattaaggaaaacgatagatattctactgatgaaacgcttctatactccctagcttctgtttttgcaaaagaattggcatcatatcttgctgtagaagccgcagaaatcgactttggcataaaaaaatatgatcattacaacacaattttcatttttgatacaacaaaaggaggtgcaggatattctaccaagttctttttgtacgccgacgaaatattaaaagcagctaaagataaattagaatgtaattgcacaggagcttgtacaaaatgtttaattgaccgaaaaacccaatggcacattaatcttttagatcgcaataaagctctggattggttgcagaatattgcgaaattgagcattccagaggagatagaatatagttatccaaatccaaaaagaatattagatggtataagagcagatattgtcaaagtttcttataccaatcaaattgacgaaatctggttaaaagttgatcatgaaatttctaattgggatttagagaatataatcttcttagaaaatctcaaaaataagtcggagattaatttagtttttgaaactaaaccgatagtttcgaatcctcaaaatgtaatgacattaattcaagtttcttcatgggcaaaagtatgtgttcagaaagataataacaatgaagatataaaagcagttgctttaatcaaattgtcggatgtagattaccactcttaccttgttagcggccaagttaacctaagtttaaatcaatattggggagatactgataacggtgaattatatagaatcaaccaattactgaaaattgattgtgatccacttaacgttatggattatcttaattcaaatcaaatctttgaagtatatttaaaccccactgaaaatatttcgtcaaaaaatctggcttccattttaattacgggattagcaaataaatttgatctacaatctataatgaatgggcaaaaatttaatgtttcttactatgatcgatatttaaaaacaccttttgggtgctttttaatgttacagtttatcgatcaattaaaaacagagcttaattttgaattgcaagactttattttttatgggcaggattttaataatgatagaaacgcttcaagagtatttcatgattttcgaaatcaaaagtcccgaaaatcttttattgaattttataaatatgatcttgatttagaaaatatggaaattctaagtgatgaaattccacattatcgttattttgaattttcaaatgatcaatatagaattattatacgaccagatgcaggaatagagcatggttggcgtttggttgaagataatattcggatagaagatttaaacagtttagatcaatctctagatattttgaaaatgaagaatcatccgattttatacactattagctttaacactataaatacttga

SEQ ID NO: 28393 - DNA, 2988 bp, Chryseobacterium sp. Leaf201
atgagtgaatttattaaaatattacaggcaagaacactgagttttcacacaggtcaacccttgtggaaatataatatctcagattttgaatttgaacaattaaaagtacgttttcaaaatgttgaaagagcttctcaactggatcccagaacttgtgcattatattatgcagaatggtggaagcgaaagtatattggtggttatccttctaaactagagatttacgaatcaattggcggaaaacaattatgtttcgatgacgaagaatttttcaagttagcaaaacaaggaggtaattatctgaatttcaaatggattagaattcaaaatactctataccttaaaaccttattgttacaaggtggtttaccagtaaatcatattaaaaataataaagggaaatatcgtgactttcttgtcaaaatcatacatctaaatcctaatactatagaagatttttcgtctgattatgaggttataagcctcttaccaaaatcaagtcagaatgatattatctattcaagctgtctggaaattgtacgagctgttttggataatgatgaatcaatgttatcctcttttcaacacaacaaggatttagttgatattgctaatgatttgattacagaaagagacaaagttgtaagaaaaggaaactccctaaggtttaggtggttctatgaccgtaacaagaaaacattttttttaaatacatcattgaatttaaaattaaataaaactgacttacaatatttattgaacgacaatgtcaatgattcaataagtgagtacaggttatttgttgacagtagtttgattgcaaaattagtcaagagaaatgctgacacctttaaagttattcaagtaacaaatacaattaagtttgatggaaaattagatccggaaatatactttattgacactcttgataaaacttatactgctaatcatttgttgtaccacaagttaaatttggaaataccttcgttgtggaatagtagtggtgatgcaatttaccatttagacaaatcacgacatacacgtaacaattcagcatttgttttatgtgaaagttcttatttctggcaaggcgatgtagatgtagaggaaaagttaatcataaatgatgacgactattattttgttaaattcaagcatcaattacatgtcaaaaaagacaatgaaaatggttttaaatttaaaaccaatgcacaaaatatgtttgagtggacgatattgtcagatcggccaaaatggattctgaaatcgaatttagagattgtaagaaatcaacttcggttatttgtttgtgataaaaatggagaaagaatttctaaccccattattcagtggaaacctacacacagatctgaatggaattctataaatagcccactttccaaaggagttctagatattaaaatttcgcttaacgagattgaagagttcgaccgggtttttaatattgcagatttggatcttaacgtgatatctaaacatcatcattttgtgtttagaaacagtgaaccttttactacagaaatttatccctcagctctttatgattttgaaatagagaattttgttattagatttaatattatagaacacagttcatttccaacatctgtaaaaactagatttagtatacaaaggcaatctgccggtctcattgcggaaatagcttctccctttcaaggactttgtattgttgaccagaataatcaaaaagttgatgataaagttctttatctcgataatataagaggatggcgattggtatccaatttacatgaaaaggaatttgaaatttctttcaaaaatcacaaaaacgatcaaatcatcattaataaagcgattgacagaaaaataattcctcttattgaatttcatgatactcttaaatcattgttccagctttacaatgtaatagatgaagaaaattatattgaaataatgatttcagaaattcttactaactctaaaacaaaaaaaatcaaaagctaccagataaaacaattttcgaaaacagtagtttggaaagtgaatgagcataataaaattcagtttattgatgatgatattaattttgctgattcagtttttgcattgcctttagaatgtgagcttgaagaaatagataaaatagaactttcaaaagaacaagactctttctcattgcagaaaagcaatatcgagaaatttattttgttttcagttaaaaattcatttccaaaaataaaaccagtgtttataagcgttaatcctgaaaataaattcacaactgatgatgatagaaatgcaaggatgctagattttgcttctcaactattagaacaggactttccgggaattatttggaataaactctggatatattacattttgtgtaaagagaatgatcttccttttgcaaccttcgatatcataaagtctattacaacttcttcagaactagcagcaaaagcctttgtatttttatctgaaaaatttgataatggccaatttgccttctccgggaatgattttgccgaacttgaaaatgatttgggcttttctttccattgggtgaagctagaacattggcacaatcacttacatatgagtgaagcaattgctacaatgttgggacatcatttccctgaacttaaagtttgtttacttcaaaacagatcaaagagggattttgtcttcctcgcagaattgaataaagcaagagaaagattaggaaatcgtgttcttagccaattacctaaatacaatttattaacagatcgaaattcttatataaaaccaatcccgcatcagcactggaatgatgaagtaaatattttggtgattgcgccattggcagtagcatcttctataaaaaaagataatgccggactttggcatacaaacggtgatagttatcgcagaatgataaaatacgttgaaaatatcgataaaaaatggtatgaagattcactaatcttctatctaaattaa

SEQ ID NO: 28394 - DNA, 6327 bp, Citrobacter freundii
atgaacgttcagcaactgcattatgcgccacttctaaatcagcttcatcagcgtgcggtgaggtcggtggtaagtcagctggcattgcggagcaagtcgttgagtcaatatctggaatctcaatatttccagcctccaggtctgggggggtcactgcttgcagatccggtattcgaaagtacgtttggctggatgcccgcggatgaaacaatggaggatttgcgtgacaaactgatctccagcccgctggttgatgctttgagcaatgcgccagtgccgtttcgtcatcagctaactgcgtggcgaacgattcttgaagacaagcagtccctattagtgagcagtggtacagggtcaggaaaaacagaatgttttatggtgccggtgctggaagatcttattcgtcagcaaaatttgacccggcagtcactaacagggacgcaggctattttcttgtatccgttgaatgcgctaataaatagtcagcaagagcggcttcgcgagtggactcgcgggtttaaagggaagatacgctttgcgctatataatggcgaaacccggcataccaaatatgaagttcaggaagaccagctcaaagtacctgaacaggcattgagtcgggaagccatttatgaagccccaccgtccatcatggtgacgaataccacgatgctggaatatatgctgattcgtcgcaaagatgcccctgtcattgaaaagtcccagggaatgctgaagtatatcgtccttgatgaggctcacagttatattggctctcaggcagctgaattagcgctgcttttacgtcgcgtcatgcaggccttcaatgttggacctggtacagataaacctgtgcaaatcattgctacctcggccactattggtgaagattctcctgaaggtaataaagaacttgctaaatttgttgccgatctcgcgggggtcacagaacgtgatgtaaaagtagttcgcggctatcgacaaataccgccgatatcggagtctcttattcgtcatgaatatcccacatctttagcatctcttaactcactaagttctcaggaactttaccaacagctgtgccattaccgtgtggcccagcaattgcgtcaggcgttaactcgccccggacgcctggcggtacgtttgagtgaattgctcaatgttgccagaagaacctggccagacattaatcaccgtgagctgctgcagcttctcgatctgatggcgaaatcgcgagagggtgaatctaaattttcactagcttttacgccattacgtatgcatgggtttatccgaacactcgcgggcctatgggcatgttcaaataaacaatgcgcacataaagcgagtgaattaggtgagagtgactggccatttggtcaggtatggtttgaacaacgccaatattgtgactgtggtgcgcctgtatttgaaatcttacgttgctccgggtgtggttcagcttatttgtctgccaaggaggaagtgcgcggtgatggaacgagctggttggtggcgcaacctgctgctgccgaagaggatgagtttgctcttgatctcgatgtttattctgaagatgaagataacaacgaattagaaaataactcccaatttgatcgtcttatagcgagcgatggtgaaaaatatatcatttcactggaggaagcgacggcgggtaaaatcgaccgcgaggcgcaaaagcactatgagataaatctgctaagacctgaatctcgaggtgagggacgcaataattcctttgcttgtgtttgttgtggtgacacccaacggaaaaataatcctttgttccgtccgcttcgactcggtgcacccttttttttaaatgaaattattcctactctgcttgaattttcgcctttaccgcaaacaagagaagagcagttaggaccgtttaatggtcgacgtttgctcacctttacggattcacgtcagggaaccgcccgtatctctgcccgattacagcaggacgcagataaagctacgttacgaaccctttgttatcaggaactggcaaatattaatgagccatcagtaaagctcagtccggcacattgtgcattgttagagagttttattacccagttttctatccctccgttaaaaaattccatcgacgcactgagaaaagcgatggtttcgaatgagaagcttagcccagcagacgttcaggcgcttagaattatcgagccgatggttagttccttaagtcaggaacatgctgaagcaatgcaaatactcctcgtcaattcaggcaatcagcagaagaaaaccatgtcgtggcaaactctgtctgaacaacttgttggcagtgtggatcttgcggacagaatgagaggcagttttaaagacttgtctggacttgagcttactaaacaacagtttgctgatttttgtttatacagtgagtttggtcgccgccctaaaaatgcctggaccctcgaaagtctggggctggtggccattcactatccatttattgataaagtcacaacctgcccgcaggactggaagacattattacccgaccccgataagcaattaccggaatggcgtaatttattgaagattacccttgatttctttatacgtgaaaacagtgccgttttttacgaaaacgaggagtaccctcgctggatgggagcacgtttcccggtaaaaatgctgcaggggccagataaaaaatacaaagggcagaaacgtgatcaactttggccacaaatacgcgatcgtcattataaccgggtcattaagctattaattgctgtctttccggcaatacagcctgagcaggctcactggaaagcgctggttaattacttaatgaatgaggtctgggaagctattcgaccatgcctgcgtcagtttgaatcgggttatcaattggacattaaacaacaagctgaattttacagtccaaagcaagtctggcgttgcccctatactcgccgtgcgttagatgtcactttattgggttattctccgtatttaccaggtagcaaagagatagcacctgaaaaagctgtattgattgaaatgcctgagcttcctgcgcgtcactggcgtttatctggtggtggagaaatggcgcgagaagagcgcctgcactggctggaatgtaatgaacgcattcaacatgctcgggaggagggggtatggtctactcgcagtgatcgattggccctgaaagatagctggtatcgtctggaggaacactcagcgcagcgaacaccagagaagaaccagtttaatgaaaaacaatttaaagcagggaaagtcaatgtgttgaactgttccacgaccatggaaatgggcgtggatattggtggtatgagtttggtcgcgatgaataacgttcctccggctccggcgaattatttgcagcgtgctggccgtgctggccgtcgcggtgaaagcgcatctgccgccattacgttatgtaaaaacaccgcgcatggaatggaggtattcaaagaccctctctgggcgttcaacaccgttgcgagtgccccacgggttcgttttggtagcagtagtattgttcagcggcatgttaacgcattggttttaggtgcgtttttacgggctgaagttcctgatgcgacaaaactgagttgtaaatggttctttgaaggtgatgagagccagtgtcttcgttttctccattggttaaatcatcaggccgatcagctggcggataaacttaaacgccttacccagggaactgtactgatgtcattgacgccgccacagctcttgactcgtacgcaaacgatgatgcagctggttgatactcgttggagaagccaacttgccatactgttggaaaacatcgaagcgttgaaagcagataacagcgcgtgggaagaaacgccagcaggcaaagcaatcacttatcagcttcgtgattatcgcggtgcttatctgttttctaaactcatcagtgaagcgttcctgccgggtcatggtttcccggttggcgtggtcaatttcaattatctgactgcggatgaactggaaagacgtcgcgcaataaaagccactcaggctgaccctaatgaagggggagaaaacttttctcgccgcattgaaaaactgcccagccgtgacctgcccacagcattacgtgaatatgctcctggtgctgatgtggtattgggcggaaaagtatatcgttcctcgggtattatgcttggtaaagtacttgccagcgggcaggagctgtctggcgatcatcatattccgtggttctggcattgccgtaaatgcggcgcgggagcgaccagcgccacccggcctgtcgaatgttgccactgcaaggcagatatacagcagcttgatgtgaagcggtatttacagcctgtcggtttcgcgacagacattcgttatcaggcacataatgatgtatccatgcctgcgcaacttccctggaaagatcctcgtgttcttgtaccttcttcggtatgggtctccttacccgatgctggactcggacgttaccgttttagtcatagcggggaattgttccactttagtgagggtgaatttggtcatggctacgcaatttgtctttcctgtggccgggcagaatctcaaacccagccccagcgtactccggagaatctaaagaacccggagaaggaaaatacacactacctgttgagaggcggtagtaatgatcggcaggggaacaataaattgtgccacggtcatgttcataaagatctgtggttgggatatagcagccgtacagatatggttgagctgcaactcagtgatgatagtggcttactgatcagggatgatgttgccgcgcgttcccttgcggttgctttgcgtgaaggattagcgcataaattgggtatcgaaaatactgagctgggcgtgacgacacagcaagcgcgcgatatcgatggcttcactggatattctatctttatttacgataataatgctggtggtgcgggttatgcagtgcaattgatcgataattggtcggatgtctttaattacgccagaaaattgctcgattgcagctgtgataaattctgccaccactgcttgctcagctacgacagtcagcattatgtcggcaaattagatcgtcaccaggcattaaccctgctcactaatcttcgtctacagcggcttaatctcgcgccagaatatcagtacttcggagaaagtagtcgggttgaaaccaacccactcagtttgcgtattgcgcaatgcctgaacagcgaggtttatgattcttgctcgttggttcttgctgggtcgcaggaacagtggagttttgcgcaatggccattatttaaagagttactccagtttgcttcctctgggggcaatgttgagttgctgattgccacgcagctggaaaacttagctgatagcaccagacatcagctttccgcgctagcggcgataccgggtgaatgcttgcaagtgaaatctatagacactgcgcaacttgtgcaagggaatgggcacttactggcacaggtcactcgtgaggggcaaacccaacagtgggccgctgccgacagtgccaccgtttcgcccggtgaattatggggacaaagctcggcatcgccggtagtgacgattaaaggggcgtccagaaaaacattctcgggtcagactttgagtgcagaagacttactgccagcattgcccgccggggcggtacgcatcaatctcagccaacaacttgacggtcaggtggaaggttttggttcgcgtttctgggcactgatagctcagcagcatgctggctggaagaaggtttttactaatggacgcgaaattactcacgtccattatagtgatcgttatctcaatagcccatttactgtacgtttgttaggtgaaattttgacggaattggttgaacaggggctggcagaacgtgccgaactcactgtttcagttaaaaagttagagtacagttctcgccaacacgattcactctataacgcatggcttgatgagcaggatcgccagcaagttatgaccacgttgctggaagagggctaccttgggccagcctggtcagggaaaatctcatggttagcaggagataatcagaacaccgatcacggacgtgaactgaccgtgaccttcagcgatggcagtgaacattatgtgttgctcgatatgggactgagttactggcgttgtacaggtgacacattcttcgatttttcaggacgaataccgaatcaggtcgagcgcctggcaacatgtcgggcattgcttatagccccggataatggattgaagagttatatcatcgcaggctaa

SEQ ID NO: 28395 - DNA, 639 bp, Citrobacter freundii
gtggttgttcagttgttaatatcatcatgtctttctggggatagtgatgctatttatgatatacaggaggaattacccttctcatggggatggattcctgtttcaatatggaaagatgtctttgaacagtgttggtattctctggaaaaacagattaatgataaggcatttgcattaaatatactacagccatttattgcatttataaatcatcaagcgcatatcgatcgtcgattagttcccatcgctaatatgttgcttacacatagtgagatattacctgcaggttgcactgtattgccatctgtaagccgcgagcagtttaatgatgccaaacagatgttattaagaaacccagatagttttggacgtgtcagcattttttctaaagagctttgggatagtgctattactccagaccttaaatctgtttttaataaattttggatcgaaaacacatatcacactcgttttgaaaaacgttttaatttgatgttagtcgcggcgctgctttcccaaagaaacaataaacttatgcatcagctaactgcactttttgaatttcactatcagcaagccccgcagcaattgggggttatctatcagtattattttgaacaagcaggagtatgtcattga

SEQ ID NO: 28396 - DNA, 6321 bp, Citrobacter freundii
atgactacacgctatttttcgtcacttattgaacaatcgttgtctcgttctacagaagcaacgctgagtatcatgggggtcacaaacccgcagttgcgtgagcacctcgcgcagcaaatgggcgctgattgtggggagtctggctcatttattgctgcaccggtattccagcaaatgtttggctggaaagagtcaaataacacgatgcgcagcctgacggaaggcaaggcattgctaagtaaagccgttgttgattcgcttgatgatcagaacaatggtcgctaccgttttggtgctgactggaaacctttcactcaccagctggccagttggaaagctttactggaagagaaacattctgtggtggtgacaagtggtacggggtcaggcaaaacggaatgttttatggttcctgtgctggaagacctctacagagaattacatgaaaatggcaacaacccacttgtcggcgtcagggcccttttcctctaccctctcaatgccctgattaattcacagcgggagcgcctggatgcctggacacgaggttttggcaccgggatccgatactgcctctataacggtaatactgaaaatctccacgctgcggtaaaaagtgagcaggtaaaaaggccgaatgaagtgctctcgcgtgaaaagatgcgtgaagaacctgctccgattctggtgaccaacggcacaatgctggaatatatgatggtacgccaaatcgacgccccgattattcagcaatccaaagcacaaaagtcactacgttggatagtactggatgaagcgcatacctatgtcggttcgcaggccgctgaactggcgctacagctacgtcgcgtgatgacggcctttggcgtgacgcccgatgatgtgcgtttcgtggcaacctctgcaactattgccggaggcgatgccgaaaaacagctgaaaatattcctctctgaattatccggtataccgcaggagcgtattgacgtactggacggaacccgggtgattccgaaactcgaaccgtgcaaacacgtttatattccgttagaagaaattgagcaaatccctgatacagacattaagggcgtaagcccagagcgctttgatgcacttacacattcacctgaagcgcattacttacgtgagatgttagtcactcagccggatccaatgaagctggatacgatgacgcagcggttgaatacgctgaccaggcaacattatagccagcaggacgtgctgcgctggatcgatgtttgctccggtactcaacctaatactaaagatccggcatttctgaaggtaagagcgcatatcttccagcgcaatacccagggtgtgtgggcttgcgttgataaagagtgcagaaaaaagcacggcactccgctggaaaagggctggccctttggctatgtgtatgtgaatcaacggcaaaattgtgactgcggaagcccggtctacgaactggcattctgtaatgaatgtaacgagccacatcttttggcgcgggacaaaaagggcaaactggtccaatgggaaaataaaggcggtgatgagttctctttgcaggatgatacgcatgttgaatatgacggtgtagaagataaagtcgagaaagagagtactttccagcccccgcatattattgctgcagaaaagaccagtgagatggggtataccatccaaaggctggatcgcaagacgcgtcgtattggcgtgggtagtaatgacagtatcccgttagttattaacgatattgagcaagtttgcagcgccagtggctgtggctacagagggacgagcgggaaacaacccttccgtcgcgctttattgggggggccattttatgtcaccaacattgtgcccaccgttctggagtattgtcaggactttattagtgaagaaggaaaagagggcgtcggacctgattcgctaccaggtagaggccgtcgactgattacctttaccgatagccggcaaggaacggcccgaatggcggtgcgcatgcagcaggaagctgagcgcagtcgtttacgcggtagcgtggtggaaatcctgagctggcatcaacgaacgcagactaccgtcacaccgaatgccaatgccgatcttgaaaagttatccgcgagggcaaaacaggcccgaaatgaggcagaagaatatagaagctggggaatgccggaacaagcaaaactggcagaagcgcaagctgaacagcttgaacaggctattcaggttgcgaccggtggcaaagcagcaactgttctgctgtcccggacctggacggaaatggttaatgaacttaaagagaaggctgatattcgcggtccgattctacaatataaccactacctgaagcctgagattttcaacgaaaacgggggcccgctgaagctttcagaaatgttgcttttccgggagttcatgcgtcgccctaaacgaactaacagtctggaaacgcaagggctagtccaggttggttatcaggggttggagaaaataattaaactcccggtgcactgggaggaaaaagggctgacgctgggtgactggcaggattttcttaaggttacgctggatttatacgttcgtgaaagcaacttcacgcaactggacgatgaattgaaaaactggattggtagtcgtttttcatcgaaattcgtccgtaacccggaaacgaaagatcctgaagataatcagaacaaacgctggccgcaaatccgtaatggcaacttatcccatcgtttagtgaagttgttgatgttgggagcgggtttcaaaacagcaaatacggcgacgattgatattatcaacgcgtggctgaaagaagcatggaatcaacttaccggaccacttgccgtactgaagcctgatggtaaccgtttctatcttccaaaagagcatctgactttttctttgatcgcggatggctggatttgcccggtaaccaacaaaattctggataccacctttaaaggcttaaccccttatctgccaacccatatttcgtttgaacatcttagccaggtgcagttcgacacgtttgtcgcgcaaaaggtcaccatgccggaaatctggaagctggaccgttcgcaagaagactacgcggcaggtctggcgaaagttcgtgactgggtcagcaaggagccgctgatcgcgcaattacgttcggaaaacgtctggacggatatcaacgatcgtgttgtggaagggggcttctattaccgcacggctgagcactcagcccagcaatcgtcggaacgtctgcaaagctacgaaaagatgttcaaaaacgggcaactgaatgttctcaactgttccaccaccatggaaatgggggttgatattggcggtattactgccgtggtgatgaacaacgtaccgccgcatccggccaactatttacagcgtgcagggcgggccgggcgtagtaaggaatcgcgagcgatctcttataccctatgtaaagggaacccgcacgaccagcaggtttttgccaatccgctgtggccgtttgaaaccatgatcccggccccgatggtggcgatgaattctgcccggctggtacaacgccacgtcaatgcattattactgtccgacttcttatgcaacgttattggtgaaacggagaaagaaaaaaccagcctcgacagtctctggttttttggtgaggacgacgggcagtcaaaatgtgaacgctttaaagtctggctggagcgcccggtgcttgatatcgacgcagcgctggaacggctggtgaaaggtactgcgctacatggtgccagacctgacctgctgcgggataaaaccattaacgcgattactttcctgcaacagcgatggctttccgtctatcgcgatcttgtggctcaagagcgcgaatcacagccgcaaacgccttatcgcaagcgcatcgaactggagaaaaaacgtcactgtggcgagtatttgttgcgcgatctggcagccagaaccttcctgcctggttatggcttcccgacggatgtggtgacgtttgataacttcactatggaggactatgtccgtgaaaaatcgcggaaaagtcgggataaaaaagatcgcgaagataacgtgtcacgctacaaagggctgccctcccgtaacctgggagtcgccatccgggaatatgcgccaggcgcagagatcattcttgatggtcgggtcttccgctccgctggtgtctcgttgcactggcacaatattaacgcggataccaatgaggcccagcgtctggattgcgcctggcgctgccacaaatgcggtacgattggctataaagaggggatgagcaactccgggacgctctattgcaccaacagcgcgtgtggtgaaaaaattatcactgaaaatcgccgtcaggtgctgcagcctgccgggtttgtgaccgatgcgcatgcgccagtgaccaacaatattgaaaccatgaaattcatcccggtggtccctgcatgggtatttgttaaagccgaaccaatgccgctgcctaacccaataatgggatatatgacctctggcgctgacgggcatgtcttccagcaaagcctgggagaaggtgggcatggttacgcgttatgtctgagctgcggccgtgcagagtcgatgttgaatgccaacgacgcaccgaagagtatggaagcacactacccaccgcgcccgggaaaagcggatcgcgatagccagaatcaacgtctaatttgtcccggttcgacggcgcttatgaagaaggtcacgctgggggctctggcgcgaacggatgtctttgaaatggtactacgcaagccgcaaaacggtgaatatctgccggataacactgaagaggggcgtgttgtcgccatgacccttgctgttgcgctgcgccaggcgctggcgggtgttctgggtatctctgccgcagagctgggctacgctgttcgtccggtccggttggaggacgggcaatcggttttagccgttcagctgtatgatgtgatcagtggtggggctggttttgcctccagtgcgccattgcatattgagtctattcttcagggaatggtcaaacagctagggtgtcatcattgtgatacctcctgcagtgaatgcctgctcgactcccagactcgccacgatcacgatttactggaccgaaaggcggcactggcctggcttggggatgacttcgtctactatgttggtttgccggatacggagacattctcgctgccggatgcccgctactgcccgggagccattagcgacactcttcgccgagcgattaacgaaggggctgaaaaactcacgctgtggatgaacgggccgctcaatgagtgggatctctatgcccgccagttccgggctgctatacagaactaccgggtaaaagataacgttgcggttgatcttgtcatcccggcaggcgtcgatgatcctgaactgatgcacgagctttcgcagtttactgctctgggtgtacggttgtgtcatagcgaacaggctccggaactgccgattgtggcacaaatcgcctttgccgatcgggtcatgacgctggcttcacgcagccagcaggcaacgatcccgggaccgggctggcatctgaatgacgagctggtggttcgtagcgttggttatcaagcggtagcgctgaacgagtttgttctgccggggaaagccacgagcgcggctgaacgcgtcaaagatattgcgatccataaagagctgaacggcccgctttcgctgttcggacaacgcttctgggacgtgctgtttaacgaccatgaagaggcgcagtcgctgatgaaaaatcagcggatcatcggcgttcactataccgatcgctatctgcaaaacccggttgcgctggtgctactggcggcgttattgaaaccgctgaagccgttactgactaatgacgctaaggtggcgattgatacgttattcaaacctaaagatcgcgccggtaaccggcctttccatgactggatgagcgacgcggattttcaggatttcgccgaccagtggtttgccgcggcaatgggcagggcggtagcgctaagagtattcgactcgctgcgcgacattccccaccatcgtaaactgacggtgacctttgagaatggtcaggtattaaagattcgttttgatcaggggatgggttactggcgtatcaactttgcatcgaaatggtattactttgacttcagcgatgacgtttccttccagttaggcaatatggcgcaggcctgtcaggatggcaaggtgcttaacagcgaagaaagctgggcaacggatgtgctggtggaggtgatggcagcgtaa

SEQ ID NO: 28397 - DNA, 3300 bp, Citrobacter freundii
ttgagtcagtcagaatacacgtcgatcctaaaatgtaccccgtggctagctaaattcctcgctcgtagaggattgaagcaaccagatcatcgtccgttatatgaatatcacgcaacgtgtgatgaatatgatgaattgaaacggatgttgcgagctatagggctacccgatggttacaaaagtgataaagggtacgcagcctgcttcactttgttctgctctgagtggtacagaagggattacgagcgagattgtggatggtcgtgggaacctatttataaaactcttagtatatcgctaccttcttctgaaatggggaatataatccctaaaggcctggatgggtactggggacgtccagtgcggttctatgatactgaaaggcggaattttttagggtccttattcagtgaaggtggtttacctttcaggttgctaaaggaatctgatagccgttttcagtcaatgttttctctcattttaaaccaatacgatcaggctaaatcttctgacatttccacgtacgcgttggttcatgcagcggtagaaaaatcatccctgccagtcgttttcaaagaagatacttcagttgagcttattagtcgaatggctgaacagttagtatctcttgttcaaatttatgatttgagtaatcataccgaacccgtaaaagaacttgagcgtgttcatccaaagtggcgggacagtttccctgttccccttgaggatgatacgggtaccagtttccttaatggacttttacgaacagcttctactgaatcaaaaccccgccttcaaaagaataaaaccactctctgtcagtttttatggtcagaaaataatcctgaagctgtccaggctctcatttctctacctgaggagctgagcttttcaattgatagtgagccttcaacaacgcgcttcgagcttgctatctatgaagatggtaacgaaatcgcaagtctgggccctgcttatgcaacgttaagtaactcccaggcaaaaataagagttcgtaagcgcgagattaaattttgccgaagaaatcccgcagtaagtttgtttattgtggcgagagctgggggaatgtttgtcggctccaatcttttagaaggtagtgaagttgccgttggcgatgttccattggtttttgtttctgataaaagtgaatggctgttacagggacaagcctcttgcagcgtgcgtggcagccatgtgcttatcgtactaccaaaggatggttgtctggcttcggaacatgaggattgtgactctggcttttcggctttgggctgccgtgctctgactatcaaaggtcggcaggatatcattattgaaggcgacgaaacgtaccggataaagacaggaagagatcagattattcaggctgggttctctttccagggaaagcggttgaattggacaagctacccggatgaagccttccttggaattcccgggattaccaagaatcctgagaatctctcaaagcatcattataaacgctttttcaacggtacgtttatagatgattgcgatgtgcaagagagaatgggagcacagtttatttctgtgcgtaacgaaagtaatgaaactttactgcgtaagaaaataggtattctccccaatgattttagcctggaaataaaaaatggagaacaggcaaacgaaggttcggtcattattactactcagcatccttgtttgtatcgtttgaaggaaaaaacacttgaagttggacgggagcggctgcctggtagtacagaaataatgatgaaggcggaggggattcctcctgcatcgatttcattacaagtaacgccaaacctcactgcggacccaattgttatttgcttaccatttcctgcacgaggttgtcttgcgttcgataaagacgagaaacctcttcctaaaaatttaacgattagcgatcttctgggagccagagcataccttttcggaaaaaatggagagcctacgcgataccagcttgaactacgtctacattcccgtagtggaatgcaggcttggtatgagtggcactatagtgcgggagaaagtccggtagagcttacgttatacagcttaagggaacatattgataatttactctcactggaagagggaattgatcaaatagttgatatgcgtatagaaggaggtggtagttcttttacctggcagattcgacgttacaaatatagtctggattatgatcgggaaaggcaggttcttttcgcaaactcagtaagcaatcttacaggacagatcccttcgcccgtaattatgttactcagcgaaccggagagaaaacccataccgctgatgtcaagaatgagcgaaggcgtaccggttggggaattcgaattaagttcgacaatacaaaataatggcccatggctggtgttgccaaaacaaggtgaagaagcttcatttcggccatgctacattgctggcgaatcagtaattcaaagcgacacgacaacaatacagtccttgcaaaaagcaacgcagctttttaatccccggtcggatgtaaatacaattacgttagttctggaacaaatggcgagcgaccctgcacactcgggctggcagtttttacgcaatttatacgatcagtttggatatttacctttggctacctttgaagtatggcgggcacttgttcagcatccgcaagcgttggcgatgtcgctgttcaaatttgaaatgtccattgattatctcagccgtattgaaagcgagtttcctgttttctgggagtttttacctattacagaagtgaaatgtgccgccaaacgttttcgtacttttttgactcataaaggtgcgcctgaggaaatgcagataaggttgctggacagaatgtatcagcagctgggcacagtgttcccgacttatgccaatgaggtaaaattatggttgagtcaagggaaattaccaccggtttttccggagttggtgatgaaaggtattatccaagggtggtatcaggaacttctacgcgaacatggtgaatctcgctggccagaatttggtggtccgggcctttttcgttggtatatatcgcaacaaaatccggttatagatatttcacctgatactagttaccgatattccgtcaccttgctccccgtatttgctgctgctgttgcaagcggaaaaacaacatttagcagtgtttttgaaaataagcccggtgccgtatttttcttgaggcaggttagagatttcgactcgcgatggtttaacgccattttccagtactgcttattgcgtaatgttaccgaaaaataa

SEQ ID NO: 28398 - DNA, 6489 bp, Citrobacter sp. MGH100
atgaagagcatctcactccacaagttatacgactctatcaattctgtatcagctgaagccgttttaaaccaattacagattatcaacccctcgcttcgccaatacctcactcaacaattcaaaagtaagtttggcagtggtggttcatttttgtctgccccactaattgagtcaacttttggttggaagtcggcatcgacgctagaatgcagaaatactatgactgatctggccgaaaagggtgttcttaccgagcggctggttcaggtaatggatcaagcgccagcccacccatcgctcaaacgagaagatttggaaaatggtattacgcgtttggagtatgacgacgacttcccagagaaagatgatccgcgctggcctgcttctcgcgccccctatgctcatcagttagaggcatgggggattctcggacaagagaaaccgacttcaactgttgttactgcaggtaccggttctggtaagtctgaatgtttcatagttccacttttaaatgatatgtccaagctctccgaggatatagaaggtccactagtcggcgttcaggccatcatgctctatccgctcaatgccctgattaactctcagagagatcgattgagcgcatggacccggggattcaagggtgatgttcgatatgcgctgtacaacggagatacaccgcacgaaccagaggcactttcgactactcaagaggccgtgcttaaaaagaccaagcccgaggaagttactaaccgaaaagatatccgagagacaccaccgccgatcttggtgactaacgctacaatgcttgagtacatgctggttcgtccgcaagatcgccccattattcaaaagagccagggcaaactgcgctggattgtgctcgatgaagcgcacaccttgatcggctcagcggcggcagaaacttcacttctgttaagacgcacgatgcatgcttttggcgtcaaacctgaagatgtgcgtttcgtagctacgtcggcaactatcggtgacatgaaccagtgggaagagacagaaaaactcctcaaaaccttcttaggtgaattggcaggtgtggctccatccaaaattgctatagtaagaggtcatcgtaacgtaccagaacttcctgaatacacaggggaagttcctacactatcggtatcagagctggaatcgctggatagtggcacagcctatgatacgctgtctcagatggcattgatacgctctcttcgtaaacgattgattgatgaagggcctaagaccctgcaagaaatcgcggctcatctgaatcctaatgtcgatgagtctcaaatcgacggccatatgctgaattcagcgctgagaatcattgatgtggcaactgatgctcacccaaacggagatgataaagcggaggcactgcttccgatcagagcacatctattccatcgcgcgcaacgtggcatttgggcctgtattaatcctgagtgttcagggaaacatggtacttatctggaagaagattgggcgtttggtcgtgtttatctagatgagcgccaaagctgttcgtactgtgatcatccggtctttgaactgtcccactgctcgagctgcaacgaacctacgctcaatgccgtaagatatcttggcgaaggtcaagtattcttccgtccccgtaagctggatacgcttgatgactatgcggaagatgcgttcgaatacacaggcgcatcagaagggaccgaggaagccagcgtagagcgcgatgagaatgttcaactctacacctctttaagcccgattgatgaccgacgacagaatgctggcggttctacacgaggctacctacaccctgtcacagggctggtttcccacgacaaggtcgagggagttgagatccgctataccgttgcgtccgacaattccggactgcgttgtggttgctgtaatcagattgagcttcatgagggtatgaccttcaaacgtgctgtactaggtgcccccttcttgatgggaaatatcgtgccagagatgctgaagcatgtacccacaaaatcagacaccaacctcagagggcgacgactgattacatttaccgacagtcggcaaggaactgcgcggttctctgcaaaacttcagttggactcagagcgtcgatggacgcgatctgtggtctataactacctgatcgacaaagtcccggaaacctccggtaccgctgctgatgaggttgcaaagattgaaggtattatcaaaacactaatagcctctggcaataccgaagcaattaaatttatgcaggatcagcgagaagttaagaaagcggctgcaagtacatcgaccggtttttccgttacttgggacgagatgatcgatcacttatccaaacagccagagattagattgctggccggtgtagagggtacggaggatgctttaccgggtgagtatgctgcacgcgctgaagaactgagcagtacccgcaatctcgccagattattccttctgcgtgaattcgctcgccgcccaaaatactcgaacaacctcgaaagccttgggttggtgaagctcacctatccttcgttagatagaattacggagagcgaggcaagagatgcttgccgtatatggttcgagttcggtttcacgctgagtcagtggaaagactacctcaagctgatcgttgattactacgcccgtgagaacaccttagttgatatttctccgagcgagaaaagctggatgggcgcagaagttcctgttcggttgtgtcaaccccccacgtttaagtactcaacggagacttcgaagaaggacgataagattctgatcaaggatcttcagcgtctagcctttcgcgtattcccctccggccgaattcgcaaccgcccggtgcgcttgattgagttggtaagcggtcgaacaatcgagcgtgacagcggtggatttgaacggatcatgttggctgtatgggatacgcttaggaaaaaggaattgatggagtttgtggacgctcagcctgacgaacatgggtttgtccgatccggttaccgtttccgatatgagcgtgctgctttatcgctgatcgataaagcttatctgtgcccaattacaggacgttggttggatacagttatgaaagggcctagcgcagatgctctgaatgggattaccccttttgtaactggtaccatgctgctggaggatgtgaaggtagaagacaaacctatcgatgtgcctcgtcctgaacgtaagctgctcaaaggggataataccaccttactgaaagcttggttggaagagaaccctgttatcactgaactgagaaacagaggtcagtggcgtgaccttaacgattctgctgtctcctacccaacgttacttcgttctagggagcactcagcacagcaggaatctgaaaagctcaaagatttcgagagagcgtttaagaacgatcatctcaatgtattgaactgttcgaccactatggagatgggtgtcgatatcggatcgctctcgatggtcgcgatgaataacgccccaccagctacctcaaactacctacagcgtgcaggtcgtgcgggtcgtcgcggtcaatcaacctctgttgtactaacattttgtaaggctagcccgcatgatgagcgcatcttttctgatcctaaatgggcgttctctaccacacctgtcccgcgtgtggcgcttgagagtgcagttatcgttagccgtcatgttaatgcactacttcttgcaaccttcctgctgaaggcgtatcaggatgaaaaccttctagtcaccaaggttggtcaattctttgtctccgacctagagttcaccaagtgtcaggcatttcttgcatggtgtgataacgatgccattcaagacgctaatctaattgagggtttagaatcacttagaaatggtactgcccttgaagggatgtcactacccaatctgatacacaaggttgcaactgcgatgcgcgaggttgaggagcattggttagctcgacactctgctttggtagatgaattaggcaagactaacgccaaaatgattcttgatagtggaaaagttgttgaggactttgcctataaacgaatgaagcgccagcttgaaagcatggagaagaatcatctgctggggattctcacaaaccgcggattccttcccggatatggattccctacgaatgttgtcgaactaattaccaacaacatgattgaaagtcgacagaaaaacaagaaggacaaatcctttggttatccctcccgctcgttagatgttgcgattcgtgaatatgaacctggtaaggatatggttctgaacggtgctgtctatcgttcggcaggcctgcagttgtcttggaagattccgaattctgagaaggaggttcaagaactccaacagatgagatatgtcgcaaaatgccgttgtggttatcatagcgcagaccatacgatttggaacaatttaccagagatctgcccagaatgtagttcattcctgagccgaatggaatacatcgtaccgaccggcttccaagtagatttccgtaaacctctgcacaacaactatactcgccctgagtactccccttatgtggcacccctccttcagatagatcaagaggaatggcaagctataggccgagcagagcttggtaagttccgtgcaactcaaaacggtaatatgttcttctacaaccacggtaagggtgctggatttgctatgtgctggcaatgcggccgcacacatgctatcgaagcgtcttataacaccgataccggtaatttctacgttaacgagtctgagatcggaaaggtctggaagaagcataagcgtattcaggggactacgcagaaaggttgctcagagtgctcaagtgataaatgggcgttaaaggtcggcacgtataatgccgaaacgatggaaattcaggttccgttcgttctcggatactccgctcagacaacgatgctcgagattcaactaagaaacccagaaacaaactcatgggttcgaagcacagagctagcatatagtttaggtattgcgatgcgtgaggtgttctgtcgggaaaatggtatttctgacattgagctaggtgttgccgttcaacaacgctttgcccagattgggggaactcgcacgagtatctttattttcgataaagcctctcaaggggctggctatgcgactcagatggctgagaacttgccacacgtccttgttaaggcttacgaattcgcaaaaacctgcccgcatgcctgtgaccgcgcttgccatgcctgtctacttgatttcgatacgcaacatcagcttgaagaactaaaccgacacgccattattcaatactttaacgagacgcgccttattgagcgattagagctacctgaggagcgtaaattctttggtcctaactctcagcccgaactgcttaacgccatctcgttactgtcacttaaggggggacgaagcaaagagatcgatatatttatctctggcgagaactgggatctttccaatgcggcagtactcaggcgcgtcaagtacatgaccatgcaacctgtcagagtacttttccataaatcgttagaggacaaaatcgattcagatttggcgtggcagctccgccgcgttattgactcagacattgatgtgtgcctgtattccactccgtcaattttggaaggaaaagcactgccaataatgcgaatgaagtttcaggattatgattactggtatgccacagaggaaacagacctaatatctctgaattgtgactggggtaatacccacaacttgtgtttagtagctagcaaaaataaatcatacgatttcgaagcgaacctgtttgatctcgaatccaaagcagctcaagccaatatatccagtaatatgggagttttgaacaactttgatttgttgacaggaatccacatatctcgctttggtaatcatttactggatgcactaataaaaacggcgccagctttagaggcttacctgaatagtggtattagcaaaattgaatattccgatcgatatctactgtcccccatcgggatcatgctgattggtgacatatttaaaggtttcaacgatcgatttggatcgttttctgcagagctgacgattagctatccgccaaccaatacacgcaggccttgctgtgttgccgacaattttgaaaattctgatcagttgcttgactgcgtttcaggtgttagcgactctatcggtctcaccatcacctcgaagcttcgtgagaaatatgatatggatcatggacgcaagcttaacattgagctgggcaatggcaccatcatccagattctctttgatcagggaatgggttattgggccaatcgaaaaccatatagccgcaatcgtttcgatttcgaaaacagctttgacgaaggtgcagactaccagcgtaaagaaattgtggttcgcatcggcagcggtgatagttatatcgttgtctatgaacgtgactga

SEQ ID NO: 28399 - DNA, 3615 bp, Citrobacter sp. MGH100
atggttgcaataaccgatatccagggatgggttagctcattcaagtcatctcgaggtataccggctagtaatcccttgtgggcttataaggtcactgatgaggagcttgcagacttgcagtcactactcctcaagtttgctgaccaactaggtattcgaaagatcctcaggctatatgaatcccagtatgccggggcttttgttttatttgccgcaacctggcttcaacgcaataatactggtcgttcaaaatgggaacctgttcttgaagcaattcatgcaaaaggtattgagcactccgagaagacaagtttggttgaagctggtcttagatcttgggggttagaagtattcgcaacagagttaagtcatcgatatatagatacattggcctgtcaagggggactgcctcgttcggacatgctgcgagagtcacactcccaaatcatgggttatttcgagtcggtattggcctattacgagcgctatcagcagtcaatctcgctttatgatcttgcgctagaagaactcaaacaccttcccttgactcttcagcaagatgccttcgctgagctggtaagtcgcctgattgaacggctgctcgactggaagacgacctatgatctggttgatgttaaagacgccgttggtgttttggattatcagcatcctcgctggcgcgaagagctgccattccttgttctcgatgaagaggctcaaacacttattgatacactgcttaaacgagcatcatgcatcaaacgacgcgaacttcatccagttcgagttaagcgtaccctctacattacagagcacggatatcgattcaatagtgagatatacatagcacaacagatcgatagtgaggatctcaatcgtcagtttggcgtaacagctatgccgagttgttttgaactctcaacaataattccagacaatcaacgtttcagaacagcggtatttacacaccgacaaggtgcacattcaggttggctggtttcgagctacatcactgacctgaaaaatgcccttgctactggtgaagtaggctatgaactactaagtgaagggcgccaactcgctgaaggtgtttattaccgtggcgatgccatgagtgacgcagctccttgggtttttaatctcagtggcatggagatcaacttcattggacaaggaagcattaagtccagtaaaggcaagctaatcgttgtcaccaaaacaacaccacgcaaaggtaatcaactctcctccgtcagattatgtggagacgtcatcggtatcgatcgccaagtgtacgaggtaacaggcgaagcattgatttcaggtattgcgggtgactatcggatactctgcagtgcggataccaatgaggaggtatcagttattgttacaggaagagaacttgataccgcaagagccaaccttccggtctatttgggcatcccagcgattcacttttcgatgcaggataacaaaggcaagatcgatcccagtgacctgttttggtttactagcaaaaatgagcctctcatttccctacaagaccctctcgcaataggcaagggcgtcatcgtttggcggtccgataacaatgtagtatgggagcatgcttgcgtcctgctacccgcagggtttgctctcaaaattaccaacaatgctgagggtttgtatttgctcagcatcagcgatgctggcaatccacagattggtatgcaagtgggattcgagtcgtggatgacttctgcatcctacgtcgtagatggcacaacaaaatgtagtctctcaccaacagattcaattagagatcatgtcggaatagtactgcgttggaataatctggattattctgaagttaatctcgatatttcaattagctttaattcgatctctctaaccgatcgcaagggcaaactctacagagaaactgaacatggttgcttgtcgctccaagatttgccacgtatgcgtacggtcatcagaacagcaactgaagttagccagatcaactcagtagtgagcctagctcacgttaataagcacacagggcatgagcaggtaatcgttgccaaaaaacgcactttcgatgtcgttagagaaaacggcatatatgtgatagagggctctgagctcgctgagttggctcgctttgtatatagccaggctgacgatcaagaacagtatgtgaagatggatttcttcgtccatcaaggactattcagcgagacactgcaatcctttctaccagtcattcacagatacaagcatgacccccgcttcattaaagctaaacgagcgtttgaactccctgttactcctttactaaaaaggttggacagccccgcactttacctctcccctatctgggatttgggagctgacccgctgatattgatgcctgatgatacaaaggcatcggtatggcgttactccatgcctgaggttggtgaaatcgaatatggtgcatggctagtttggggtgagcctgagatgagcattcgcccccgtatcagtatttatccaacgcctccaaaagcgaaaaaacgagaagaagtcagtgctatcggccaacaacttttgagcattctgaatatgaccgtagaaaacgatatgcctgtctacgaagagaccttagcatgggacacactagcgtatgccgttaagtatcttgatcctagtgaggaaagaagcgtccgtaggttgaaatcgattgtgagagcgatgggatacgatttgaaccatgaaggatggaactatattgagggtgtacttaagcggatcgagagtattgaaccgctagccgtttacacaatgaccgccgtcatgcgtaaccactttacgctggttgctctgttgttcaggaacccggcttatttccatgctgtctggggactgtctgacaaaatggggtttgagtgggcttcgattcgtccatacaattggataacctccatacgcaatgcctacgagtggcataaagagaactttaaaacgctaaaatctatcgataaagagtattatgagaaagcgattaacgcaccatttgaaaatctgcgcgagaaaggcccttttttcgcatatctagctgacgttgccactgatacaccggcttttgaaccggttgagatttgggctgatgacgaaattagagctcaagggcttgaaagtcaaacactcgcacatcattttttccttaaacgtggagaattacttgctcgacatgcgggaaggctgctcaacgaaataggcactttacgcaacactaaacagctcttagagataatggacgagaaatggccctttgctgagcttcctcgcccccttaagggattattgggaacgatcaaagttaacaatgacccctatggtaagaagatgactgctcaccaacttaccatagggttaccacttcgctgggcatttttcagtggcggattttatgaatctcagcttccaggttgggcacaggtaaaaattcgttacgccatcgcccttctcgacgaatttgaccgtgaatggctgcagtcagtactgctaatcggccacttggcttgcgaaattgcattattggaatatgctgcgcccggactgaaacataaagaggatgttacgccatga

SEQ ID NO: 28400 - DNA, 6321 bp, Citrobacter sp. MGH110
atgactacacgctatttttcgtcacttattgaacaatcgttgtctcgttctacagaagcaacgctgagtatcatgggggtcacaaacccgcagttgcgtgaacacctcgcgcagcaaatgggcgccgattgtggggagtctggctcatttcttgctgcaccggtattccagcaaatgtttggctggaaagagtcaaataacacgatgcgcagcctgactgaaggcaaggcattactaagtaaagccgttgttgattcgcttgatgctcagaacaatggtcgctaccgttttggtgctgactggaaacctttcactcaccaactggccagttggaaggctttactggaagagaaacattccgtggtggtgacaagtggtacgggttcaggcaaaacggaatgttttatggtgccggtgctggaagatctctaccgggaactgcatgaaaatggcaacaatccgctggttggtgtcagagcccttttcctctatccacttaacgcgctgattaattcacagcgtgagcgcctggatgcatggacacgaggttttggcaccgggatccgatactgcctctataacggtaatactgaaaatctccacgctgcggtaaaaagtgagcagataaaaaggccgaatgaagtgctctcgcgtgaaaagatgcgtgaagaacctgctccgattctggtgaccaacggcacaatgctggaatatatgatggtacgccaagtcgacgccccgattattcagcaatccaaagcacaaaagtcactacgttggatagtactggatgaagcgcatacctatgtcggttcgcaggccgctgaactggcgctacagttacgtcgcgtgatgacggcatttggcgtgacgcccgatgatgtgcgtttcgtggcaacatctgcaactattgccggaggcgatgccgaaaaacagctgaaaaaattcctctctgaattatccggtataccgcaggagcgtattgacgtactggacggaacccgggtgattccgaaactagaaccgtgcaaacacgtttatattccgttagaagaaattgagcaaatccctgatacagacatgaagggcgtaagcccagagcgctttgaggcacttacacattcacctgaagcgcattacttgcgtgagatgttagtcactcagccggatccaatgaagctggatacgatgacgcagcggttgaatacgctgaccaggcaacattatagccagcaggatgtgctgcgctggatcgatgtttgctccggcactcaacctaatactaaagatccggcatttctgaaggtaagagcgcatatcttccagcgcaacacccagggtgtgtgggcttgcgttgataaagagtgcagaaaaaagcacggcactccgctggaaaagggctggccctttggctatgtgtatgtgaatcaacggcaaaattgtgactgcggaagcccgatctacgaactggcattctgtaatgaatgtaacgagccacatcttttggcgcgggacaaaaagggcaaactggtccaatgggaaaataaaggcggcgatgagttctcgttgcaggatgatacgcatgttgaatatgacggcgtagaagataaagtcgagaaagagagtactttccagcccccgcttattattgccgcagaaaagaccagtgagatggggtataccatccaaaggctggatcgccagacgcgtcgtattggcgtgggtagtaatgacagtatcccgttagttattaatgatattgagcaagtttgcagcgccagtggctgtggctacagagggacgagcgggaaacaacccttccgtcgcgctttattgggggggccattttatgtcaccaacattgtgcccaccgttctggagtattgtcaggactttattagtgaagaaggaaaagagggcgtcggacctgattcgctaccaggtcgaggccgtcgactgattacctttaccgatagccggcaaggaacggcccgaatggcggtgcgcatgcagcaggaagctgagcgcagtcgtttacgcggcagcgtggtggaaatcctgagctggcatcaacgaacgcagactactgtcacaccgaatgccagtgccgatcttgaaaagttatccgcgagggcaaaacaggcccgaaatgaggcagaagaatatagaagctggggaatgccggaacaagcaaaactggcagaagcgcaagctgaacagcttgaacaggctattcaggttgcgaccggtggcaaagcagcaactgttctgctgtcccggacctggacggaaatggttaatgaacttaaagagaaggctgatattcgcggtccgattctacaatataaccactatctgaagcctgagattttcaatgaaaacggaggcccgctgaagctttcagaaatgttgcttttccgggagttcatgcgtcgccctaaacgaactaacagtctggaaacgcaagggctagtccaggttggttatcaggggctggagaaaataattaaactcccggtgcactggcatgaaaaagggctgacggagggcgactggcaggattttcttaaggttacgctggatttatacgttcgtgaaagcaacttcacgcaactggacgatgaattgaaaaactggattggtagtcgtttttcatcgaaattcgtccgtaacccggaaacgaaagatcctgaagataatcagaacaaacgctggccgcaaatccgtaatggcaacttatcccatcgtttagtgaagttgttgatgctgggagcgggtttcaaaacagcaaatacggcgacgattgatattatcaacgcgtggctgaaagaagcatggaatcaacttaccgggccacttgccgtactgaagcctgatggtaaccgtttctatctgccaaaagagcacctgactttttctttaatcacggatggctggatttgcccggtaaccaataaaattctggataccacctttaaaggcttaaccccttatctgccaacccatatttcgtttgaacatcttagccaggtgcagttcgacacgtttatcgcgcaaaaggtcaccatgccggaaatctggaagctggaccgttcgcaagaagactacgcggcaggtctggcgaaagtacgtgactgggtcagcaaggagccgctgatcgcgcaattacgttcggaaaacgtctggacggatatcaacgatcgtgttgtggaaggaggcttctattaccgcacggctgagcactcagcccagcaatcatcggaacgtctgcaaagctacgaaaagatgttcaagaatgggcaactgaatgttctcaactgttctaccaccatggaaatgggggttgatattggcggtattactgccgtggtgatgaacaacgtaccgccgcatccggccaactatttacagcgtgcagggcgggccgggcgtagtaaggaatcgcgagcgatctcttatacgctatgtaaagggaacccgcatgaccagcaggtttttgccaatccgctgtggccgtttgaaaccatgatcccggccccgatggtggcgatgaattctgcccggctggtacaacgccacgtcaatgccttattactgtccgacttcttatgcaacgttattggtgaaacggagaaagaaaaaaccagcctcgacagtctctggttttttggtgaggacgacgggcagtcaaaatgtgagcgctttaaagtctggctggagcgcccggttcttgatatcgacgcggcgctggaacggctggtgaaaggtacggcgctgcatggagccagacccgacctgctgcgggataaaaccattaacgcgattactttcctgcaacagcgatggctttccgtctatcgcgatcttgtggctcaagagcgcgaatcacagccgcaaacgccttatcgcaagcgtatcgaactggagaaaaaacggcactgtggcgagtatttgttgcgcgatctggcagccagaaccttcctgcctggttatggcttcccgacggatgtggtgacgtttgataacttcactatggaggactatatccgtgaaaaatcgcggaaaagccgggataaaaaagatcgcgaagataacgtgtcacgctacaaagggctgccctcccgaaacctgggagtcgccatccgggaatatgcgccaggcgcagagatcattcttgatggtcgggtcttccgctccgccggtgtctcgctgcactggcacaatattaacgctgataccaatgaggcccagcgtctggattgcgcctggcgctgccacaaatgcggtacgattggctataaagaggggatgagcaactccgggacgctctattgcaccaacagcgcgtgtggtgaaaaaattatcactgaaaatcgccgtcaggtgctgcagcctgccggatttgtgaccgatgcgcatgcaccggtgaccaacaatattgaaaccatgaaattcatcccggtggtccctgcatgggtatttgttaaagccgaaccaatgccgttgcctaacccaataatgggatatatgacctctggtgctgacgggcatgtcttccagcaaagcctgggagaaggtgggcatggttacgcgttatgtctgagctgtggtcgtgcagagtcgatgttgaatgctaacgacgcaccgaagagtatggaagcacactacccaccgcgcccgggaaaatcggatcgcgatagccagaatcaacgtctaatttgtcccggttcgacggcgcttatgaagaacgtcacgctgggggctttggcgcgaacggatgtctttgaaatggtactacgcaagccgcaaaacggtgaatatctgccggataacactgaagaggggcgggttgtcgccatgacccttgcagttgcgctgcgtcaggcgctggcgggtgttctgggtatctctgccgcagagctgggctacgctgtgcgtccggtccggttggaggacgggcaatcggtattagccgttcagctgtatgatgtgatcagtggtggggctggttttgcctccagtgcgccattgcatattgagtctattctgcagggaatggtcaaacagctagggtgtcatcattgtgatacctcctgcagtgaatgcctgctcgactcccagactcgccacgatcacgatttactggaccgaaaagcggcactggcctggcttggggatgacttcgtctactatgttggtttgccggatacggagacattctcgctgccggatgcccgctactgcccgggagccattagcgacacccttcgccgggcgattaacgaaggagctgaaaaactcacgctgtggatgaacgggccgctcaatgagtgggatctctatgcccgccaattccgggcggctattcagaactaccgggtaaaagataacgttgcggttgatctcgtcatcccggcaggcgtcgatgaccctgaactgatgcacgagctttcgcagtttactgctctgggtgtacggttgtgtcatagcgaacaggctccggacctgccgattgtggcacaaatcgcctttgccgatcgggtcatgacgctggcttcacgcagccagcaggcaacgatccctggaccgggctggcatctgaatgacgaactggttgttcgcagcctcggctataaaacggtaaaactgaacgagtttgttctgccggggaaagccacgagcgcggttgaacgcgtcaaagatattgcgatccataaagagctgaacggcccgctttcgttgttcggacaacgcttctgggacgtgctgtttaacgaccatgaagaggcgcagtcgctgatgaaaaatcagcggatcatcggcgttcactataccgatcgctatctgcaaaacccggttgcgctggtgctgctggcggcgttattgaaaccgctgaagccgttactgactgaggaagctaaggtggcgattgatacattattcaaacctaaagatcgcgccggtaaccggcctttccatgactggatgagcgacgcggattttcaggatttcgccgaccagtggtttgccgcggcaatgggcagggcggtagcgctaagagtattcgattcgctgcgcgacattccccaccatcgtaaactgacggtgacatttgagaatggtcaggtattaaagattcgttttgatcaggggatgggctactggcgtatcaactttgcatcgaaatggtattactttgacttcagcgatgacgtttcctttcagttaggcaatatggcgctggcctgtcaggatggcaaggtgcttaacagcgaagaaagctgggcaacggatgtgctggtggaggtgatggcagcgtaa

SEQ ID NO: 28401 - DNA, 3300 bp, Citrobacter sp. MGH110
ttgaatcagtcagaatacacgtcgatcctaaaatgtaccccgtggctagataaattcctcgctcgtagaggattgaagcaaccagatcatcgcccgttatatgaatatcacgcaacgtgtgatgaatatgatgaattgaaacggctgttgcgagctatagggctacccgatggttacaaaagtgataaagggtatgcagcctgcttcactttgttctgctctgagtggtacagaagggattacgagcgagattgtggatggacgtgggaacctatttataaaactcttggtatattgctaccttcttctgaaatggggaatataatccctaaaggtctggatgggtactggggacgcccagtgcggttctatgatactgaaaggcggaattttttagggtccttattcagtgaaggcggtttacctttcaggttgctgaaggaatctgatagccgttttcagtcaatgttttctctcattttaaaccaatacgatcaggctaaatcctctaacatttccacgtacgcgttggttcatgcagcggtagaaaaatcatccctgccagtcgttttcaaagaggatacttcagttgaacttattagtcgaatggctgaacagttagtatctcttgttcaaatttatgatttgagtaatcataccgaacccgtaaaagaacttgagcgtgttcatccaaagtggcgggacagtttccctgttcctctagaggatgatacgggtactagtttccttaatggacttttacgaacagcttctactgaatcaaaaccccgcattcaaaagaataaaaccactctctttcagtttttatggtcagaaaataaccctgaagccgtccaggctattatttctctgcctgaggagctgagcttttcaattgatagtgagccttcaacaacgcgcttcgagcttgctatctatgaagatggtaacgaaatcgcaagtctgggacctgcttacgccacgttaagtaactcccaggcaaaaataagagttcgtaagcgcgagattaaattttgccgaagaaatcccgcagtaagtttgtttattgtggcgagagctgggggaatgtttgtcggctccaatcttttagaaggtagtgaagttgccgttggcgatgttccattggtttttgtttctgataaaagtgaatggctgttacagggacaagcctcttgcagcgtgcgtggcagtcatgtgcttatcgtactaccaaaggatggctgtctggcttcggaacatgaggattgtgactctagcttttcggctttgggctgccgaactctgactatcaaaggtcggcaggatatcattattgaaggcgacgaaacgtaccggataaagacaggaagagagcagattatccagactggattttctttccagggaaagcgattgaattggacaagctacccggatgaagtcttccttggtattcccggaattaccaaaaatcctgagaatctctcaaagcatcattataaacgctttttcaacggtacgtttatagatgattgcgatgtgcaagagagaatgggagcacagtttatttcggtgcgtaacgaaagtaatgaaactttactgcgtaagaaaataggtattctccccaatgattttagcctggaaataaaaaacggagaacaggcaaacgaaggttcggtcattattactactcagcatccttgtttgtatcgtttgaaggaaaaaacacttgaagttggacgggagcggttgcctggtagtacagaaataatgatgaaggcggaggggatacctcctgcatcgatttcattacaaataacgccaaacctcactgcggacccaattgttatttggttaccatttcctgcacgaggctgtcttgcgttcgataaagacgagaagcctctacctaaaaatttaacgattaacgatcttctgggagccagagcataccttttcggaaaaaatggagagcctacgcgataccagcttgaactacgtttacattcccgtagtggaatgcaggcttggtatgagtggcactatagtgcgggagaaagtccggtagagcttacgttatacagcttaagggaacatattgataatttactctcactggaagagggaattgatcaaatagttgatatgcgtatagaaggaggtggtagttcttttacctggcagattcgacgttacaaatatagtctggactatgatcgggaaaggcagattcttttcgcaaactcaataagtaatcgtacaggacagatcccttcgcccgtaattatgttactcagcgaaccggagagaaaacccataccgctgatgtcaagaatgagcgaaggtgtaccggttggggaattcgaattaagttcgacaatacaaaataatggcccatggctggtgttgccaaaacaaggtgaagaagcttcatttcggccatgctacattgctggcgagtcggtgattcaaagcgacacgacaacaatacagtccttgcaaaaagcaacgcagctttttaatccccggtcggatgtaaatacaattacgttagttctggaacaaatggcgaacgaccctgcacattcaggctggcagtttttacgcaatttatacgatcagtttggatatttacctttggctacctttgaagtatggcgggcgcttgttcagcatccgcaagcgttggcgatgtcgctattcaaatttgaaatgtccattgattatctcagccgtattgaaagcgagtttcctgttttctgggagtttttacctattacagaagttaaacgtgccgccacacattttcgtacttttttgactcataaaggtgcgcctggggaaatgcagataaagttgctggacagaatgtatcagcagctgggcacagtgttcccgacttatgccagtgaggtgaaattatggttgagtcaagggaaattaccaccggtttttccggagtttgtgatgaaaggtattatccaagggtggtatcaggaacttctacgcgaacatggtgaatctcgctggccagaatttggtggtccgggccttttccgttggtatatgtcgcaacaaaatccggttatcgatatttcacctgatgccagttaccgatattccgttaccttgctccccgtatttgctgctgctgttgcaagcggaaaaacaacatttggcagtgtttttgaaaataagcccggtgccgtattttttttgaggcaggttagagatttcgactcacgatggtttaacgccattttccagtactgcttattgtgtaatgttaccgaaaaataa

SEQ ID NO: 28402 - DNA, 6300 bp, Comamonadaceae bacterium A1
atgcaaacctcctacttcgccgatctgctgccagagctgtcaacacgcgcggcccgcgccacgatcagcaagctcggcttctccaaccagccgctccgaaagcacctttttgaaatcttcgctaggggctttggcgaaaccgggtgcttccttgcagaccctgtcttcgaagccaccttcgggtggaagcaggccgatgcgagcatggcctcattgacgaaggggctgcttcatgctgacctagtcaatgccatggacaagccgtggggagacaacgccaaggagtaccggttcccgcgcgaggccaagccctatgtccaccagctcacggcatggaatgcacttctcgccccgggctatcaatccgtggtcgtcaccagcggcacggggtccgggaagaccgagtgcttcatggttcccgtgctaagcagccttgcgcacgcacgcaccaaggaacctgacattcgtgggatacgcgccctgttcttgtatcccatgaatgccctgattcagagtcagcgagaacggctgcgcgcgtggaccggcccgttcaacggtgacatccgcttctgcctttacaacggcatgactccggaagaggccagggctgagaagtaccgggagtcgcccaacgaggttcacgaccgcgcgacgcttcgaagcagaccgccgccgatcttggtgacaaaccctacgatgctggagtacatgctcgtccgtgctcaggatgcgccgattctcgagcagtcgcagggcacactcgaatggatcgtgctggacgaagcacacaactacatcggttcacaggcggcggaactggcgctcttgcttcgtcgcgtgctgcatgccttcggcaccgacgcgcagaaagttcacttcgttgctacttcggcaacgatcggttccggagacgttaatgcaaaggcgcaactgcaagagtttctcgcaaagcttgcaggtgttgagactggtcgggtggttgttgttgagggcgaacgacgtgttccgcaagtcgatgcgcccattgacttggcagctgccaagacaagcccgaccgagcttgccagtctcccggatgacgagggtcgatatcttcggcttgccgttcatccagtagcgcgaaagctgcgagacctcttcgttcctgcggtgtccggacagggctatcaacccctctccgccatcaagaaggcgttgcagagcgccggccctacgaggacggatactgaggcacttgagtggatcgacctgctgaccagcgcggttcagggttccgggcgtgaagcggttcctttccttccgcttcgccttcacgcctttcacaacacgctgaacggcctttgggcctgcgcaagtcctttgtgcagcaagaagatcacgaccctgctcgcagatgccgattggcctttcggcttggtctataccgaagagcgcagccgctgcggctgtggcgcaccagtgttcccattgacctcttgcaatgactgcaacgaaaccttcctgagtgcggacttgatctacagcggcggaatgcggtgtttgaagccgcccatgcaggacgatgttgacgagttcacgctggatcgagacccagaggaacgtgaacccagtgacgacgacgtggctgatgacgaagcgccgacgtctgggccgcgaacccacgcgttgatcgtcaacggatcaagtcgtggcgcagcagtctccattgacgtcgagacgcttgagctcgtgcccaagcccgtggagtcagccctggctttgagggtgcaggacgtttcgctcatcgacaagcaacaggtactgaaatgccctggctgcggtggcgcagcgccgcagctcgaacagttcagacgcccgatgctgggagcgcccttcctgctggggaacatcatcccaacgctgttggagttctgtcctgacggggagcaaccgctcgactcgccgatgcgaggccgtcgcatgatcaccttcaccgacagccgacaaggaacagcacgcatcgcggcgcagcttcagcaggatgccgagcggaatgccttgcgcgctgcggtgtatcgtaggctcgtacttgcgatgtcttcgtctgggccggaacaggccgagatcaataagaggctggcggacaacagcaccgtactcaaggtgcttccggcaggtacgccggcggccttgactgtcgaaaagatgatgagggacgacgaggagaagctgaggaagctggcaggcggcaagccggtactgcatgccgagcttgtccaatggctggccactcaagtacccgacatcagccggtggatccacaggtactacgaagaatccgactcacatttccgaacggggcgtggcaaggaacttctgaccgagattctcctgtgtcgagagttcgctcggcgccccaagcgccagaacagcttggagaccatggggctgatggcggttaaataccccaagcttgcagccatcgtctccagacggcccgcagtcgaacaggctgggatgacgctgcccgagtgggttgatttcctgaaaatctgcttggacttctatgtccggcagagcttctgcttgaagctgcccacaagctgggagcggtggggaggcaatcgagtcttctcaaagcaactgctaccgcctttgtcggtagagcgcagcacctcgaagctcttaaagtggcccaaggttcgccttggcgatcggcagcaccgactggtaagactgttagcgtatgcgctgaaagtcgatccgcaaacggctacaggccgcgatcggatcgacagcttgctgcttgctgcatgggacgatctctccggcaccgccaacctgttgcagctaggcggcggccaaggccggtacctagatcttgccgactttgcattccagaccatcaccaagggatgggtctgcccggtgacgaggcgcattctggacgtcacgctgcgcggggcaacgccgtacttgcctgagcgacagatgcgtgaggacgtggtcctctgccggtccatcgaaatcccagtctgcgatgtcatcggtcgtgacttctccagtgagtccgagaaggttctcgcagcacgcgcctgggttgaagctcaaccatcgctggtagatgcccggatagaaggcatctggtccaatgtcaacgaccgcgtgattgagggggcaggctactttcgcgctgtcgagcactcggcgcaacaggctgggagccgacttcagcagtacgaggggcagttcaagcgaggggcaatcaacctgatgagctgttcgacgacgatggaaatgggcgtcgacatcggcggcatcaacacggttgccatgaacaacgttcctccgcatcccgcgaactaccttcagcgggccggacgtgcaggtcgtcgctccgagacacgctcgattgcgctcaccgtgtgcaagaacaatccacatgatcagcacgttttcaaacacacgacgtggccgttcgaaacccgcatctccacgccgggcatctcgctgtcgagcccgcagcttgttcagcggcatgtcaattccttgcttctgtcaaagttccttcgtttgcaggaccgacaaggcaagctggacaagttgacgctcgactggtggatgctgccccgggggagcagtcgacaagagcggtttgtcgcatggtgcgagtgcttcaagccagacgcacaccgcgacctgaatctcggcatcagctcgcttgtgaagcgaaccgttctggagggacgcgagtcgaacttctcactcgtcgcggacgttgggcaggctgcggcgcgtcatgcgactgagtggatggcggagttgaatgcgatcgacgagcagatctccgagctttccaagcgaactgacgaggacagaatcccgctcaaggccctgcagattcagcgcaagaggctcaccggggagtaccttctgcgcgagctcgcaacaagcgggttcctccctggctacggtttccccacggatatcacgacctttgagaccttgaacaaggactcggcggaactcaaccagtttcgcggcgagtccggggggcgcgaggacaaccgctaccagcggcgggagttgcctagccgcgacacggtgaccgctctccgggagtacgcgccgggcgccagtgtggtcatcgatggtcttgtctacgagtctgcaggtatcaccctcaactggcacgcacccgccacacttgatcaagtcaatgagttgcagaacatccgtcaagcttggcgatgtgggcactgcggatctagtggcaccagcgtgctggcctcgcccttggatcactgccttgagtgtggcgcgcggctgactcgcgaaggcaatcgcaacaagcagtacctagagccggcgggattcagcgtcgatctttactccgagactcacaacgacatcagcctccagaagtacataccggttgagacaccgtggatctcagctcagggcgactgggtgcccctagcgaaccctgcgctgggcgcattcaggtgctcttcggaaggatcggtctttcacttttcgtcgggcctaggtggttctggatatgcagtctgcctagagtgcggccgggctgcgcctttagggcacggcgaggatccggaggaaactcctgcggtgttcaagcgtccgcacaagcgactacgcggccgacgaggcaacggagatgactggaactgtggcggcagcgatagcccattcaagatcaagaaaggtgtcagtttcggtcgcgagtacaccaccgacgtgctggagctatctctggtgggactggatgggcacgccttggcggttgctgacgccgcttatacgctggctgttgcccttcgaaccgcgatagctgctcggcttggcgtcgaagagagcgagctcggttgtgacaccaagcctatccgagaccccaacggtagaccgtgtcgggtggttcagattttcgacatgcgctctggtggctactcaagccttgttgtcacggacttgcccagtttacttcgggacgcgcgcaaggttttgatgtgcgagaacgagtgcgagtctgcgtgtcagagttgcctgctgacgttcgacacgcggttccggctggacagtctcaataggcattcagcgcttcagtttctgagcgacgagtggattcaatcgctgcaactgaaggaagatcagcagatctttggcaagacatctcgagcggaataccaacccctagccgaggcgatcacgcgcgaactcaatcgtaccaacgctaggtgcctctacgtgttcatggctggagatccatcggactgggacattgctgcctcgccacttcgccagctattgcatcgcctctcagtgaagagtggcgttgggctcgccctcgtgacacccttggccgacctcaactcgctgtctatcgggaacgcgtcgacgctccgtagcctagaaacaatctgtaacgtcaagctcctcgttggcaatccaccagtggtcagcagttcgggtgtttgcttggctacagttgaggccctcgacggaacttgcacatcatggggtgtgtcagatcaatggcttgcggttccggacctccgatggggcgtattgggatcagcacttcccctagtggtttcgtccagttccaccccagcgctcaccaacgcagcacccaaacttccaccgcccacatctgccggtgcgcgggccatcgaggtagcgggagaactggacggcccgggccaaggatttggcatgcgattctgggccgcggtcagcccacctgacctgcccaacgggctgcctttggacggatcgatcgtatcggtgatctacgaagatcgctatcttgtgacgccactcagttgcgctctgttgattgagttgatcagtgctctgaaggttcgattcgagccaatggaccggtgggatgaccccgagatcatcgtgtcatccatgtacattgatgacacgcgacaagggcgtcatcgagaccaatggacgagcgactggccaagcaccgaacttcgcgatgctgccctgcactcagccctagagtactgcggcctgagggcctcgatcacctcaaaggccaagcgtgatcttatccatggacggcgaatggtgattcgctttgatcgaggcccggactgcaccatctggatggaccaaggactttcgtattggaccgtcgctcggcagcaatctcgcaccagtgcgatcatcttcaccttcgccgacgacgcggcatcgctcggcgaaagattggcggaggtcaaggtcggcgtcgaaggtcatggcatgcccacacaaatcttcttgactcgtcgggatcgttga

SEQ ID NO: 28403 - DNA, 3558 bp, Comamonadaceae bacterium A1
atgcatgagtacgctgactggattgatgcgtttctaagcaagagagggctttcacgccctaatggcgagatgttatttggctaccgcgcgacaaaagcggagtacttgtcgctgcaagcgctgatggcacgcaaactggaaagcttggaaggcacaccttggatactgcgatcaacctcggagtgcgcgtgctttgttttttatgcgtctgagtggtggagacgcgagtacaacggtgggccatggcgctggacacacatccttcagtcgctgggtcagccattttcactggacgtgcttgagcgtacggcggccgtcgagcttgggctcagagcatggggccataggcccggtggccaaggcaagaagtatctcggcgcaatcgtcgcccatggcggtctcccacttcagctgattgagcggggtgatggatccattgctaggctactgattcgtgcaatgcgacaggcccagctctatagctgggactccaatcgccttgcaagcttcttcgacgcccatcagttcgagctggtgcagcatcttcgagacgacgacatctaccgactcctcgcgtcggtagtcgtgactgtgctttcacttcgccaggagtgccagctggcgggtgtggccaacccggttgaggtgctcgacaggctccgcccgagctggcgcgaacgttttcctatcgctgtggacgacaactcggccgagccgctgcttgtcggtctggtcaaggaggcagccaaggagtatgccccggtcacatcctttcccgtcatcgcgactcgctcactcacccttggtgacgacggagagacctacggcctggccatgactgcggacatgcctggaagcatcacgctggctgcactgtccgccgcaatcggattgagtcccgacgctctcccgcaatccttctcggttgatctggtcggggtcgagcgggtgtcgctgggcgagggacgtcaacttctcggtggcagtgagcccacagcaatccttgcgggacggactgggcccattaaaggagatgcagccctagcggagcacctgctggtgctccgctgcctaggtgaggatttgcatgcacctgcggaagtgcccggtgcctacgcactggatgagactcagccttgggtgtttgtttcacgcgacactgggatcgttttggcgggtatcggagggtgtagcgttccggaggacacctgtttggtggctgtgcctgacgactgcaatgtggctgcaggtgacgacggcagcacagccgacctgaaaggcatgatcggcgggctggcccagactcgctgggtgtacatggtgcgcggtgccgctcgtgtcttggctcagggatcgcacttcattgttcggacgggtcagaccgcagatccaagcagtcaactactgtggcggggcacacgggccccctactgctccggatcgatgtcggtgtaccttggtgttccggttctgtgtcggcttgcgttggacggctctctggctcaagtgccaccgcgttctatcgagtggacgatacttggaagagcaagtgagctggttgaacagcctcgccagcaccgtggccccatagacgcgtggctcatcgaagatggggcaaggcaacgccgcttcaggatggttcttttaccacccgaggctaagcttcgctttaaatcaggagcgacggaatgtgagggagccatcgagtttcacgcttggggtatcgagtcaatcgatgcacccaaggagctcaaggctcgaaccgacccagtggcaaatggcccgaagcttcaactacatgctgaggaccgtccgcctgcccacgtaccggtctctgtcaactggccacacactccgtatgcactgcggttggagctaccctttcccgcgacgggcggtcgattcaccaccactgatggcgtcagccttcaggccggccaggcagtgcctatcaggcagctgcagacagttcgagtacaggtgttcgatcgaaaccctgatgcgccgaagcggtactcgttgattgtcgagctttcgggccgtggtggaatttccggcgtaggccggttgcacgtcgagcatgccattccgatagacaagcaaggatttggcgaacttcgtttgcttgaggtggagtccagtttgctaggactgttgtgccagagtagtcaacttgatgcaaggctcgaacttagtctcacggtgaacggtgccgccagctcgaagattgacgtcagtcgctacgacgccgacctagaactccagcaccagtcgcaggcgatgaccctcccgggggcgtgcttggcggggctgagcgctgatgagttgggtagcgtcaacctgcgcgcgttgccgctcctgctagcaaatgccgaggaggttgtgctgagtcaggctcaatcggagggtacgccggctggtcgatggagcgtcgcaagcctatctgcagagcgcggaccttggatggtctacccgtcttcgacctcgacgctacagcttcgacccaccctttacgcgggcttttccattggcgctgcttcttcccggactgcgcggctttgccccttgggagaggcaatggctatcgcatacgctgatgagcgtgcgaaggccgtcaggcgggttgtcggcgtgatggcccaagaccttgaccatgagtcttggctcttgatcacaaggcagtaccaactgttatcgcacttgccgctaagcacattcgactactggcgagcgctcgccagcagcatgccgagcagtctggccgccttgctcaagctctcccatgacgtccactcgctggtgaaacgcatgcgcgatgagttgggcgtcgtatgggaactcatgcctcactccaccttggcagagggactcagtggcttgcagcagtcgtgggcgaagcagttgacaacagacgcagaagaccccgtcgtgaagactctgtccgagcaagtttttcgcacgattggagtgtcggacccgctgctcgacgacttgattgaactggtactctttcaagcgggatacaaccgtaccgacaaactggatcgactcattgccccgttctcgacgggcgcacgcctgctggtggcacgcctttggttaggtgagaacagcatgcttcagcgttttcttcttcgaacacataccgaagacaggatctggccgcactttgacctgtcccgagcgttggtccaactctggcaagcgatgcagcccgatgccgcgtcaaaactctttgaactctgcggcaaggatttgatttggatgccgactgctggccaagcaggcccgtactctaagaacgtcaaggaggacgtggccaacgcaccggttctggcgggactggtgagtcaacttctgccagccgaatcgccctggtggactgacagtcaactggcccagttgaggcagattcggaacttcgatcccgcttggttcgaactcggttgccgtacgggtctgttgctggcgctgatgctcgaacaaaagctcgcccagacgaagccaaacactggggcaggacgttcatcaacaccgcgctcatccggcagcgcttga

SEQ ID NO: 28404 - DNA, 6321 bp, Cronobacter sakazakii
atgactacacgctttttttcgtcacttattgaacaatcgctttctcgctcaactgaggcaactttgagcattttgggagttacaaaccctcggttgcgtgagcatctcacacaacaaatgagtgctgattgtggaaaaccgggttccttcctggcttcacccgtatttcagcaaatgtttggttggcagcagtcgaatgacacaatgcgtagcctgactgaaggcaaagcattgctcagtaaagctgtggttgattcacttgatgatcaaaataatggtcgctatcggtttggtgccgactggaagccctttactcatcaattagccagttggaaggctttactggaaaagaaaaattcggtggtagttaccagtggtactggttcaggtaaaacggaatgttttatggttccggtgctggaagatctctaccgggaactgcatcaaaacgctaataagcctctggtcggggtcagagctctttttctctatccgctcaacgcactaatcaattcacaacgtgaacgtctcgatgcctggacgcgtggtttcggtacggggattagatactgtctttataacggcaatacggaaaaccttcacgcttcggtaaaaactgagcaggcaaagagaccaaatgaagtgctgtcgcgagagaagatgcgtgaagaacccgctccgatcctcgtgaccaatggcacaatgctggaatatatgatggtacgccagattgacgctccaattatccagcaatctaaatcacaaaaaacattacgctggatagtattggatgaagcacatacctacgttggttcgcaggctgctgaactcgcgctgcagttacgtcgcgtgatgacggcatttggcgtaacgccagatgatgttcgctttgtagcaacctccgcgactattgctggcagcgacgcagacaagcagttgaaaaaattcctctctgaactatctggcataccgcaagagcgcatcgatgtactggacggtaagcgggtaattccagagctggaaccctgcaaacatacctacatcccgttagaaaaaattgaacaacttcctgatactgacataaaaggtgtaagtcctcagcgctttgatgcactgactcattcacctgaggcgcattacctgcgtgacatgctagttactcagccgaatccaatgaaacttgatgagttaacccaaaggttgaattcgctaactaaaaagaattatagccaacagcatgtgctgcgctggatcgatgtttgctctggcacccagccaaatactgaggaaccagcatttcttaaggtcagggcgcatatatttcaacgtagtacccaaggcatttgggcgtgcgtcgataaaggatgccgattaaaacacggcacaccgttagaaaaggaatggccttttggctatgtgtatgtgaacaaacgcccaaattgcgattgtggaagcccgatttacgagctggcattttgtaatgaatgtaatgagccacatctactggcacaggacaaaaacggaaaactagttcaatgggaaaacaaaggcggtgatgagttttctttgctggatgatgtacatatcgagcatgacgaagtagaaggaaaaggtggcagagagagtcgattccagccgccgctgatcattgccgcaggagagatcagcgaggcaggttataccttacaaagactggaccgtcagacccgccgtattggtgttattaacaatgacagcatccctattgttattaacgatattgaagaggtatgtaacgccagtggctgtggctacagaggcatgagcggaaaacagcctttccggcgtgccttattaggcgggccattctacgttaccaatatcgtgccaactgttcttgagtattgtcaggactttaccagtgaagaaggaaaagagggcgtcgggccagattcattgccaggacgaggacgtcgacttattacctttactgacagtcgacaagggacggctcgaatggcggtgcgtatgcagcaagaagcagagcgcagtcgcttgcgcggaagcgtagtagaaattctaagttggcatcaacgaacacagacatccactgcgccgaatgccaatgccgatctggaaaagttagcggcgagggcaaagcaagctcgtgagcaggcagaagaatatcgaagttggggaatgccggagcaagcgaaattgtcagaagcgcaggctgagcagcttgaacaggcctaccaggctgcaaccggtgggaaagcagcaaccactctggtatctcgcacctggtctgaaatggtcaatgaacttaaagagaaagccgatattcgcggccctgtcctgcaatacaatcattatcttaagccggaagtgtttaatgaaaacggcgggccactgaagctttccgaaatgttgctcttccgggaattcatgcgtcgtcctaaacggactaacagcctggaaacgcaagggctgattcaggttggttatcttgggctcgagaaaatacataagatccccccacactggcaggaaaaaggattaacgctggatgactggtgcgattttctcaaggttacgctggatctgtacgttcgtgaaagcaacttcacacaaatcgaagaggaattgaaaaactggattggtagccgtttttcatcaaaattcgttcgaaatccggaatcaaaagatccggaggataatcagaacagacgctggcctcaaattcgtaacggtaatatatcccatcgtttagcgaagttgctgatgctgggggctggattcaaagccgtaaatacggcgactattgatattattaacacatggctgaaagaagcctggacacaacttaccggtccacttgcagttctaaaacccgatggcaaccgtttttatttgccgaaagagcatatgactttctctttaattacggacgcctggatttgcccggtaaccaataaaattttggatacagcctttaaaggattaaccccttatcttcctacccatattccgtttgaacatcttacccaggcgcaatatcacgcttttatcgcacggaaagtcaccatgccggaaatctggaagctggatcgttctcaggacgattacgcgattggtctggcaaaagttcgtgactgggtgaataaggaaccacagataacacaactacgttcggaaaacgtctggacagacatcaatgaccgtgtcgtggaaggcggcttctactaccgcacagccgaacactcagcccagcagtcgtccgaacgcctgcaaagctatgaaaagatgttcaagaatgggcaacttaatgttctcaactgttctactaccatggagatgggggttgatatcggcggcattactgcagtggtaatgaataacgtcccccctcacccggccaattatttacagcgcgccggacgagccggacgtagtaaagaatcgcgcgctatctcttacacattatgtaaaggtaacccacacgaccaacaagtttttgccaacccgttatggccgtttgaaaccatgatcccggccccaatggtcgcgatgaactccgcccggctggtgcagcgtcacgtcaatgcattattactgtctgactttttatgtaacgttattggcgaaacagacaaagagaaaaccagtcttgatagcctttggtttttcggcgaagacaacgggcagtcaaaatgtgaacgctttaaagtatggctggaacgcccggtgctggatatcgatacggcgctggaacggctggttaacggcacagcgttacatggcgcaagagctgaacatctgcgggataaaacaatcaatgctatctctttcctgcaacaaagatggctttccatttatcgcgatctaatggcccaggagcgggagtcgcagccgcaaacgccttatcgtaaacgtatagaactggagaaaaaacggcactgtggcgagtatttgctgcgtgacctggcggccaggactttcctgcctggatatggcttcccgactgatgtagttacgtttgataacttcactatggaagattatatccgcgaaaaatcgcagaaaagccgtgataaaaaagaccgtgaagataacgtctctcgttataaaggattaccctcccgtaatctgggtgtcgccatccgcgagtatgctccgggtgcagagatcattcttgatggccgcgtctttcgttctgccggtgtttcactgcactggcacaatattaatgccgatacaaatgaagcccagcgactggactgtgcctggcgctgtcataaatgcgggactattggctatgaagagggactcaacagttcagggattatctactgctccaacagcgcctgtggcgaaaaaatcattatggataaccgccgtcaggtactgcagccagccgggtttgtcaccgatgcacatgcgtcggtaacgaacaatattgaaatcatgaaattcatcccggttgttcctgcctgggtctttgttaaagctgagcctgtgcctctgcctaatccgataatggggtatatggcttttggttctgatggacatgttttccagcaaagcctaggagaaaatggtcatggttatgcattgtgtcttagctgcggccgtgcggaatcgatgctgaatgaaaacgatgcgccgaaaagcatggaagctcactacccaccgcgtccggggaaagcggacctcgatagccaaaatcaacggctgatttgccccggttcggcagcactcatgaagaaagtcactctgggcgcactggcgcgaactgatgtctttgaaatggtccttcgcaggccgcaaaacggcgagtacctgtcggatagtacagaagagggacggcttgtcgcaatgacgctggcggttgctttgcgtcaggcgctggcgggcgttttgggtatctccgcctcagaactgggctactctgtgcgcccggtcagactggaggatgggcaatcggtacttgccgttcagctttacgatgtgatcagcggtggtgccggttttgcctccagcgcgccgttatacattgaggctattttgcagggaatggtgaaacagctgggctgccaccattgtgatactgcatgcagtgaatgtctgcttgattcccagactcgccacgatcacgatctattggatcgtaaagcggcactggcctggcttggagatgactttacttattacatcggcttaccggatgaagagtcattctcgctgccggatgcccgttactgccctggcgctatcagcgatacgattcgccgggcgattaatgaaggagctgaaaagctcacgctatggatgaacggtgcacctaatgagtgggatttatatgcccgtcagttccgtgcggctattcagagctatcggctcaaagacaatgtcgcagttgatcttgtcattccttcagaggtggacgaaccggagctatgggatgaactatcgcagtttactgcgctgggtgtacggctgtgccatgttgaacagacgtcgcaattaccgattgtggcacaggtcacctttaccgacagggtgatgacgctggcctcgcgcggtcagcaggcaactattccagggccatgctggcacctgaatgatgagctggtggtacgtagcctcggttataaagcggtagcattgcgcgagtttattctgccggctaaaacggcaagctctgtcgagcgggtcaaagacattcagatccataagcagttgaatggtcctctttcacagttcggacaacgcttctgggacgtactgtttaacgaccatgaggaagcacgttcgctgctgaaaagcgcgcgaattaccagcgttcactataccgatcgctacctgcaaaacccggttgcgctggcgttattggcagccatactgaaaccgctaagaacaaagctgactgatggcgctaacgtagcgctggatacgctgtttaaatcgaaagatcgccctggtaaccggcctttccatgactggatgagcgaagcggatttccatgattttgcggatcagtggtttgcggcagcgttgggccgggcggtagggctgacggtgttcgactcgccgcgcgatattccccatcatcgtaaactgacggtgacttttgagggtggccaggtactgaagatccgtttcgatcaggggatgggatactggcgtatcgaattcccgtatgtgtggcgtaattttgactttgctgatgatgtggcttaccagcttggcaaaatggcgcaagcctgccaggaggggaatgtgctaaatcatgaggaaagctgggcaacggatgtgctggtagaggtgatggcggcttaa

SEQ ID NO: 28405 - DNA, 1746 bp, Cronobacter sakazakii
atgatgggagcacaaactattatcatcaaaaataataaaaatgaaacattattacgtcgcaagatcggcatcttgcccgccgactttgatattcaaatgaaatctggcgagcaagctaatgaaggctctatcattatctcaacacagcatccctgctttaccgtattgaaagacaaacctttggagattgcacgcaaacgcatgccggggcaaaccgaaatatttttaaaagcagaaggtaagccacctgaatctgtttcacttctaatctctccaaatcttttagccgcccccgttgaattaactttaccttttccggcaaaaggatgcctgatctttgatgcacatggcactcctctcgataagaatattactctgcatgacttaatcggagccagagcatttttatttggaaaaaatggcgagccaacacgtttttcattggaattacgcttaaaatctacaaatgggttacaagcatggcatgactggcattatacagctggaaaacgtcccgttgaacttaatctgtatagtctaagagaacatattgagaacctattatctctggagtcaggtatcgatcaggttgtagagatgcaagtcaaaggtgctggcgttgtaatgagctggcagattcgacgctacaaatatagcttacgttatgactacgaaagagagttgcttattagctacccagtcagctaccgagtcggaaaaataccttctccaattatcatgttattgagcgaaccggaaaggaaagcgctacctttatcctccagaatgagtgaaggtgtatcactcggtgaatatgagttgagctctattgtaaataaaaatggcccatggttgattattcctaagcctggagaggaaatggctttccgtccttgcttcattcgtggtgagccttctttaccagccgagaaccttaacattagttcattgcagaaagcgactcagctttttgatcccaaagcggaaatcaatactattacgcttgtacttgatcagatggctaatgacccagcccattcggggtggcaatttattcgcagcttatttgatcaatatggttatttacaattggccacatttgaagtgtggcgagccctgatacaacatccacgggctctggcgatgtccctctttaaatttgaaatgtcagctgattacctgaatcgtattgaaaatgaattccctgttttatgggaattcttgcctatttatgagatcagagccgcagctgataattttcaactatttcttagccagaaaggtgtgccacaggaaactcaaaccttaataataatgaatatgtataaaaggttaggtaccgtgtttccgacatatgctgacgaaattgagaaatggttaagttgcggggaattgccgcccctcattccagagtgcttcgttcgcgtctggtatcaggagttgttacgagagcacagcgaagctcgctggccagagtacggttgtaagcgtctttataactggatgattttgcagaaggatattcctttactcggcataaatcctgacgcagattatcgctttcctgtaatctttttccctgttttcgccgctgcagtcgctaccggtaaaacctcatttaaaactgtgtttgaccataaacctggagccgtgtttttcctaaggcaggtcagagatttcgactcacgctggtttaaagcaatcttccagtacagtctgttgcgctatgtttccgaaaagaaataa

SEQ ID NO: 28406 - DNA, 4143 bp, Cronobacter sakazakii SP291
atgccggagcaagcgaaattgtcagaagcgcaggctgagcagcttgaacaggcctaccaggctgcaaccggtgggaaagcagcaaccactctggtatctcgcacctggtctgaaatggtcaatgaacttaaagagaaagccgatattcgcggccctgtcctgcaatacaatcattatcttaagccggaagtgtttaatgaaaacggcgggccactgaagctttccgaaatgttgctcttccgggaattcatgcgtcgtcctaaacggactaacagcctggaaacgcaagggctgattcaggttggttatcttgggctcgagaaaatacataagatccccccacactggcaggaaaaaggattaacgctggatgactggtgcgattttctcaaggttacgctggatctgtacgttcgtgaaagcaacttcacacaaatcgaagaggaattgaaaaactggattggtagccgtttttcatcaaaattcgttcgaaatccggaatcaaaagatccggaggataatcagaacagacgctggcctcaaattcgtaacggtaatatatcccatcgtttagcgaagttgctgatgctgggggctggattcaaagccgtaaatacggcgactattgatattattaacacatggctgaaagaagcctggacacaacttaccggtccacttgcagttctaaaacccgatggcaaccgtttttatttgccgaaagagcatatgactttctctttaattacggacgcctggatttgcccggtaaccaataaaattttggatacagcctttaaaggattaaccccttatcttcctacccatattccgtttgaacatcttacccaggcgcaatatcacgcttttatcgcacggaaagtcaccatgccggaaatctggaagctggatcgttctcaggacgattacgcgattggtctggcaaaagttcgtgactgggtgaataaggaaccacagataacacaactacgttcggaaaacgtctggacagacatcaatgaccgtgtcgtggaaggcggcttctactaccgcacagccgaacactcagcccagcagtcgtccgaacgcctgcaaagctatgaaaagatgttcaagaatgggcaacttaatgttctcaactgttctactaccatggagatgggggttgatatcggcggcattactgcagtggtaatgaataacgtcccccctcacccggccaattatttacagcgcgccggacgagccggacgtagtaaagaatcgcgcgctatctcttacacattatgtaaaggtaacccacacgaccaacaagtttttgccaacccgttatggccgtttgaaaccatgatcccggccccaatggtcgcgatgaactccgcccggctggtgcagcgtcacgtcaatgcattattactgtctgactttttatgtaacgttattggcgaaacagacaaagagaaaaccagtcttgatagcctttggtttttcggcgaagacaacgggcagtcaaaatgtgaacgctttaaagtatggctggaacgcccggtgctggatatcgatacggcgctggaacggctggttaacggcacagcgttacatggcgcaagagctgaacatctgcgggataaaacaatcaatgctatctctttcctgcaacaaagatggctttccatttatcgcgatctaatggcccaggagcgggagtcgcagccgcaaacgccttatcgtaaacgtatagaactggagaaaaaacggcactgtggcgagtatttgctgcgtgacctggcggccaggactttcctgcctggatatggcttcccgactgatgtagttacgtttgataacttcactatggaagattatatccgcgaaaaatcgcagaaaagccgtgataaaaaagaccgtgaagataacgtctctcgttataaaggattaccctcccgtaatctgggtgtcgccatccgcgagtatgctccgggtgcagagatcattcttgatggccgcgtctttcgttctgccggtgtttcactgcactggcacaatattaatgccgatacaaatgaagcccagcgactggactgtgcctggcgctgtcataaatgcgggactattggctatgaagagggactcaacagttcagggattatctactgctccaacagcgcctgtggcgaaaaaatcattatggataaccgccgtcaggtactgcagccagccgggtttgtcaccgatgcacatgcgtcggtaacgaacaatattgaaatcatgaaattcatcccggttgttcctgcctgggtctttgttaaagctgagcctgtgcctctgcctaatccgataatggggtatatggcttttggttctgatggacatgttttccagcaaagcctaggagaaaatggtcatggttatgcattgtgtcttagctgcggccgtgcggaatcgatgctgaatgaaaacgatgcgccgaaaagcatggaagctcactacccaccgcgtccggggaaagcggacctcgatagccaaaatcaacggctgatttgccccggttcggcagcactcatgaagaaagtcactctgggcgcactggcgcgaactgatgtctttgaaatggtccttcgcaggccgcaaaacggcgagtacctgtcggatagtacagaagagggacggcttgtcgcaatgacgctggcggttgctttgcgtcaggcgctggcgggcgttttgggtatctccgcctcagaactgggctactctgtgcgcccggtcagactggaggatgggcaatcggtacttgccgttcagctttacgatgtgatcagcggtggtgccggttttgcctccagcgcgccgttatacattgaggctattttgcagggaatggtgaaacagctgggctgccaccattgtgatactgcatgcagtgaatgtctgcttgattcccagactcgccacgatcacgatctattggatcgtaaagcggcactggcctggcttggagatgactttacttattacatcggcttaccggatgaagagtcattctcgctgccggatgcccgttactgccctggtgctatcagcgatacgattcgccgggcgattaatgaaggagctgaaaagctcacgctatggatgaacggtgcacctaatgagtgggatttatatgcccgtcagttccgtgcggctattcagagctatcggctcaaagacaatgtcgcagttgatcttgtcattccttcagaggtggacgaaccggagctatgggatgaactatcgcagtttactgcgctgggtgtacggctgtgccatgttgaacagacgtcgcaattaccgattgtggcacaggtcacctttaccgacagggtgatgacgctggcctcgcgcggtcagcaggcaactattccagggccatgctggcacctgaatgatgagctggtggtacgtagcctcggttataaagcggtagcattgcgcgagtttattctgccggctaaaacggcaagctctgtcgagcgggtcaaagacattcagatccataagcagttgaatggtcctctttcacagttcggacaacgcttctgggacgtactgtttaacgaccatgaggaagcacgttcgctgctgaaaagcgcgcgaattaccagcgttcactataccgatcgctacctgcaaaacccggttgcgctggcgttattggcagccatactgaaaccgctaagaacaaagctgactgatggcgctaacgtagcgctggatacgctgtttaaatcgaaagatcgccctggtaaccggcctttccatgactggatgagcgaagcggatttccatgattttgcggatcagtggtttgcggcagcgttgggccgggcggtagggctgacggtgttcgactcgccgcgcgatattccccatcatcgtaaactgacggtgacttttgagggtggccaggtactgaagatccgtttcgatcaggggatgggatactggcgtatcgaattcccgtatgtgtggcgtaattttgactttgctgatgatgtggcttaccagcttggcaaaatggcgcaagcctgccaggaggggaatgtgctaaatcatgaggaaagctgggcaacggatgtgctggtagaggtgatggcggcttaa

SEQ ID NO: 28407 - DNA, 1746 bp, Cronobacter sakazakii SP291; identical to SEQ ID NO: 28405

SEQ ID NO: 28408 - DNA, 6231 bp, Desulfobulbaceae bacterium BRH_c16a
atgacggacacacgtttttttgcgtctctggctgagcagctgaatcgtggtgcgacacgtgctgcacttggtattctgggtttccgcaatgatgcattacgggagcatttgcgagaactgttccaacaggttccgggaatcgagcattcatttctggcagatgtggtgttcgaggccacattcggttggaaacctgccaaggaaaaccttggtgagttatccggtcaactgcttcatcctaaacttgtggctgctttaagtgatccgcccgagtctctccccaaggattatattttccatagagaacaatacccatatcatcaccagttacaagcatgggaagcactcgtttcagatacgccaccgcgatctgttttggtcacaagcggcactggatccgggaagacagaatgtttcctcattcctatcctcaatgatttggcaaacgagttggaaacaaggactggtccattagtcggagtgcatgctttatttttatatccgcttaatgccctaatcaaaagccagcgggaccgtcttaccgcgtggtcggaaccattcgggggacaaatacgatattgtctttacaatggagacactcccaacgaagccagaaaatcagaatggaaaagtgaagtggtcgataggaagtctctacgtgctacgccacctccaattttggtcactaattccaccatgcttgagtatatgctggtacgtaatgaagaccgaccaattttagcccaatctcagggaaagctgcgttggatagttattgacgaagctcatagttatattggatctcaggcggcagagctgacattgcttctgcgccgcgtcctacacgcctttgggtgccaatctaatgatgtgcggtttgtcgctacttctgcgacaattgctggagctggtgaaaacgcgaagaaacagttacagggattccttgcagacatcgccggagtgagtcttgatagggttaccgtggttgaaggctctaggttgttgcctgaaatatctgaaatatctaagaaaaaatggaaagatgcagattgtaaaattatgcgcgaatcgtcaccagaaaaacgatttgccctgttgtcagcagacccacgcatgcgtgagttgcggaaatccttagcccagaatgcccaaactgtttcccaattagcgataaagcttcataaagacaaaaatcaagaaacaattcttcgtacgctagaactacttgatctgtgtaccaatgcatatgatgccagaaaagaggctttccttccattacgcgggcatttttttcaacgtacacttaacggcttgtgggcgtgtgctaatccagcatgcactggacgaaccgcaacgcaccttgacaaacctgcttggccatttggaaaagttttcctcgaaagacatctaatttgtgatgcttgtcgtttcccagtttttgaaatcgtgcaatgtggtgagtgtgggggggaacatctttctgcgttggagtttagtcaacaaggaaatgaccggttgaatcctcatatttattcgcacgatgaggatgaatttcaacaagaattggagccatcggatgaagaagacagtcaggatgaggaaagtcgacacgaacctctcgggcctggtttacctcgattgctcgttgcaccccccaatggcaatcaagtcgctcttttaccagatgggcggttggattggaaccgtctcgagggcgatggtatagatgtccatcttctggggccaggagaagatgacaacgtacgctgcccttcttgccatggttcaaaccttcgtggccagcttttcaggccaattcgactgagtgcgccatttttattgcaaaccgctataccgatccttctacggcatattcaaccaacacaaacgaaagaagcactgccatatgatggtcgtcggatactaagttttacggatagccggcagggtacagcaagaattgcggtgaaattgcagatagaaactgaacgagattatgtccgaagtctgctttatcatgccgttaccgacaggattcgctcagcttccccccaggaaacaggaaaaattcgagaggaaattgccgaactggaaaaggtggtgttgaatcacccaggattgagtggggtccttgagcagaaacgtctggaactaagcaaattagagtctccgccggttgggcggctttcgtggagggatgctcaagatcgacttttgtcagacgaagggttcaaacgttggctgctgcctccattgcaggagcaaagttttggtatgaacgataggcaactctctgacctttgtctctggagagagttcttcctccgtccccgacgacaatggtctctggaatcctttgggttgcttcaactcagctatccaggaatagagaggatcgaccgagtaccggccgttgctgctaaattgcaaattgggcttgatgattggcgaaatctggcgcaagtggtaatcgattttgtcattcggcttaataaagctgttgctatcccggaagacacacttcgctggataggttatcctggtaaaccgactctagctctctcaccagggcaagataaatcaatttacaatcaacgaacatggccttccacgaggtctgtggttcaacgtcgttcacgtttagtgcgtttattggcttatgcattcaaaaaagatttggaacaacaggaggatcaagaactgctcgaggaattgctgatcggtctgtggtgcgatattcagagcattttatcccgtactgagcatggttaccgcctggacatgagtcagcaagttgaaatagtacaagtaagggatgcctggctttgtcctgtaacccgccgtgtgctacctgtgaccttcttgggacttacaccttacttgccagagaacccagctaaagaatttgctgaatgtcagaaggtaaaaatgccggtattaccggaccctttctggttgaatagttctccagaggaagcagaggaatggttggagtcaaatgaacaggttctgtgccttcgcagccatggggtgtggattaatgtgaacgacagaattgcccgttttgccagatattttcggagcgctgaacattctgcacagcttagcggctctactctcgttcgcagagagaatgatttcaaggctggcaagatcaacctgttatcttgttcgactactatggagatgggtgttgatataggtggtttgtcagcggtagccatgcataacgcaccgccaaacccagccaattttttgcagcgatctggtagggccggtcgccggggtgagtcggtttcaatcagtttcacgctctgcaaaagtacccctcacggcgaggctgtctttcacaatcctttatggccatttactactgcattggctacgccgagggtgtctttacacagtcctccaattattcagcgtcatgttaattccatggtcctatcgatctttctggcccatcatgctgctgagaatttaaggaagttgactacaggatggttttttgagccttcacagcctgggggaagtgctccttgggaaaattttcgcgcatggtgtgagacggatgctttgaccaatgaaaatttaagggaggggataacgatacttcttcgacgttcgatcatggaaggacgtagtctgatgagtatcttagggaatagttccacgatgatcaaccaatgtgctcgggcctggctggaagaggcacgagctttattagaaagtcgcactatcgtaaatacttcggagggaaacagtgcggcagaaaaggcggttgattttcaattacagagactccgcaaggagtacttactctccgaattaaccacgcgggggtttttacctggctatggtttccctggtgaagttgtacctctggtcacgacaacggctgaagagttttcgcgcagaactactcaaagagctaatactatccgggaggataatccgacgatacgggcgggttacccagctagagatctttccatagctattcgtgattattcgccaggaacagatacggtattagatggccgagtatatcgtagcggcggcgtgaccctaaactggcatatccctgcagatcaggatggatcgccggagttacaatccttccgttggatctggcgatgtgatagctgtggggcaaacgggactaagcctacaagaccttattcctgcccccaatgtggtgagcagaatgaaaaaaggatactgtgctatgaatatttacaaccttcaggatttgccgttgacatcaggtgtcgtcctcacaatgacatcaatattcctcagtacattcctgtaagggatcctcttatctccatggaaggatctgagtgggtcgctttgccagttccagcgctgggacgctatcgagtgaaccctgaagcaaaaataatccatcgatccgatggactccatgacaatggatatgccctgtgtctcagatgtggaagagctgattccatgacgtcggacgatgaattgccgtatatttttatggatagtaagggaaaccccgttcctcacaaacgactccgtggaggtaaaaataatgatcgggaaatagaatgtccgggcagtaatgaaccgtgggcgattaaacgtaatctccgattaggtattgcgcgtcggacagaggtgtttgaattgcaacttcaggaggttacggggaaaccactcgacagggtagctgcttatacaaccggtgtaatattgcgacgggctttggctgaaaggttaggtgtggaagaacgagaaatcggtgtcgcgatcagtccaacgcgtgatattaacggccattcaactttttctatttttttgttcgatactgctcaaggcggtgctggttatgtatcacaggcagttcagtatctggccttgctttttcacaaagggaaagagatactccaatgctcgcgtaattgtgatgttgcttgtcaaagctgccttctttcatatgatactcagcatcacattcaggatctcgatagaatgagggcactggctctgattaatgcccaatttttacaagctctccagctacctgtcacgatgcaggcttttggctcaaaaacgttattagaagtggaaccgttggctttagctttgcggcgtgaacgtcaacgtatcaacctccttgaagttagaatttttctcgggggaagtgtcaaagaatgggaacctcttacatggcgtctgcgaaaagaattgcttgttatccatgagacaggagcaacaattaagttgatattgcctgactgtatatttgaagtactcgaatcctcgcaacgagatgaattggcagcattggcagcactcattcatgcagaaatttattgtccgggaaatagtccggaagtcggaaatggtggacaaaatctccttagaatcatggaattgagtggcaatagcacttcagttcaatgggcggctaacaaccaggatgcgttggctccgacaccatcatggggcggaagtccgagaggagctcagtttgtgcgggtagcaaaagaaggtccgcttgatgcaataccaaaaaaatggcggaaaagagatgtttcaagtctgagagctcgagaagaagatactatttccatctctataacaaatgaattcgatggttcatcgaaacactttggtgaacaggcatggcagttgttgggaaatcgagtcccggaccttaaaagaaaattgctctccgagcaagcaattgcggccatcgaatacagtgatcgctatcttcggtcaccactttcaataatgctgctacaaaagtttataaatgggcttggctcatattctggaggggtaaacactgccacaagattaatgattgtgacaagctatttacaacgaaacgattttcaacaaccacgatttcttcatcataactggcaagacgcagaacatcggcgggggatttttacaacaatgtttcgtccatttggagaatttatcctcattgacgataaggtgaatttggctcttccacatgcacgagaacttcagcttcgatggggcgatggatctgggtttagcatccggttagatcaggggatcggctactggcgaaccgctaatggaatgaggccttttccatttgatcagtcctccgagcggcaaacggactttttgagggatcttgaattagaggtagaagcgagtaactctgagttcccaacgcagtggtatatctcaaatttggaggagcaaatgtaa

SEQ ID NO: 28409 - DNA, 3378 bp, Desulfobulbaceae bacterium BRH_c16a
atgcagtcaaatggtttacataactggattgaaaaattcctttttgctcgtactagaagcatcaaaccagatggacgcccactatacgcttataaatgcggctgtgccgactatgagactcttaaatctatcgtcctctcagcactcaatacatcgctttggaattggcccgctccctcagaagcacgtttttgcctattcgccgctgaaacatggcgaagatgtcatagcggtggtccctggaaatgggaaaccgtctttagagagttagaatattatgtcccggaacattcctggctgagcaagaccgttgaaaatggcttgaggtggtggagacgaccgctacttaaaaatagggttggccatcgagaatttctggtaaccatagcctgtgaaggtggattgcctctccttttgttgcaaaaagaaaatgtccatctatatcgctacttccgtcaattattgactgcctatcatctggaaagaaagtccctgtcatgcgatgctagacaactagctcaacgcttgtcctctatcattccgcaatccttgcgtcatgatatcgtattttctctcagtggggatttaatccagaatattgttgacttgcaagagcaggtagcagatgctcccgatcccatatccgcccttgaccagaaggttggtgattggcgaaatctgctgcccctcccgctggaagatgacacgattgaaagactgttgagaaatctggtcaatgaagcccgaaccttgtcaattacagaacgccagaaaatccgttggcgacgatttcttatacttaaaggcgaggaatggtcgattgaacaggtattggatttaccggaccgagtttctggatccagtcttcaagcgtggctgaatagtactaatataccttctcgcttacgaatatttctctatacatcgaaaggtcccgagcagattgcgttactcacgcgcctgaaaggggaaggaagtaatgctgtttttcgctgcgaagtcctgagacgtcaaggagttaaactatccggtgcggaaatcttggatggtgtacgcttacgaataagtgatggaataaaagaccatcatttgtccatagagggagaccaagaatgggggcctctaccttggtcgtttaggaccggagaagaagatatggaatttctcggggagggaacgatcaaaagtaaagtaccaaaaatcttcgtacttgcaccgccagatggaagttttgaaggggatggtagtttcgaaccggtcggactctctcttggcacggatcgaatgctttttgaaatcaccggcaagggcgaatggaggcatccggagcttggaatatgccggtaccaatgtgcaagtgccgaggaaagcacagaaacattcttacttgatgggcctcgcataatgatgcaactggaggaaaattctcctttccagggtgctcctaaactttttgtcataaacaataacgggaatagacaccgtattgacaatgctcgtttggaatggcgtccggccggcttaagtggtcttgagtggcaaaaggatattgacgaatgcatgggcgaagtttggattcgttattgcgatgatgaaggcagtcagttcttgcttcgaaaggttagagtagtgccaccttcaattcggatcagtattgaaaagataggtatcaagcaaaatgaggcagggtcaattcgaatagtgggcctaggtttatgtaaagtttggtgtgagaatatcccaggctgtcacttcgaagcacaaccgatatcagatggcgttgatattttatcattttctacccatggttcatcgattacccagttctcatgctccatttcgtggagtggaggtcgttcccttatcctacagctgccatttcccagacaaggggcggcttttgtcattggtgggaattcaataccgccaggaggcaagatagcggcgtctagattggccgcagttcatgcaattatccaggctccggttggggaaaaatactttcatttgaccgcagaaatcaaatctcgaaatgcagcgtattatagtttttcattgaatgaatccatctatttagatgggagaggacgaggtcagtttgatctccacagaatccaggaaaaactttcatcaatgttggcgctgaccggcgatctggatgctgtcgctgaattgaaaatattggatattatggaaaggtcgcttgctgcgatggaggttgggttgtttgagttagtgtttattcctgactatgccagtaatttactgacattgcccataaattgcattgaacagcttgagaagagctgggaacaacagcttaatattaagatgataaagctatggcaaccagaagctgaaccactgttgctaaaacggagcggagcatctgtagcctggactgtaccggaagaattggaggcaggaccatggttggtgttaggggaggaaggggattggccacgtttccggcctgtgttgtggcgaattgatggcgagctggaacccagcactagcttgttggttcagactatttgtgaacaagaccgattaacgcgacaaaacaaattccatgaatttgtacaacaactcggtcaaaatccagatcacccagactggacttttttttccgattatttgcagctgactcgaagatacccggcgagtgcattcgatttatttagatacctgataaaagagcctgaggcgcttgtgcttggccttcttaggagtgacgataaggatttcgacgccatctggtcacttgcctatcagctaccgttctcgtggcatcttgtaccggtcgcaatatgggaatcagcagcttcaagatttattttctcgctacgtggcgctctttcttcattagaagaaggggaggaaatggtatggcaaacatttcagaccatacgggagcgggtatccatccgtcagccatttttccggcagatatgcgattggctatcgttgtcgttgtttccaggacgtcagctggaaaacagtgaactttgcttggcaaaacaggcgccgcaaatcatttttgatttaattgtgacggaagagcagaaacttcaggccagacataatgcaaatgagcattaccctgatggcccgctggtcatggaatgcctacatcattctgattataactcggaatttagctataagaggcttgcccgcccgtaccggccagttcgttgcgctccatttgtcgctgcccagattgcgatagcaggagagtcttatggtgaatctgtgcttttcgagttgcagaaacttcgaaatttcgacagagagtggtttgattcagcttttgcctttgctctctgccttggacttgtcaaattatccgagattccaatgggagttagtgtatga

SEQ ID NO: 28410 - DNA, 6321 bp, Enterobacter aerogenes
atgactacacgctatttttcttcgctgattgaacagtcgttatctcgttcgacggaagctacgctgagcattatgggcgtaaccaacccgtatcttcgtgagcaccttacgcagcagatggcggctgaatgtggaaaggatggaacatttctggcttctcccgtgtttgaacaaacatttggctggaaagagtcaaatttcacgatgagggagcttgccacaaagcaaacgttactgagtaaagaggttgttgattctctcgataacgaagaaaacggacgttatcgttttggctcaacctggaaaccgttcacacatcagttagccagctggcaagcattacttgataaaaaacattcggtggttgtgaccagtggcacgggctcggggaaaacagagtgcttcatggttccggtgcttgaagatctttatcgcgagctacgggacaacgggggaaaaccactaataggcgttagagcccttttcctttatcccctgaatgccctgatcaattcacagcgtgaacgtttagatgcctggacccgaggttttggaaccgggattcggtactgtctgtataacggtaatactgaagagctgcatgcctcagtaaaaagtgagcaggcaaaccggccaaacgaggtgctttcgcgtgagaaaatgcgtgaggaaccagcccctgttctggtcacaaacggtaccatgctggaatacatgatggtgcgtcaggttgatgcacctatcattcagaaatcaaaagcggaaaaatcattacgctggatcgttctggacgaagcccatacctacgtaggatcccaggctgctgaactggctttacaactccgtcgtgtcatgacggcgtttggcgttacgcctgatgatgttcgctttgttgcaacatcggcgactattgccggaagtgatgctgaaaagcagctgaaaaaattcttatctgagttgtccggtgtgccacaggaacgtattgatgttctgggaggtagccgtgtcattcctgacctggcgccgtgcaagcatctttctctatccctggatgagcttgagcatattcctgattctgatggggaggggattagccttgagcgctacaccgcgctgacccactctccgcaagcgcgtcatctccgcgaaatgattgtgagtcaacccagaccgatgaagcttgatacgctcacccggcgtttgaacgagctaacaaaacatcaatacactcagcaggaaattttgcgctggctcgatctctgtaccggtacgcttcccagtgcgcaggaaccggcattcctgaaagtcagagcgcatatttttcaacgtaatactcaggggatatgggcctgcgtagataaacattgctccgctaaacacaatactgcgctggagaaggggtggccttttggcaatgtgtatgtaaatcagcggcaaagctgcgagtgtggcagccctgtttatgaactcgcgttctgcaatgagtgtaatgaaccgcatttacttgcccgggacaaaaaaggaaaacttgtacagtgggataataaaggtggggatgagttttcgctgcaggatgaagctcctgatgattttgactcctccagtgaaaaagttcaaaaagaacaggtattccagccaccccatattattgccgcggaatgtaataccgaactgggctatatcgtgcagcgcctcgatcgtcaaactcgaagtattggcgtagtcaacccggatagtattccgttggcgatgaatgatattgagcaggtctgtagtgccagcaactgcggttatagagggggtaaaggtaaacaacccttccggcgggcactgttaggcgggcctttttatgtgacgaatatcgtgcctaccgtgctggaatattgtcaggactttatcagtgatgaaggtaaagagggggttggcccgctttctttgcctggacgagggcggcgactgatcaccttcactgatagccgtcagggaacggcacggatggcggtgcggatgcagcaggaagcggagcgcagccgtttgcgtggtagcgtggtggatattctcggatggtaccaacggaaacagtcaacatatgcgccaaatgctcaggctgacgtaacgaagttgactgagatggcagcaaaggcacgtgaagaagcgaaaaatcttcatgattgggggatgccggaagaagcgatccgtcgtgaagaacaagctgagcgtttagagcacgccatccaggtcgccactggcggaaaagtcgatacggttttgatttccctttcctggcctgaaatggtcaaagaattgaaagataaggcggatatcaaaggtcctatcctgcagtataaccactatcttaaacccgaaatattcactgaaaatggtggccctttaaaactcgctgaaatgctgcttttccgtgaatttatgcggcgcccgaaacgcaccaatagcctggaaacacaagggctggttcaggtgggttatctggggttggagaaggtgcatagcatccctgctcattggcaggaaaaaggattaactctggatgactggcgtgattttcttaaggtcacgctggatttctatgtcagggaaagcaactacacccagttggacgaagatctgaaaaactggatcggtagccgtttctcttcaaaatttgtccgtaaccccgattcgaaagagcctgatgacaaccaggttaaacgctggccgcaaattcgtcacggtaacgtcacgcagcgcctggtcaagcttttgatcctcggcgctaaattcagcagcgtaaatacggtcacaatcgatatcgttaatgcgtggctaaaagaggcatggcttcagttgacggggtcattagcggtattgaaatccgacggcaaccgtttttatttacctaaagagcatctgacattctctctggtacaaaaagcctacatttgcccggtaaccaataaattactggcgacggctttcagaggtctgacgccttatctgccaatgcatattcagtttgaacggctgaccagtgcacaatatgacgcctttgtcgcacaggcggtgacgctgcctgagatttggcagcacgatcgttctcaggatgattatgtcgatgggttaagaaaagttcgtgactggcttgggcaggaccctctggtggcgcaattacgttcgcaaaacctctggacggacattaacgatcgcgtcgttgaaggtggattttactaccgcacggcagagcattccgcccagcaatcatccgaacgtctacaaagttatgagcgtatgtttaaaaacggacagcttaacgtccttaattgctcaaccacgatggaaatgggcgtagatattggcgggatttctgccgtggtgatgaataacgtcccgccgcaccccgctaactatttacagcgtgctgggcgtgccgggcgtagcaaagagtcccgcgctatttcttacacgttgtgcaaaggcaacccgcacgatcggcaggtttttgctaaccctctctggccttttgaaacggtgatccctgcgccgatggtggcaatgaattctgagcgtctggtacagcgccacgtcaattctctgctgctgtcagactatttgtgccatgtcatcggtgaaaccgaaaaagaacgcaccagccttaacagtcagtggttctttggtgaagagcttgaacagtcggtgtgtaaccgtttcaaagcctggctggagcgtccgacgctcagcattgacgcggctttggttcgtttggttaaaggcaccgcgcttcatggcgttgcggcagaaaagctgcgggataaaacgtgcgacgcgattgcggcgctgcagaagcgctggctgggaatttatcgcgatcttgttaagcaggaaagtgaatcgcagcccaatacgccgtatcgcaaacgtctggagctggagaaaaaacggcactgcggcgagtatctgctgcgcgatttggcggccagaaccttcctgcctggatatggcttcccaacggatgttgtcacttttgataacttcaccatggaagattatatccgcgagaaaacgtacaaagtccgtgataagagcgatcgtgaagataacgtctcgcgttataaaggcttgccttcacgcaacctttccgtggcgatccgtgagtatgcgccgggcgcggagattatccttgatggacgggtcttccgctccgctggggtgtctctgcactggcataatctcaatgctgataccaatgaagctcagcgcctggatagcgcctggcgttgtcacaaatgcggtacgttaggctatgaggaaggtattggcggttcgggagatttattctgtaccaatgatgcgtgcggtgagcgcatcacgccggaaaaccgacgtcaggttttacagcctgcgggttttgtaacggatgcgcacgatccggtgaccaataacattgagaccatgaaattcattccggttgtaccggcctgggtatttgttaaggccgagcgtgtaccgctgccgaacccgctgatgggctttatggcttccggggcggacggtaatgtgttccagcaaagtatgggggaaggcggccacggctatgcgctgtgcctgagctgcggccgtgcggagtcgatgctcaacctcacggatgcaccgaaatccatggaagcacactatccgcctcgtcctggaaaggccgaccgggatagtcagaatcagcggattatctgcccgggttcaacggcgcttaataaaaatgtcactctgggagcgctggccagaacggatgtcttcgagctgattgtccgtcgcccgcaggacggagagtatattgctgataatacggaggaaggtcgcattgttgcaatgacgctggccgtggcgctgcggcgttcgctggcgagcgtgctgggcgtttccgccgcggagctgggctacgcggtgcgtccggtccggctggagaacgagcaatccgttctggcagtacagctgtacgatattatcagcggcggtgcgggctttgcttccagcgcgccattgcatattgaggccgtgctgaagggaatggtgaagcagctgggctgccaccactgcgataccgcctgtagcgagtgcctgctcgactcacagacccgccacgatcacgatctgctggatcgtaaagcggcgctggcctggctgggggcggatttcagccactatattggtttgccggatgaggagaaattctctctggctgatgcgcaatattgcccagggagcattgaagatactctgcgacgggccatcaacgatggtggtcgaaagctcacgctgtggatgagtgggccgttgaatgagtgggatctgtatgcccgtcagttccgcaccgcgatccagaactaccggctaaaagatgatgttgaggtggtgctggttatcccgcgaaacattgacgatccggagatccttctggaactcgcgcagttcacggcgataggcgtgcagctgtgccagtctgagctggatacggatacgccgctcgttgcgcaggtgacgtttgacgatcgcctgatgacgttaatttctcgcagccatgacgctaccatccccgggccgaactggcatctgaatagccagatggttattcgcagccatttgcaggggccgatagcgctttataaagccgagttgccatccgaggatgcgggcagcaaaggcctggttaatgatattgaaatccataagcagcttaacggcccggtttctcagtttggccagcgcttctggaacctgctgaccgaatctcaggatgatattcaacgcctgctgaagaaatgccgggtgacgcgtatccactatagcgatcgctatctgcaaaaccccgtagcgctggcgttgttaggcgggttgttgaagacgttgaaaccgatgctgacacaagaggcggaagtgacgattgatacgctgttcaggagtaaagagcgaccggggaacaaaccgttccatgactggatgagtgaagcagacttccaggatttcgccgaccagtggtttgcggcatccatgggacgagccgtggagattcaggcgttcaactctggccgtgacattccgcaccaccgtaagctgatggtgagttttgataatggccagtcgctgaaaatccgctttgatcaggggatgggatactggcgtattaactttgcgcgagcctggcgtgattttaactttaatgacgacgtctctttccagctggggaatatggcgcaagcctgcgcagaaggcctggtagtgaacagcgaggagagctgggcaactgatgtgctggtgcaggttatcgcaccttaa

SEQ ID NO: 28411 - DNA, 3300 bp, Enterobacter aerogenes
ttgagtcaccatgaacatatatcaatacttaagtgtactccttggttagtcaagtttctaactcgtagaggtttaagaaaacctgacaaacgtcctctttatgaataccacgcaacgagtgatgaatatgatgagttaaaatggctattgcgagctatagggttacccgatggttacaaaagtgataaagggtacgcagcctgtttcacgttgttctgctcagagtggtatcgaagagattatgaaagggagtgtggatgggcatgggagccaatttataaggcgataggcatatcagcatcttcttcggaaatggggaaaataatccctaaaggcctggatgggtactgggggcgcccggtgcggttctatgatacagaaagacgaaattttttagggtctttatttagtgaaggcggtctacctttcaggttactaaaggaatctaatagccgttttcagtcgatgttctctctcattcttaatcagtacgaacaggcccaatcatctaacatttctacgttcatgctagttcatgcagcggtagaaaaatcatccctgcctgtcgttttcaaagaggatacttccgttgagcttattagtcggatggctgaacaattagtatctcttgttcaaatttatgatctgagtaaccataccgagcctgtaaaagaacttgaacgtgttcatccgaagtggcgggacagttttcctgttcctctcgatgatgatacgggtaccagtttccttaatggacttttacaaacagcttctattgaatccaaaccccgcctccaaaagaataaagcgactctctgtcagtttttatggtcagaaaatcatcctgaagccgtccagaccgtcatttcgttgcctgaagaactgaacttttcacttgaaagcgagccttcaacaactcgcttcgagcttgctatctacgaagatggtaacgagattgctagcttgggtcccgcctatgcaacgctaagtaactcgcaagcaaaaataagggttcgtaagcgcgaaattaaattttatcgaaaaactcccgatgtaagcttgttcattgtcgcgagagctggcgggatgcttgtcggctctaagctgttggagggaagtgaaattgcagtgggagatgtgcctttagtttttgtttctgatcatgatgaatggttgctacagggacaagcctcttgcagcgtacgtggtagtcatgtgcttattgtgctgccaaaggatggttgtctggcttcagagcatgaggattgtgaccctgacctttcagctttgggatgccgagctctaattatcaacggtcgacaggatatcaccattaaaggtgacgaaacgtaccggataaagacaggaagagatcagattattcaggctgggttctctttccagggaaaacggttgaattggacaagctgcccggatgaagtcttccttggtattcccggaattaccaaaaatcctgaggatcactcagagcatcattataaacgctttttcaacggtacgttcatagatgattgcaacgcgccagagaagatgggaactcagtttctttcagtgcgtaacgataataatgaaacgttactgcgtaaaaaaataggcattcttcccaatgattttaacctggaaataaaaaacggagaacaagcaaacgaaggctctatcattattacaaccaagcattcttgctggtatggtttgaaagaaaaaacattggaggttgataggaagcgattccccggtggcacagaaataataatgaaaactgagggaattcccccagcatcgattttattacaaataacgccaaaccttgctgcaaaccccattattgtttctctccctttccctgcccgaggttgtcttgccttcgataaagatgaaaagcctctccaaaaaaatataacgattaacgaccttctgggagccagagcataccttttcggtaaaaatggcgaacctacgcgataccaacttgaactacgtttacgctctcgtagcggaatgcaggcatggtatgagtggcgctatagtgcgggagaaagcccggtagagcttactttatacagcttaagggagcatattgacaatttactttccctggagaaagggatcgatcaaacggtggatatgcgtattgaaggcggaggtagctccttcacctggcaaatcaggcgctataaatatagccttgagtatgatcgggaaatgcagcttcttctcgctaattcagtgagcaatcgtacggggcagatcccttcacccgttattatgttactcagtgagcccgaaagaaaagcaatatcgctcgtatcgagaacaagcgaaggcgtaccggttggtgaattcgaattaagttcgacgatacaaaataatggcccatggctagttgttcccaaacaaggtgaagaagcttcatttcggccttgctacattgcaggcgagccggtaatccaaagcgatacttcgacaatacagtccctgcaaaaggcaacgcagctttttaatccccggtcggatgtaaatactattacgttagttctggaacaaatggcgagcgaccctgcgcactcgggatggcagttcttacgtaacttatacgatcagtttggatatttaccgctggctacctttgaggtatggcgtgccttggtccagcatccacaggcattggcaatgtcactgtttaaatttgagatgtccattgattatctcagccgtattgaaagcgagtttcctgttttctgggagtttttgcctattactgaggttaaacatgccgcgatgcgttttcgcgcgtttctgactcataaaggtgctccggaggaaatgcagataaagttactgggtcgaatgttccagcaattagggactgtatttccaacctatgccagcgaagtgcaattatggttagaccaagggaaattaccaccgacttttcctgcacaaatgataaaaggcatcattcatgagtggtatcaggagctcttacgcgaacatggtgaatctcgttggccagagtttggcgggccgagtctttttcgttggtacacatcgcaaaaggatcccattatagaggtttcgcccgataccagttatcgatattccgtcactttgctccccatatttgctgccgctgttgcatgtggtaaaacaacatttgacagcgtttttgaaaataaacctggtgccgtatttttcttaagacaagtcagagattttgactcgcgatggtttaatgccattttccagtattgcttattgcgtaatgtggctacgaaataa

SEQ ID NO: 28412 - DNA, 6321 bp, Enterobacter aerogenes
atgactacacgctatttttcgtcacttattgaacaatcgttgtctcgttcaactgaagcaacactgagtatcatgggggtcacaaacccgcagttgcgtgagcacctcgcgcaacaaatgggcgccgattgtgggaaatcaggctcattccttgcttctcccgttttccaacaaatgtttggctggaaagcgtcaaacaaaacgatgcgtagcctgacggaaggcaaggcattgctcagtaaagctgtggttgattcgctggatgatcagaacaatggacgctatcgttttggtgctgactggaaaccctttactcaccagctagccagttggaaggctctgctggaaaaaaaacattctgtggtagtgaccagcggtacgggttcaggcaaaaccgaatgttttatggtgccggtgctggaagacctctaccgggaattacatgaaaatggcaacaacccacttatcggcgtcagggcccttttcctctatccacttaacgccttaattaattcgcaacgtgagcgcctggacgcttggacacgtggttttggttccggaatccgatactgcctctacaacggaaataccgaaaatctacacgccgcagtgaaaagcgaacaggtaaaaagaccgaatgaagtactctcgcgcgaaaaaatgcgtgaagaacccgctccaattctagtgaccaacggcacaatgctggaatatatgatggtccgccagatcgacgctccaattatccagcaatctaaatcacaaaaatcattacgctggatcgtattggatgaagcgcatacctatgtcggctcgcaggccgctgaactggcgctgcagttacgccgcgtgatgacggcctttggtgtgactccagatgatgttcgctttgtagcaacctctgcaaccattgccggaagcgatgccgaaaagcaattaaaaaaattcctctctgaattatccggtataccgcaagagcgcattgacgtactggacggaagccgggttattccggaactggaaccatgcaaacacgtttttattccgttagaagaaattgagcaaatccctgataccgacatgaagggcgtaagcccagagcgctttgatgcacttacgcattcacctgaagcgtattacttgcgcgacatgctagttactcaaccgaatccaatgaagttggatgatatgacgcagcggttgaactcgctaacaaaacagcattatagccagcaggatgtgttgcgctggattgacgtctgctctggcacacaacccaatactaaggatcccgcatatcttaaggtcagggcgcacatattccaacgcaatacccagggggtgtgggcctgtgttgataaagaatgcagattaaagcacggtaccccgctggaaaagggttggccttttggctatgtgtatgtgaacaaacgccaaaattgcgattgtggaagcccggtttacgagctggcattctgtaatgaatgtaatgagccacatcttttggcgcgggacaaaaagggaaaacttgtccaatgggaaaataaaggcggtgatgagttctctttgcaagatgatgtgcatattgaaaatgatgccgcagaagaaaaagttgataaagagagtcgttttcagcccccactcattatcgccgcagagaagaccagcgaggcgggttataccctacagcgtctggaccgtcagacacgtcgtattggtgttattaacaatgacagcatcccgctggttattaacgacattgaacaagtatgtagtgccagtagctgtggctacagaggcgcgagcggaaaacaaccgttccgccgagccttattaggtgggccattttacgtcaccaatattgtgccaaccgttctggaatattgtcaggattttattagtgaagaaggaaaagagggcgtcggacctgattcgttaccaggtcgaggccgtcgacttattacctttaccgacagccggcaaggaacggcccgaatggcggtgcgcatgcagcaagaagctgagcgcagccgcttacgcggtagtgtggtcgaaatcctgagctggcatcaacgaacacagacttctgcaacaccgaatgccaatgccgatctggaaaagttagcgacgagggcaaaacaggcccgccatgaggcgaaagaatatagaagctggggaatgccggaacaagcaaaactggctgaagcgcaagccgaacagcttgaacaggctattcaggccgcgaccggtggcaaagctgcgactattctggtttcgcggacctggattgaaatggttaatgaacttaaagagaaagccgatattcgcggccctattctgcaatataaccactatctgaagcctgaaattttcaatgagaatggcgggccgctaaagctttctgagatgttgttattccgggagtttatgcgccggcccaaacgaactaacagcctggaaacgcagggattagttcaggttggttatcaggggctggagaagatccataagatgccggtgcattggcaagagaaagggctgacgctggatgactggaaggattttcttaaggttacgctggatctgtacgtacgtgaaagcaacttcacacaactggacgatgagttgaaaaactggattggtagccgtttttcatcgaaattcgtccgtaacccggacacaaaagatcccgaagataatcagaacagacgctggccacaaattcgtaatggcaatatatcccatcgtttagtgaagttattaatgcttggcgcaggattcaaaaccgtaaatacggcgacgatggatattatcaatacgtggctgaaagaagcgtggacccaacttaccggcccacttgcagtgctgaaacctgatggtaaccgtttctatctgccaaaagagcacatgactttttctttaatcacagatgcctggatttgtccggtaaccaataagattctggatacggcctttaaaggcttaaccccttatctgcccacccacatttcgtttgaacaccttaccaagacacaatatgacgcttttgtcgcgcaaaaggtcaccatgccggaaatctggaagctggatcgttcgcaagaagactacgctccgggtctggcgaaggtacgtgactgggttagtaaagagccactaatcgcacaattacgttcggaaaacgtctggacggatattaacgatcgtgtcgtggaaggcggattttactaccgcacagccgagcactctgctcagcaatcgtcagaacgtttgcaaagctacgaaaagatgttcaaaaacggacagcttaatgttctcaactgttccaccaccatggaaatgggggttgatatcggtggcattaccgccgtggtgatgaacaacgtaccgccacatccggcaaactatttacagcgtgccgggcgagccgggcgtagtcaggaatcacgtgcgatttcttatactctgtgcaaaggaaacccgcacgaccagcaggttttttccaacccactctggccgtttgagaccatgatccccgcgccgatggtggcaatgaattccgcccggttggtgcaacgccacgtcaatgcgttattactgtccgactttttatgtcacgtcattggcgaaacagataaagaaaaaaccagtcttgatagcctctggtttttcggtgaagacgacgggcaatcaaaatgtgaacactttaaagtctggctcgagcgtccggttcttgatatcgacgcggcgctggaacggctggtgaaaggtacagcattacatggcgccagacccgacctgttgcgggataaaacaatccatgcgattacgttcctgcaacagcgatggctttccgtctaccgcgatcttgtagcccaggaacgagaatcgcagccgcaaacgccttatcgcaagcgcatagaactggagaaaaaacgacactgtggcgagtatttgctgcgtgacctggcggccaggactttcctgccgggatacggcttcccgacagatgtggtgacgtttgataacttcactatggaagactatatccgtgaaaaatcacagaaaagccgggataaaaaagatcgcgaagataatgtgtcacgttataagggacttccctcgcgtaacctgggggttgccatccgtgaatatgcaccaggtgcagagatcatactggatggccgggtcttccgctctgctggcgtctcactgcactggcacaatattaatgccgataccaatgaagcccagcgtctggattgcgcctggcgctgtcacaaatgcgggaccataggctatgaagaggggttgagcagttccgggacgctattttgcaccaacagcgcctgtggtgaaaaaatcatcatggataatcgtcgccaggtgctgcagccagccgggtttgtaactgatgcacacgcgccggtgacgaacaatattgaaaccatgaaatttatcccggttgtccctgcctgggtatttgttaaagcagaacccgtatcgctacctaacccgataatggggtatatggcatctggcgctgatgggcatgttttccagcaaagccttggagaaggtgggcatggttacgcactttgtctgagctgcggtcgcgcagagtcgatgttgaacgcaaacgatgcgccgaaaagtatggaagcccactacccgccgcgtccgggaaaagcagatcgcgacagccagaatcaacgtctaatttgccccggctcgacggcgctcatgaagaacgtcacgctgggggcattggcacgaacggatgtctttgaaatggttctacgcaagccgcaaaacggtgaatatctcccggatagcacggaagaagggcggattgttgccatgactctggcggtagcactacgtcaggcgctggccggggttttgggtatctccgcggcagaactgggctacgccgtgcgtccggtcagactggaagatggacaatcagtattagccgttcaactctacgatgtgattagcggtggtgcaggttttgcatccagtgcgccaatgcacattgaggccattctgttgggaatggtgaagcagttgggttgccaccactgcgatacggcatgcagtgaatgcctcctcgactcccagactcgccacgatcacgatttgctggatcgtaaagcagcacaggcatggcttggtgatgacttctcgtactacatcggtttgccggatgatgaaacattctcgctaccggatgcccgatattgcccgggagccattggcgatacccttcgtcgggcgattaacgagggtgctgaaaaactcacactgtggatgaatgggccactcaatgagtgggatctttatgcccgtcaattccgggcggctattcagaactaccggattaaagacaatgttgcggtcgaccttgtcattcctgctggcgtcgatgatccggagctgttgcatgagctttcgcagtttactgctttgggcgtgcgtttgtgtcatagcgaacaggctctggaattgccgattgttgcgcaagtcgcctttgccgatcgcgtaatgacgctggcttcacgcagccagcaggcaactatccctgggccaggctggcacctgaatgacgaactggtcgttcgcagcctcggctataacacggtaaaactgaacgagtttgttttgccggggaaagcagcgaacgctgttgagcgtgtcaaagacatagagattcataaacagttaaatggtgcactttcgcagttcggacaacgcttctgggacacgctgtttaacagccatgaagaagcacaatcgctgatgaaaaaccagcgaatcaccagcgttcactataccgatcgctatctgcaaaacccggttgcgctggcactgctgggggcgatactgaaaccgctaaaaacaaagctgaccgatgacgcggagcttgagcttgatactctgtttaagcccaaggatcgtcccggcaaccggccgttccatgactggatgagcgatgcggattttcaggatttcgccgaccagtggtttactgcggcaatgggcagagcggtagaactgacggtgttcgattcgccacgtgatattccacatcatcgtaagctgacggtgacctttgaagatggtcagacgttgaagattcgattcgaccagggaatgggatactggcgtatcgacttcccaaatgcatggcgtaactttgactttactgacgatgtgacttatcagctagtaaaaatggcgcaagcctgccaggagggcaaagtccttaatagcgaggacagctgggcaacggatgtgctggtagaggtgatgtcgtcttaa

SEQ ID NO: 28413 - DNA, 3288 bp, Enterobacter aerogenes
ttgagtcaatcagaatgcatttcttgggtaaaatgtacttcctggctaagtaactttcttaatcgtagaggattgagacaacctgatagccgtcccctatatgaatatcatgcgaccaatgatgaatacaataatctaacacaactacttcgtgcagttggtcaagtacagagtaatatcgatgataaaggttacgctgcctgttttgtccttttttgctctgaatggtatcgcagagattatgagcgccattgtggttggatgtgggaccctatatatagagcattgggagtatcattaacgtcgactgaattaaggattattatccctaaagggatggaaggttactggaaccgcccaatccgattttacgaatcggaacgacgtaattttctcggaacattgttcagtgaggggggattaccattccgcttactgaaagaatcggatagccattttcagaatgtattctcccggattctcaatcaatatgggcaggcacaactggcaggattttccatactttctctagtaagaactgtcatagaaaaatcagccctgccaactgtttttagcgaagacacttctgtagaactcatcagccatatagcggaaaaactcagctcgctggttctaatgtacaacctgagcaatcataccgaacccgtgaagcagcttgataaagtgcatccaaaatggcgtgatgagttccctatgcctttggatgatgaaacaggtactcgctttcttaatgggttgctatgtactgcctccgtagaggctaaatcccacttacaaaaaaataagggttccggttgtcaattctattggttggaaaaccatcccaatcaaatccaggcgataatttcgctgcctgatgaactcaccttcccaatcatcagcactccctcaacgacgcgatttgaacttgccatttatgaagatggtgaagaagtcacctgtctcggccccgcctatgcatccctggagaacgcccatgccaaagttcgcctgcgtaaaagtgagtcgagatttgtcagacgccagccagctgcgagcttaacgattgttgcacgaactggaggaatgattgttggcaccataaaacttgaagatagtgaaatcgccgttggcgaggtaccacttacttttgttgatgatgaggaacgctggttattgcaagggcaagcttcttgtactgtacgtaatagcaatgttcttattgccttacctcaagaaaaaaccactatttcagggtgtgaaggctctccaggtacagcgtcgttattaggactcagaacactgtccgtaaaaggacgccaagatataaccatttccggagatgaaacatacaggatccgcaccgggagggaacaatctaatcagagcggatttgatttttatggaaaacatgttacctggaattgccatcctgatgaaacattccttggtgtacctaaagttacggcgaaaaacctgaatgctgaagatatacaattcaaacgttacctgagtggcatatcgttagatgaatgtcaggtacaagagatgatgggtacgcaatatgtttctgtcagaaatactcacaatgaaactctactgcgtcgaaaaattgggatcttgccggcagattttaacattgaaataaagggtggtgagctagccaatgaaggttccattgttatctcaacgcaacatccctgcatgtctgtcttaaaagataaaacactagaggttgctcgcaaacgctcagcaggacaaacagaaatattacttaaagcagaaggaatacctcctgcgtttgtctctttgcagatttacccaaatttgggtgcagccccagtagagatgactctacctttccctgcaaaaggttgcctggcccttgatgcaaatggatgcactctggataaaaatattactctgcatgatttgctgggttcgagagcctttttatttggtaaaaattgcgatccgacacgtttttcactggaattacatttacgttccaaaagtgggttacaggcatggcatgaatggtgttataccgcgggggaacaccccgtcgaactcaatttatacagcctgagagagcatattgaaaacttactgtctcttgagacaggaattgaccaggttgttgagatgcaaatcaaaggcgcaggtgctgtaatgagctggcagattcgccgctataaatacagtttacgctatgattatgaaagagaacttctcatcagccagtcaacccattatcgtaccgggcaaatgtcttcacctgacatcatgttattgagtgagccggagagaaaaatcaccccattatcatcaagaatgagcgaaggtgtaccgacaggtgaatatgaactgagttcggttattaacaaaaatgggccgtggttagtcgtccccaaacagggtgaggaaatggcgtttcgcccctgcttcattcgtggggaaccgtcgttacctgtggatgaaagtagtattcgttcattgcagaaagcgacccagctttttaatccccagtctgaagttaataccattacactggtacttgaacagatggctaacgatcccgctcattccggctggcaatttatgcgttgcctgtacgaccaatttggttatctgccgctggcaacctttgaagtttggcgtgcgctagtacagcatccacgagcactggcgatgtcgctatttaaatttgagatgtcagctgagtatctgagccgcattgaaaatgagttccctattttatgggagttcttccccatcttcgaaatcaaaactgcagccgatcgatttaaattgttcctgagccaaaagggtgcaccggaagaaacccagaatttactggtgaagagcttgtatcagcgattggggctcgtttttccgacatatgccgacgaaattgagaaatggttaagttatggacaattccctccgcccattccagagttcttcattcgcgagtggtatcaggagcttttacgtgagcatagtgaagctcgctggccagagtacggcagcaagcggctgcatagctggatgacatcacaaaaaaatccagtgatcagcattaatcctgacgcagaataccgctattccgttgcctggttacccgtcttcgccgcagctgtagcaagcggcaatacctcttttgaagccatatttgaccgtaaaccgggtgccgtatttttcctgagacaggtcagggacttcgattcccgctggtttaaggccatcttccagtgcagcctgttgcgttattttgctcaaaaataa

SEQ ID NO: 28414 - DNA, 6321 bp, Enterobacter aerogenes; identical to SEQ ID NO: 28410

SEQ ID NO: 28415 - DNA, 3300 bp, Enterobacter aerogenes; identical to SEQ ID NO: 28411

SEQ ID NO: 28416 - DNA, 6321 bp, Enterobacter aerogenes; identical to SEQ ID NO: 28410

SEQ ID NO: 28417 - DNA, 3300 bp, Enterobacter aerogenes; identical to SEQ ID NO: 28411

SEQ ID NO: 28418 - DNA, 6327 bp, Enterobacter asburiae
atgaacgttcagcaactgcattatgcgccacttctaaatcagcttcatcagcgtgcggtgaggtcggtggtaagtcagctggcattgcggagcaagtcgttgagtcaatatctggaatctcaatatttccagcctccaggtctggggggatcactgcttgcagatccggtatttgaaagcacgtttggctggatgcctgcggatgaaacaatggaggatttgcgtgacaaactgatatccagcccattggttgatgcattgagcaatgcgccagtgccgtttcgtcaccagctaactgcgtggcgaacgattcttcaagacaagcagtccctattagtgagcagtggtacaggatcaggaaaaacagaatgttttatggtgccggtgctggaagatcttattcgtcagcaaaatttgacccgacagtctctaacagggacgcaggctattttcttgtatccgttgaatgcgttaataaatagccagcaggagcggcttcgcgagtggactcgcgggtttaaaggcaaaatacgtttcgcgctatataatggcgaaacccggcataccaaatttgaagttcaggaagaccagcttaaagtacctgaacaggcattgagtcgggaagccatttatgaagccccaccatccatcatggtgactaataccacgatgctggaatatatgctgattcgtcgcaaagatgcccctatcattgaaaagtcccagggaatgctgaagtatatcgtccttgatgaggctcacagttatattggctctcaggcagctgagttggcactgcttttacgtcgcgtcatgcaggccttcaatgttggacctggtacagataaacctgtgcaaatcattgctacttcggccaccattggtgaagattctcctgaaggtaataaagaacttgctaaatttgttgccgatctcgcgggcgtcacaaaacgtgatgtaaaagtagttcgcggctatcgacaaataccatcgatatcggagacgcttattcgtcatgaatatcccacttctttagcatcgcttaactcactgagttctcgggaactttatcaacagctttgtcattatcgggtggcccagcaattgcgtcaggcgttaactcgccccggatgccaggcggtacgtttgagtgaactgctcagtgttgccagaagaacctggccagacattaatcatcgtgagctgttgcagcttctcgatctgatggcgaaatcgcgagagggtgaatctaaattttcactagcttttataccattacgtatgcatgggtttatccgaacactcgcgggcctatggacatgttcaaataaacaatgcgcacataaagcgagtgaattaggtgggggggactggccatttggtcaggtatggtttgaacaacgccaatattgcgactgcggtgcgccggtgtttgaagttttacgttgctcagggtgcggttcagcttatttgtctgccaaagaggaagtgcgcggtgatggaacgaactggttggtagcgcaacctgctgctgccgaagaggatgaatttgctcttgatctcgatgtttattctgaagatgaagataacaacgaattagaaaataactcccaatttgatcgtcttatagcgagcgatggtgaaaaatatatcatttcactagaggaggcgacggcgggtaaaatcgactgcgaggcgcaaaagcactacgagttaaatctgataaggcctgagtctcgaggtgagggacgcaataattcctttgcttgtgtttgttgtggtgacacccaacggaaaaataatcctttattccgtccgcttaggctcggtgcgcccttttttttaaatgaaattattcctacgctgcttgaattttcgcctttaccgcaaacaagagaagagcagttaggaccgtttaatggtcgacgcttgctcacctttacggattcacgtcagggaaccgcccgtatctctgcccgattacagcaggacgcagataaagctacgttacgaactctttgttatcaggaactggcaaatattaatgagccatcagtaaagctcagtccgtcacattgtgcattgttagagagttttattacccagttttctatccctcctttaaaaaattccatcgacgcactgagaaaaacgatggtttcgaatgagaagcttagcccagcagacgttcaggcgcttagaattatcgagccgatggttagttccttaagtcaggaacatgctgaagcgatgcaaatactcctcgtcaattcaggcaatcagcagaagaaaaccatgtcgtggctaactctgtctgaacaacttgttggcagtgtggaccttgcggacagaatgagaggcagttttacagagttgtctggacttgagcttactaaacaacagtttgctgatttttgtttatacagtgagtttggtcgtcgccctaaaaatgcctggaccctcgaaagtctggggctggtggccatttactatccatttattgataaagtcacaacctgcccgcaggactggaaaacattattacccgaccccgataagcaattaccggaatggcgtaatttattgaagattacccttgatttctttatacgtgaaaacagtgccgttttttacgaaaacgaggagtaccctcgctggatgggggcacgttttccggtaaaaatgctgcagggaccagataaaaaatataaagggcagaaacgtgatcaactttggccacaaatacgcgatcgccattataaccgggtaattaagcttttaattgccgtctttccggcaatacagcctgagcaggctcactggaaagcgttggttaatcacttaatgattgaagtctgggaagctattcgaccatgtctgcgtcagtttgaatctggttatcaactggacattaaaaaacaagctgaattttacagtcctaagcaagtctggcgttgcccctatactcgccgtgcgttagatgtcactttattgggttattctccgtatttaccaggtagcaaagagatagcacctgaaaaagctgtagtgattgaaatgcccgagcttcctgtgcgtcactggcgtttatccggtggtggagaaatggcgcgagaagagcgcctgcactggttggaaagtaatgggctaattcaacatgctcgggaggagggggtatggtcaactcgcagcgatagattggccctgaaagatagctggtatcgtctggaggaacactcagcgcagcgaacgccagagaagaaccagttcaatgaaaagcaatttaaggcagggaaagttaatgtgctgaactgttccacgaccatggaaatgggcgtggatattggtggtatgagtttggtcgcgatgaataatgttcctccggctccggcgaattatttgcagcgtgctggccgtgctggccgtcgcggtgaaagcgcatctgcggccattacgttatgtaaaaacaccgcgcatggaatggaggtattcaaagaccctctctgggcgttcaacaccgttgcgagtgccccacgggttcgttttggtagcagtagtattgttcagcggcatgttaacgcattggttttaggtgcgtttttacgagctgaagttcctgatgcgacaaaactgagttgtaaatggttctttgaaggtgatgatagccagtgtcttcgttttctccattggttaaatcatcaggccgatcaactggcggacaaacttaaacgccttacccagggaactgttctgatgtcattgacgccgacacagctcttgactcgtacgcatacgatgatgcagctggttgatactcgttggagaagccaacttgccatactgttggaaaacgtcgaagcgttgaaagcagataacagcgcgtgggaagaaacgccagcaggtaaagccatcacttatcagcttcgtgattatcgcggggcttatctgttttctaaactcatcagtgaagcgttcctgccgggtcatggtttcccggttggcgtggtcaatttcaattatctgaccgcggatgaactggaaaaacgtcgcgcaataaaagccactcaggctgaccctaatgaagggggagaaaacttttctcgccgcattgaaaaactgcccagccgtgacctacccacagcattacgtgaatatgctcctggtgctgatgtggtattgggcggaaaagtgtatcgttcctcgggtattatgcttggtaaagtacttgccagcgggcaggagctgtctggcgatcatcatattccgtggttttggcattgccgtaaatgcggcgcgggagcgaccagcgccacccgccctgtcgaatgtagccactgcaaggcagagatacagcagcttgatgtgaagcggtatttacagcctgtcggttttgcgacagacattcgttatcaggcacataatgatgtatccatgcctgcgcaacttccctggaaagatcctcgtgttcttgtaccttcttcggtgtgggtctccttacccgatgctggactcggacgttaccgttttagtcatagcggggaattgttccacttcagtgagggtgaatttggtcatggctacgcaatttgtctttcctgtggccgggcagaatctcaaacccagccccagcgtactccggagaatctaaagaacccggagaaggaaaatacgcactacctgttgagaggcggtagtaatgatcggcaggggaacaataaattgtgccacggtcatgttcataaagatctgtggttgggatatagcagccgtactgatatggttgagctgcaactcagtgatgataatggtttattgatcagggatgatgttgccgcgcgttcccttgcggttgctttgcgtgaaggattagcgcataaattgggtatcgaaaatacagagctgggcgtgacgacgcagcaagcgcgcgatatcgatggcttcactggatattctatctttatttacgataataatgctggtggtgcgggttatgcagtgcaattgatcgataattggtcggatgtctttaattacgccagaaaattgcttgattgcagctgtgataaattctgtcaccactgcttgctcagctacgacagtcagcattatgtcggtaaattagatcgtcaccaggcattaaccctgctcactaatcttcgtcttcagcggcttaatctcgcgccagaatatcagtacttcggagaaagtagtcgggttgaaaccaacccactcagtctgcgtattgcgcaatgcctgaacagcgaggtttatgattcttgctcgttggttcttgctggggcgcaggaacagtggagttttgcgcaatggccattatttaaagagttactccagtttgcttcctctgggggcaatgttgagttgctgattgccacgcagctggaaaacttagctgatagcaccagacatcagctttccgcgctagcggcgataccaggtgaacgcttgcaagtgaaatctatagccactgcgcaacttgtgcaagggaaagggcacttactggcacaggtcactcgtgaggggcaaacccaacagtgggccgctgccgacagtgccaccgtttcgcccggtgaattatggggacaaagctcggcatcgccggtagtgacgattaaaggggcgtccaggaaaacattctcgggtcaggctttgagtgcagaagacttactgccagcattgcccgccggggcggtacgcatcaatctcagccaacaacttgacggtcaggtggaaggttttggttcgcgtttctgggtactgatagctcagcagcatgctggctggaagaaggcttttactaatcgatgcgaaattactcacgtccattatagtgatcgttatctcaatagcccgtttactgtacgtttgttaggtgaaattttgacggaactggttgaacaggggctggcagaacgcgccgaactcactgtttcagttaaaaagttagagtacagttctcgccaacacgattcactctataacgcatggcttgatgagcaggatcgccagcaagttatgaccacgttgctggaagagggctaccttgggccagcctggtcagggaaaatctcatggttagcaggagataatcagaacaccgatcatggacgtgaactgaccgtgaccttcagcgatggcagtgaacattatgtgttgctcgatatgggactaagttactggcgttgtacgggtgacacattcttcgatttttcaggacgaataccgaatcaggtcgagcgcctggcaacatgccgggcattagttatagccccggataatggattgaagagttatatcatcgcaggctaa

SEQ ID NO: 28419 - DNA, 2937 bp, Enterobacter asburiae
atgattgaaaatgaaagtggctatttaataacctatttcagacgaatttatcaggcactacgcgggcaatcgtcaaggcgtcctgcggagataatcgcacaagaactgggcgacactattcctgtgacaatgcaaaatgaactcgtctacgaaatagctggtgaattttgcgagacacttcatacgttactcaatgagcataccactcatggtcaggaccccgtatcctcactacgcaaacaatatcctgactggcatcttcaacttccgttggttctcccggaagagaatgcctcagagattgtaagacgactactttctcaatcttcagagccccgtatatcaagcaatgtgctggttgaaaggatatggattgatgttgatgacagttggtattgcgatgcccggtttcgatttccggccacaatgcgtactgagcagttaatatccctgtttgaatgcaatattcagccggaacagacacgactcatcatttctgcaaaatggagaaatggtggtgcccggttagcaatgctaagccgttatgaacagcaagattggcgagtagagttattacccttcgctatgcaaaaactctctggggcagatgcgatgaccgaaatctcgttgtcgctcaatgaaggaccgattctgctaggtcacgtaattcccaaaggggggtatgagcttactgaagatttaccatgggtttttgaagcgatgaatgagagcgagtcacagttaaaacttgtcggcatgggctctgttagttccaggcaaaactctctttttatttcgctaccgacaaatagtcatttggatattagtggagaaggtgagtttgatatcccgaggttgctgaaaaatagtgaacgcagcttaactaaaataagcggagtattcagcgttgttttacatgatggcgcagtttgtacgattcgcacgcagcaactttatgattctgcgattgagtattatataaaaccgacagagatcgatctggtaaaatctgattatcctgtccatcgtgcctggccaaagttcggctggaaaaaggatatgcagcatggcattgtcccagagaacgaacttttttggcgatccattcgttcaggtaacagctcctggttttctgtcgcatcagtaatgccgaaagggcaggtagaagtcaggcgaatagtcaatggtgaagttttatttagcggtaaagttgtgattttgccagcagatttcaatattcaaattattcccgagactgctcagcaaggcgttattgtactctctggtataacggatgcaagagttgataaatattcaaacaatgaaaaggtaacacttaaatcagattatttgcaaaacgagtgtgttattgattgtaattcatcacagatgctagagagtaccatcaatttacgagtgtcctggaaagatggttctaatcttaaattattattacctaagcccgttagcggtggacggtttgtaagtaatgatggttctgttcattttggcggtgttgcatctatagcacatttgcatggcgtgaacgctgagttgttaacaatatcttgtgctgggaaaggatatcttaatatcgagttgttggatgaaaacccgatgtctgaaaaatttcattatttacatgcggatattccattgttatctggccgtaatgaaaagttgcaacaaatttcactttatgaaaattataacctactgagcgccatgcttgcatgtgcatggaaaaatgatagtacattacgtgttgatttttactcggacagatttggtaaggacaaaacgacactcaatattaaacgctacgatggctgttttattgagagtgatgaaagattgctggttgatataaaggattctattgttttcccttaccataaaatagacggcatggttattgaagccgtttctcttattaatcctgacttaagcacagtcctgctgaacaaagatgagtctggttatgatttctcgacgttgaatattcaaggtggcccatggctaattgtgggtaaaattgatgatgcaattcgtattgcaccagtgattaaatgggtgttacctacattacagacagatgatttatttctaaatgctatatgcaacgcagagcgagagcaacgtaagaaatattataatgctcttttttttgaagtgaagaataatcctttgcaaaactcttgttctttgttggttgaatacattaaaaaatacaagttgaataataacttgcctttacttgaactggatttatttagagagattccgagtaattattgcgtggctgttcagttgctaatatcgtcatgtctttctggggatagtgatactatttatgatatacaggaggaattgcccttctcatgggggtggattcctgtttcaatatggaaagacgtctttgaacagtgttggtattctctggaaaatcagattaatgataaagcgtttgcattaaatatactacaaccatttattgcatttataaatcatcgagcgcatatcgatcgccgattagttcccatcgctaatatgttgcttacacatagtgaaatattacctgtaggttgcactgcattgccatcggtaagccgtgaacagtttaatgatgccaaacagatgttattaagaaacccagatagttttggacgtgtcagtattttttctaaagagctttgggatagtgctattgctccagatcttaaatctttttttaataaattttggatcgaaaacacttatcacactcgttttgaaaaacggtttaatttgatgttagtcgcggcgctgctctcccaaagaaacaataaacttatgcatcagctaactgcgctttttgaatttcactatcagcaagccccgcagcaattgggggttatctatcagtattattttgaacaagcaggagtatgtcattga

SEQ ID NO: 28420 - DNA, 6327 bp, Enterobacter cloacae
atgaacgttcagcaactgcattatgcgccacttctaaatcagcttcatcagcgagcggtgaggtcggtggtaagtcagctggcattgcggagcaagtcgttgagtcaatatctggaatctcaatatttccagcccccaggtcaggggggatcactgcttgcagatccggtatttgaaagcacgtttggctggatgcctgcggatgaaaaaatggaggatttgcgtgacaaactgatatccagcccgctggttgatgcattgagcaatgcgccagtgccgtttcgtcatcagctaactgcgtggcgaacgattcttgaagacaagcagtccctattagtgagcagtggtacagggtcaggaaaaacagaatgttttatggtgccggtgctggaagatcttattcgtcagcaaaatttgacccgacagtcactaacagggacgcaggctattttcttgtatccgttgaatgcgttaataaatagccagcaggagcggcttcgcgagtggactcgtgggtttaaaggaaaaatacgtttcgcactatataatggcgaaacacggcataccaaatttgaagttcaggaagaccagcttaaagcacctgaacaggcattgagtcgggaagccatttatgaagccccaccatccatcatggtgacgaataccacgatgctggaatatatgctgattcgtcgcaaagatgcccctatcattgaaaagtcccagggaatgctgaagtatatcgtccttgatgaggctcacagttatattggctctcaggcagctgagttggcgctgcttttacgtcgcgtcatgcaggccttcaatgttggacctggtacagataaacctgtgcaaatcattgcaacttcggccaccattggtgaagattctcctgaaggtaataaagaactagctaaatttgtcgccgatctcgcgggcgtcacagaacgtgatgtaaaagtagttcgcggctatcgacaaataccgtcgatatcggagtcgcttattcgtcatgaatatcccacttctttagcatcgcttaactcactgagttctcaggaactttaccaacagctttgtcattatcgggtggcccagcaattgcgtcaggcgttaactcgccccggatgccaggcggtacgtttgagtgaactgctcaatgttgccagaagaacctggccagacattaatcatcgtgagctgttgcagcttctcgatctgatggcgaaatcgcgagagggtgaatctaaattttcactagcttttataccattacgtatgcatgggtttatccgaacactcgcgggcctatgggcatgttcaaataaacaatgcgcacataaagcgagtgaattaggtgggggtgactggccatttggtcaggtatggtttgaacaacgccaatattgcgactgcggtgcgccggtgtttgaagttttacgttgctccgggtgcggttcagcttatttgtctgccaaagaggaagtgcgcggtgatggaacgaactggttggtagcgcaacctgctgctgccgaagaggatgaatttgctcttgatctcgatgtttattctgaagatgaagataacaacgaattagaaaataactcccaatttgatcgtcttatagcgagcgatggtgaaaaatatctcatttcactagaggaagcgacggcgggtaaaatcgaccgcgaggcgcaaaagcactatgagttaaatctgataagacctgaatctcgaggtgagggacgcaataattcctttgcttgtgtttgttgtggtgacacccaacggaaaaataatcctttgttccgtccgcttagactcggtgcgcccttttttttaaatgaaattattcctactctgcttgaattttcgcctttaccgcaaacaagagaagagcagttaggtccgtttaatggtcgacgcttgctcacctttacggattcacgtcagggaaccgcccgtatctctgcccgattacagcaggacgcagataaagctacgttacgaaccctttgttatcaggaactggcaaatattaatgagccatcagtaaagctcagtccgtcacattgtgcattgttagagagttttattacccagttttctatccctcctttaaaaaattccatcgacgcactgagaaaagcgatggtttcgaatgagaagcttagcccagcagacgttcaggcgcttagaattatcgagccgatggttagttccttaagtcaggaacatgctaaagcgatgcaaatactcctcgtcaattcaggcaatcagcagaagaaaaccatgtcgtggctaactctgtctgaacaacttgttggcagtgtggaccttgcggacagaatgagaggcagttttaaagacttgtctggacttgagcttactaaacaacagtttgctgatttttgtttatacagtgagtttggtcgccgccctaaaaatgcctggaccctcgaaagtctggggctggtggccatttactatccatttattgataaagtcacaacctgcccgcaggactggaaaacattattacccgaccccgataagcaattaccggaatggcgtaatttattgaagattacccttgatttctttatacgtgaaaacagtgccgttttttacgaaaacgaggagtaccctcgctggatgggggcacgttttccggtaaaaatgctgcagggaccagataaaaaatataaagggcagaaacgtgatcaactttggccacaaatacgcgatcgccattataaccgggtaattaagcttttaattgccgtctttccggcaatacagcctgagcaggctcactggaaagcgttggttaatcacttaatgattgaagtctgggaagctattcgaccatgtctgcgtcagtttgaatctggttatcaactggacattaaacaacaagctgaattttacagtccaaagcaagtctggcgttgcccctatactcgccgtgcgttagatgtcactttattgagttattctccgtatttaccaggtagcaaagagatagcacctgaaaaagctgtattgattgaaatgcccgagcttcctgtgcgtcactggcgtttatccggtggtggagaaatggcgcgagaagagcgcctgcactggttggaaagtaatgagctaattcaacatgctcgggaggagggggtatggtcaactcgcagcgatagattggccctgaaagatagctggtatcgtctggaggaacactcagcgcagcgaacgccagagaagaaccagttcaatgaaaagcaatttaaggcagggaaagttaatgtgctgaactgttccacgaccatggaaatgggcgtggatattggtggtatgagtttggtcgcgatgaataatgttcctccggctccggcgaattatttgcagcgtgctggccgtgctggccgtcgcggtgaaagcgcatctgcggccattacgttatgtaaaaacaccgcgcatggaatggaggtattcaaagaccctctctgggcgttcaacaccgttgcgagtgccccacgggttcgttttggtagcagtagtattgttcagcggcatgttaacgcattggttttaggtgcgtttttacgagctgaagttcctgatgcgacaaaactgagttgtaaatggttctttgaaggtgatgatagccagtgtcttcgttttctccattggttaaatcatcaggccgatcaactggcggacaaacttaaacgccttacccagggaactgttctgatgtcattgacgccgacacagctcttgactcgtacgcatacgatgatgcagctggttgatactcgttggagaagccaacttgccatactgttggaaaacgtcgaagcgttgaaagcagataacagcgcgtgggaagaaacgccagcaggtaaagctatcacttatcagcttcgtgattatcgcggggcttatctgttttctaaactcatcagtgaagcgttcctgccgggtcatggtttcccggttggcgtggtcaatttcaattatctgaccgcggatgaactggaaaaacgtcgcgcaataaaaaccactcaggctgaccctaatgaagggggagaaaacttttctcgccgcattgaaaaactgcccagccgtgacctacccacagcattacgtgaatatgctcctggtgctgatgtggtattgggcggaaaagtgtatcgttcctcgggtattatgcttggtaaagtacttgccagcgggcaggagctgtctggcgatcatcatattccgtggttttggcattgccgtaaatgcggcgcgggagcgaccagcgccacccgccctgtcgaatgtagccactgcaaggcagagttacagcggcttgatgtgaaacggtatttacagcctgtcggttttgcgacagacattcgttatcaggcacataatgatgtatccatgcctgcgcaacttccctggaaagatcctcgtgttcttgtaccttcttcggtgtgggtctccttacccgatgctggactcggacgttaccgttttagtcatagcggggaattgttccacttcagtgagggtgaatttggtcatggctacgcaatttgtctttcctgtggccgggcagaatctcaaacccagccccagcgtactccggagaatctaaagaacccggagaaggaaaatacgcactacctgttgagaggcggtagtaatgatcggcaggggaacaataaattgtgccacggtcatgttcataaagatctgtggttgggatatagcagccgtacagatatggttgagctgcaactcagtgatgataatggcttattgatcagggatgatgttgccgcgcgttcccttgcggttgctttgcgtgaaggattagcgcataaattgggtatcgaaaatactgagctgggcgtgacgacgcagcaagcgcgcgatatcgatggcttcactggatattctatctttatttacgataataatgctggtggtgcgggttatgcagtgcaattgatcgataattggtcggatgtctttaattacgccagaaaattgctcgattgcagctgtgataaattctgtcaccactgcttgctcagctacgacagtcagcattatgtcggtaaattagatcgtcaccaggcattaaccctgctcactaatcttcgtctacagcggcttaatctcgcgccagaatatcagtacttcggagaaagtagccgggttgaaaccaacccactcagtttgcgtattgcgcaatgcctgaacagcgagatttatgattcctgctcgttggttcttgctgggtcgcaggaacagtggagttttgcgcaatggccattatttaaagagttactccagtttgcttcctctgggggcaatgttgagttgctgattgccacgcagctggaaaacatggctgatagcaccagacatcagctttccgcgctagcggcgataccgggtgaacgcttgcaagtgaaatctatagccactgcgcaacttgtgcaaggggaagggatcttgttggcacaggtcactcgtgaggggcaaacccaacagtgggccgctgccgacaatgccaccgtttcgcccggtgaattatggggacaaagttcggcatcgccggtagtgacgattaaaggagcgtccagaaaaacattctcgggtcagaccttgagtgcagaagacttactgccagcattgcccgcaggggcggtacgcatcaatctcagccaacaacttgacggtctggtgggaggttttggttcgcgtttctgggcactgatagctcagcagcatgctggctggaagaaggcttttactaatcgatgcgaaattagtcacgtccattatagtgatcgttatctcaatagcccgttcactgtacgtttgttaggtgaaattttgacggaactggttgaacaggggctggcagaacgcgccgaactcactgtttcagttaaaaagttagagttcagttctcgccaacacgattcactctataacgcatggcttgaagagcaggatcgccagcaagttctgaccacgttgctggaagaggggtaccttgggcctgcctggtcagggaaaatctcatggttagcaggagataatcaggacaccgatcatggacgtgaactgaccgtgaccttcagcgatggcagtgaacattatgtgttgctcgatatgggactgagttactggcgttgtacgggtgacacattcttcgatttttcaggacgaataccgaatcaggtcgagcgcctggcaacatgtcgggcattgcttatagccccggataatggattgaagagttatatcatcgcaggctaa

SEQ ID NO: 28421 - DNA, 2937 bp, Enterobacter cloacae
atgattgaaaatgaaagtggctatttaataacctatttcagacgaatttatcaggcactacgcgggcaatcgtcaaggcgtcctgcggagataatcgcacaagaactgggcgacactattcctgtgacaatgcaaaatgaactcgtctacgaaatagctggtgaattttgcgagacacttcatacgttactcaatgagcataacactcatggtcaggaccccgtatcctcactacgcaaacaatatcctgactggcatcttcaacttccgttggttctcccggaagagaatgcctcagagattgtaagacgactactttctcaatcttcagagccccgtatatcaagcaatgtgctggttgaaaggatatggattgatgttgatgacagttggtattgcgatgcccggtttcgatttccggccacaatgcgtactgaacagttaatatccctgtttgaatgcaatattcagccggaacagacacgactcatcatttctgcaaaatggagaaatggtggtgcccggttagcaatgctaagccgttatgaacagcaagattggcgagtagagttattacccttcgctatgcaaaaactctctggggcagatgcgatgaccgaaatctcgttgtcgctccatgaaggaccgattctgctaggtcacgtaattcccaaaggggggtatgagcttactgaagatttaccatgggtttttgaagcgatgaatgagagcgagtcacagttaaaacttgtcggcatgggctctgttagttccaggcaaaactctctttttatttcgctaccgacaaatagtcatttggatattagtggagaaggtgagtttgatatcccgaggttgctgaaaaatagtgagcgcagcttaactaaaataagcggagtattcagcgttgttttacatgatggcgcagtttgtacgattcgcacgcagcaactttatgattctgcgattgagtattatataaaaccgacagagttcgatctggtaaaatctgattatcctatccatcgtgcctggccaaagttcggctggaaaaaggatatgcagcatggcattgtcccagagaacgaacttttttggcgatccattcgttcaggtaacaactcctggttttctgtcgcatcagtaatgccgaaagggcagatagaagtcaggcgaatagtcaatggtgaagttttatttagcggtaaagttgtgattttgccagcagatttcgatattcaaattattcccgagactgctcagcaaggcgttattgtactctctggtataacggatgcaagagttgataaatattcaaacaatgaaaaggtaacacttaaatcagattgtttgcaaaacgagtgtgttattgattgtaattcaacacagatgctagagagcaccatcaatttacgagtatcctggaaagatggttctaatcttaaattattattacctaagcccgttagcggtggacggtttgtaagtaatgatggttctgttcattttggcggtgttgcatctatagcacatttgcatggcgtggacgctgagttgttaacaatatctagtgccgggaaaggatatcttaatatcgagttgttggatgaaaacccgatgtctgaaaaatttcattatttacatgcggatattccattgttatctggccgtaatgaaaagttgcaacaaatttcactttatgagaattataatctgctgagcgccatgcttgcatgtgcatggaaaaatgatagtacattacgtattgatttttactctgacagatttggtaaggacaaaacaacactcaatattaaacgctacgatggccgttttattgagagtgatgaaagattactggttgatataaaagattctattgtttttccttaccataaaatagacgacatggttgttgaagccatttctcttaatgctcctgacttatgcacagtcctgctgaacaaagatgagtctggttatgacttctcgacgttgaatattcaaggtggcccatggctaatcgtgggtaaaattgatgatgcaattcgtattgcaccagtgattaaatggatgttacctacattacagacagatgatttatttctaaatgctatatgcaacgcagagccagaacaacgtaaggaatattataatgctctgtttttggaagtgaagaataatcctttgcaaaactcttgttctttgttggttgattacattaaaaaatacaagctgaataataacttgcctttacttgaactggatttatttagagagatttcgagtaattattgcgtggttgttcagttgctaatatcgtcatgtctttctggggatagtgatactatttatgatatacaggaggaattgcccttctcatgggggtggattcctgtttcaatatggaaagacgtctttgaacagtgttggtattctctggaaaatcagattaatgataaagcgtttgcattaaatatactacaaccatttattgcatttataaatcatcgagcgcatatcgatcgccgattagttcccatcgctaatatgttgcttacacatagtgaaatattacctgcaggttgcactgtattgccatcggtaagccgtgagcagtttaatgatgccaaacagatgctattaagaaacccagatagttttggtcgtgtcagtatctttactaaagagctttgggatagtgctattgctccagatcttaaatctttttttaataaattttggatcgaaaacacttatcacactcgttttgaaaaacggtttaatttgatgttagtcgcggcgctgctctcccaaagaaacaataaacttatgcatcagctaactgcgctttttgaatttcactatcagcaagccccgcagcaattgggggttatctatcagtattattttgagcaagcaggagtatgtcattga

SEQ ID NO: 28422 - DNA, 6321 bp, Enterobacter cloacae
atgactacacgctttttttcgtcgcttattgaacaatcgttgtctcgctcaaccgaagcaacgctcagtattatggggatcacaaacccgaacttacgcaagcatctcgcagagcaaatgggtgccgattgtgggaaatcaggctcatttcttgcctcaccagtattccagcaaatgtttggctggaaagagtcaaattatacaatgcgcaacctgaccgaaggtaaggcattactgagtaaagctgttgttgattcactagatgatcataacaacggtcgttaccgttttggtgcagactggaaacccttcactcaccagctagccagttggaaggctttactggaagataaacattcggtagtggtgacaagtggtacggggtcaggcaaaacggaatgttttatggttcctgtgctggaagacctctacagagaattacatgaaaatagcaacaacccacttgtcggcgtcagggcccttttcctctaccccctcaatgccctaattaattcacagcgggagcgcctggatgcgtggacacgtggatttggtactgggatccgttactgtctttataatggcaatacagaaaatcttcacgcttcggtaaaaagcgagcaggcaaaaaggccaaatgaagtgatttcacgcgaaaagatgcgtgaagaacccgcaccaattctggtaacaaacggcacgatgctggaatatatgatggtccgccagattgatgctccaattattcaacagtctaaagcacaaaaatcattacgctggatagtactggatgaagcgcatacctatgtcggatcgcaggccgctgaattagctctgcagttacgccgcgtaatgacggcctttggcgtgacgccagacgatgtgcgtttcgtggcaacctctgcaactattgccggaagcgatgccgaaaaacaactgaaaaaattcctctctgaattatccggtataccgcaggagcgcatcgacgtactggacggaagccgggtgattccgaaactggcatcatgcaaacacgtttatattcctttagaagaaattgaacaaatccctgatacagacatgaagggcgtaagccctgagcgctttgaagctcttacgcattcacctgaagcacattacttgcgtgagatgttagttactcagccggatccaatgaagctggatacgatgacgaagcggttgaatacgctgaccaagcagaattatagccagcaggaagtacttcgctggatcgacgtctgctctggtacacaacctaatcctaaagatccggcattcctgaagataagagcgcatattttccagcgcaatacccagggagtatgggcttgtgttgataaagagtgcagacaaaagcatggcactccgctggaaaagggctggccctttggttatgtgtatgtgaatcaacggcaaaattgcgaatgcgggagcccggtctacgaactggcattctgcaatgaatgtaacgaaccgcatcttctggcccgggataaaaatggcaaacttgtccaatgggaaaataaaggtggcgatgaattctctttgcaggatgaggtgaatgttgaaaacgtcgctactgaagaaaaagttgagaaagaaagtagttaccgccctccacttattattgcggcagaaaaggccagtgaaactggttatatcctacagcgactcgatcgcaagactcgtcgtattggtgtagttaataatgaaagtattgaactgattattaacgatattgaacaggtatgtagtgccagtggctgcggctacagaggcacgagtggaaaacaacctttccgccgcgcattgttgggtggaccgttttatgtcaccaatattgtgccaaccgttctggagtattgtcaggactttgtcagcgaagatggaaaggagggagtggggcctgattcactgccaggtagaggccgccgtctcattaccttcaccgacagccgccagggaacagcgcgcatggcggtacgcatgcagcaagaagctgaacgcagtcgcttacgtggcagcgtagtagaaatattgggctggcatcaacgaaaacagacttccaccacaccaaatgccaatacagatcttgaaaagttagcagcgttggcaaaacaggcacgcgaacaggccgatgaatttagaagctggggattacctgaacaagcgaagctggcagaagtacaggccgagcagcttgaacaagcttttcaggctgcgaccggaggtaacgtagcgaccattctcatttcccgaacctggacagaaatagttaatgagcttagagagaaagccgatattagcggccctattctgcaatataatcactatctgaagcctgaaattttcaacgaaaacggcgggccgctgaagctatcggaaatgttgcttttccgggagtttatgcgtcgtcctaaacgaactaacagcctggaaacgcaagggctggtgcgggttggttatcaggggctagagaagattcataagatgccgatgcattggcatgagcaagggctgacgctggatgactggaaagattttcttaaggttactctggatctgtacgtacgtgaaagcaacttcacacaactggacgatgagttaaaaaactggattggtagtcgtttttcgtcaaaattcgtccgtaacccggaaacaaaagatcctgaagataatcagaacagacgctggccacaaattcgtaatggcaatttgtcccatcgtttggtgaagttattaatgcttggtgcgggattgaaaaaagtaaatacggcgacgattgatattatcaatacatggttaaaagaagcatggaaccagcttaccgggtcacttgccgtactgaagcctgatggtaaccgtttctatttgccgaaagagcatttgaccttctctttaataacggatgcctggatttgtccggtcaccaataaaattctggacactgcttttaaagggttaaccccatatctacccactcacatttcctttgaacaactcacccagacgcaatatgacgcatttgtcgcgcaaaaggtcaccatgccagagatctggaaggtggatcgctcacaagaagactacgctccgggtttggctaaagtacgtgactgggtcagcaacgagccgctgatcgcacaattgcgttcggaaaatgtctggacggatatcaacgatcgtgtcgtagaaggtggcttctactaccgcactgccgagcactctgcccagcagtcttcagaacgcctgcaaagctacgaaaagatgtttaagaacgggcagcttaatgttctcaactgttccaccaccatggaaatgggggttgatatcggtggcattaccgccgtggtgatgaacaacgtaccgccgcatccggcaaattatttacagcgagccgggcgagccggacgtagcaaggaatcgcgcgcgatatcttacacattgtgtaaaggtaacccgcacgatcaacaggtatttgccaacccgctctggccgtttgaaacgatgatccctgcaccgatggtggcgatgaactcagcccggctggtgcaacgccacgtcaatgcgttattgctctctgactttttatgtcacgttattggcgaaacggacaaagaaaaaaccagcctcgacagcctctggtttttcggtgatgacgaagatcaatcaaaatgtgaacgctttaaagtctggcttgaacgccccgagcttgatattgacgcggcgctggaaaggctggtaaaaggcacggcgctgcatggcgccagctcccacaaattgcgagagaaaacagttgatgcgattactcttctgcaacagagatggctttccgtctatcgcgatcttgttgcacaggaacgcgaatcgctgccgcaaacgccttatcgcaagcgcatagaactggaaaaaaaacgacattgcggcgaatatctactgcgcgatctggcggccagaaccttccttcccggatacggcttcccaacggatgtggtgacgtttgataacttcacaatggaagactatattcgcgaaaaatcgcagaaaagccgggataaaaaagatcgcgaagataacgtgtcgcgttataaagggctcccctcccgcaaccttggggttgctatccgtgaatatgcaccaggtgcagaaattattcttgatggtagggtcttccgttctgccggtgtctccctgcactggcacaatattaatgccgatacgaatgaagcgcagcgtctggattgcgcctggcgctgccacaaatgcgggaccatcggctatgaagagggaatgagcagttccggggtattatgctgtaccaacagcacctgtggtgaaaaaatcatcatggataatcgccgtcaggtgctgcagcctgccgggtttgtaaccgatgcgcatgcgccggtgacaaacaacattgaaaccatgaaatttatcccggttgtccctgcctgggtgtttgttaaagcggaacccgtaccactgcctaacccgacaatggggtatatgacgtctggtgctgatggtcatgttttccagcaaagtctcggagaaggtggtcatggttacgcattatgcctgagctgtgggcgtgcggagtcgatgctgaatgaaaatgatgcaccgagaagtatggaagctcactacccacctcgtccaggaaaagcggaccgcgatagccaaaatcagcggctgatttgccccggttcgacggcactgatgaaaaacgtcacgctgggggcattagcacgaacagatgtatttgaaatggttctgcggaagccacaaaacggtgaatacctcccggataatacagaagaaggtcggcttgtcgccatgactctggcggttgccctgcgtcaggcgctggcgggtgtattgggtatttctgctgcagaactgggctacgctgtgcgtccggtcaggctggaagatggacaatcggtattagccgttcaactttacgatgtgattagcggtggcgcaggttttgcgtccagtgctccattacacattgagaccattctgctggggatggtgaaacagctgggctgcaaccattgtgataccgcatgcagtgaatgtttgctcgattcccaaacccgccacgatcatgacctgctggatcgtaaagcggcgctgacctggcttggggatgacttcagtttctacattggtttaccagatgaagagacattctcgctaccagatgcccgatattgcccgggaccgattagcgatacccttcgtcgggcgattaacgagggagctgaaaaactcacactgtggatgaatgggccactcaatgaatgggatctttatgcccgtcaattccgggcggcgattcagaactaccggattaaagacaatgttgcggtcgaccttgtcattcctgctggcgtcgatgatccggagttgttgcacgaactttcgcagtttactgctttgggcgtgcgtttgtgtcatagcgaacagattctggaattgccgattgttgcgcaaatcgcctttgccgatcgcataatgacgctggcttcacgcagccagcaggcaactatcccgggtccaggctggcaccttaatgacgaactggtcgttcgcagcctcggctataaaacggtaaaactgaacgagtttgttttgccggggaaagcagcgaacgctgttgagcgtgtcaaagacatagagattcataaacagttaaatggtgcactttcgcagttcggacaacgcttctgggacacgctgtttaacagccatgaagaagcacaatcgctgatgaaaaaccagcgaatcaccagcgttcactataccgatcgctatctgcaaaacccggttgcgctggcactgctgggggcgatactgaaaccgctaaaaacaaagctgaccgatgacgcggagcttgagcttgatactctgtttaagcccaaggatcgtcccggcaaccggccgttccatgactggatgagcgatgcggattttcaggatttcgccgaccagtggtttactgcggcaatgggcagagcggtagaactgacggtgttcgattcgccacgtgatattccacatcatcgtaagctgacggtgacctttgaagatggtcagacgttgaagattcgattcgaccagggaatgggatactggcgtatcgacttcccgtatgtatggcgtaattttgactttgccgaagatgtgacttatcagctagtaaaactggcgcaagcctgccaggagggcaaagtccttaatagcgaggaaagctgggcaacggatgtgctgatagaggtgatgccgtcttaa

SEQ ID NO: 28423 - DNA, 2211 bp, Enterobacter cloacae
atgaatgttggcgcaataaaactggatgatagcgaaatcgccattggtgaggttccacttacttttgttgctgaaggagaacgatggctattacaagggcaagcttcgtgcaatgttcgtaacagcgatgttcttattgttctacctcgagataagacaactgtttcaggatatgaaacgactttgaatacaatttcagtcttaggcttcgaaacactctccgtaaaaggttgccatgaattaattatttccggagatgaaatatatcgtatacgcactgggaaagaacagactaaccctggtggggttgagttttatggtaaaagagtaaattgggtatgcaaccctactgaaacattccttggggtccctaaagtcacctcgaaaaatcctgatgtaaaacatatccaatttaaaccttattttaatagtaaatcaatcgaagaatgccagttacaagagatgatgggatctcaatttgtttccgtcaggaatagtgataatgagacgatactccgtcgaaaaattggaatattaccggcagactttaatgttgagattcacggtggcgatcaggctaatgaaggtaccattgtcatctcaacgcaacatccctgcatgtctgtcttaaaaaataaaacattcgagattgcgcgaaagcgcgcagcaggacgcaccgagttattactcaaagccgaaggcatccctcccgcctttatctctctggaaatttatcctaatttgggggctgactcaattgaattgactttaccttatcctgctaaaggttgtttggtttttgatgcaaatggagaccttcttgataaaaatatcactttgcatgatttacttggttcaagagcctacttgtttggtaaaaatggtgaaccgactcgattttcactggaattacatctacgcactataaatggtcaacaggcatggcatgaatggttttatacggcagtagaacgccctattgaactcaatttatacagtctaagagaacatattgaaaatttgctatctcttgaatcaggaattgaccaggttgtggatatgcgaatcagaggtgctggcgtagcgatgagctggcagattcggcgctacaaatacagtttgcgttatgattatgaaaaagaagttctcaccagccagtcgacaagctatcgtgccgggcaactcccttctcccgtcatcatgttattgagcgagccagagcgaaaagcagtctcgttgtcatcgaggctaagtgagggtgtacctgttggtgaatatgaactgagttcaatcgttagcaaaaacgggccttggctagtagtcccaaaggaaggtgatgaaatggcgtttcgtccatgcttcattcgtggcgaatcttccttacatggcgatgaaagtagcgttcgttcacttcagaaagccacccaactttttaatccccaggcaaaagtgaataccataacgctggtgcttgatcagatggctaccgatcctgcgcactccggttggcagtttatgcacagtctttatgaacattttggctatcttccgctggctacatttgaagtatggcgagcactcgtacaacatccaagagcgctggcgatgtctctcttcaaatttgaaatgtccgccgagtatttaaaccgcattgagaatgaattccctgttttttgggagtttttccctatattagaaatcaaatccgcagcagaaaccttcaaacgattcctgacccaaaaaggggcacaagatgaagttttggtaacactgctgagtaagatgtatcgacaattagggatcgtatttccaacttatgccgatgaaattgaaaaatggttaagttatgggaaatttcctcctcccattccaacatcctttgtccgtgagtggtatcaggagcttttacgcgaacacagtgaagctcggtggccagaatatggctgtaagcgactgcataactggatgtcatcacaaacagatgtagtgatagatatttatcccgaggctgattatcgctattcagttgcctggttacctgttttcgcggctgcagtggcaagcggtaaaacttcctttgaaactgtgtttgaacacaaacctggcgccgtatttttcctgagacaagtccgggacttcgattctcgctggttcaaggccatattccagtgcagccttctgcgttatatttcaaaaaataaaaaggattaa

SEQ ID NO: 28424 - DNA, 6321 bp, Enterobacter cloacae
atgactacacgctttttttcgtcgcttatcgaacaatcattgtctcgctcaaccgaagcaacgctcagtattatggggatcacaaacccgaacttacgcaagcatctcgcagagcaaatgggggccgattgtgggaaatcaggctcatttcttgcctcaccagtattccagcaaatgtttggctggaaagagtcaaattatacaatgcgcaacctgaccgaaggtcaggcattactgagtaaagctgttgttgattcactagatgatcataacaacggtcgttaccgttttggtgcagactggaaacccttcactcaccaactagccagttggaaggctttactggaagataaacattcggtagtggtgacaagtggtacggggtcaggcaaaacggaatgttttatggttcctgtgctggaagacctctacagagaattacatgaaaatggcaacaacccacttgtcggcgtcagggcccttttcctctaccccctcaatgccctaattaattcacagcgggagcgcctggatgcgtggacacgtggatttggtactgggatccgttactgtctttataatggcaatacagaaaatcttcacgcttcggtaaaaagcgagcaggcaaaaagaccaaatgaagttctttcacgcgaaaagatgcgtgaagaacccgcaccaattctggtaacaaacggcacgatgctggaatatatgatggtccgccagattgatgctccaattattcaacagtctaaagcacaaaaatcattacgctggatagtactggatgaagcgcatacctatgtcggatcgcaggccgctgaattagcgctgcagttacgccgcgtgatgacggcctttggcgtgacgccaaacgatgtgcgtttcgtggcaacctctgcaactattgccggaagcgatgccgaaaaacaactgaagaaattcctctctgaattatccggtataccgcaggagcgcatcgacgtactggacggaagccgggtgattccgaaactggaatcgtgcaaacacgtttatattcctttagaagaaattgagcaaatccctgatacagacatgaagggcgtaagcccagagcgatttgaagctcttacgcattcaccagaagcacattacttgcgtgagatgttagttactcagccggatccaatgaagctggatgcgatgacgcagcggttgaatacgctgaccaaacagaattatagccagcaggaagtacttcgctggatcgacgtctgctctggtacacaacctaatcctaaagatccggcattcctgaagataagagcgcatatcttccagcgcaatacccagggagtgtgggcttgtgttgataaagagtgcagacaaaaacatggcactccgctggaaaaggactggccctttggttatgtgtatgtgaatcaacggcaaaattgtgaatgcgggagcccggtctacgaactggcattctgtaatgaatgtaacgaaccgcatcttctggcccgggataaaaatggcaaacttgtccaatgggaaaataaaggtggcgatgaattctctttgcaggatgaggtgaatgttgaaaacgacgctactgaagaaaaagttgagaaagagagtagttaccgtcctccacttgttattgcagcagaaaagaccagcgaaacaggttatatcctacagcgactcgatcgcaagactcgtcgtattggtgtagttaataatgaaagtattgaactgattattaatgattttgaacaggtatgtagtgccagtggctgcggctacagaggcacgagtggaaaacaacctttccgccgcgcattgttaggtggaccgttttacgtcaccaatattgtgccaaccgttctggagtattgtcaggattttgtcagcgaagatggaaaggagggagtgggccctgattcattaccaggtagaggccgccgtctcattaccttcaccgacagccgccagggaacagcgcgcatggcggtacgcatgcagcaagaagctgaacgcagtcgcttacgtggcagcgtagtagaaatattgggctggcatcaacgaacacagacttccaccacaccaaatgccaatacagatctggaaaagttagcagcattggcaaaacaggcacgccaacaggccgatgaatttagaagctggggattacctgaacaagcgaaactggcagaagtacaggcagagcagcttgaacaagcttttcaggctgcgaccggaggtaacgtagcgaccattctcatttcccgaacctggacagaaatagtcaatgagcttagagagaaagccgatattagcggccctattctgcaatataatcactatctgaagcctgaaattttcaacgaaaacggcgggccgctgaagctttcggaaatgttgcttttccgggagttcatgcgtcgtcctaaacgaactaacagcctggaaacgcaagggctggtgcgggttggttatcaggggctagagaagattcataagatgccgatgcattggcaagagcaagggctgacgctggatgactggaaagattttcttaaggttactctggatctgtacgtacgtgaaagcaacttcacacaactggacgatgagttaaaaaactggattggtagtcgtttttcgtcaaaattcgtccgtaacccggaaacaaaagatcctgaagataatcagaacagacgctggccacaaattcgtaatggcaatttgtcccatcgtttggtgaagttattaatgctgggtgcgggattaaaaaaagtaaatacggcgacgattgatattatcaatacatggttaaaagaagcatggaaccagcttaccgggtcacttgccgtactgaagcctgatggtaaccgtttctatttgccgaaagagcatttgaccttctctttaatcacggatgcctggatttgtccggtcaccaataaaattctggacactgctttcaaagggttaaccccatatctacccactcacatttcctttgaacaactcacccagacgcaatatgacgcatttgtcgcgcagaaggtcaccatgccagagatctggaaggtggatcgctcacaagaagactacgctccgggtctggctaaagtacgtgactgggtcagcaacgagccgctgatcgcacaattgcgttcggaaaatgtctggacggatatcaacgatcgtgtcgttgaaggtggcttctactaccgcactgccgagcactctgcccagcagtcttcagaacgcctgcaaagctacgaaaagatgttcaagaacgggcagcttaatgttctcaactgttccaccaccatggaaatgggggttgatatcggtggcattaccgccgtggtgatgaacaacgtaccgccgcatccggcaaattatttacagcgagccgggcgagccggacgtagcaaggaatcgcgcgcgatatcttacacattgtgtaaaggtaacccgcacgatcaacaggtatttgccaacccgctctggccgtttgaaacgatgatccctgcaccgatggtggcgatgaactcagcccggctggtgcaacgccacgtcaatgcgttattgctctctgactttttatgtcacgttattggcgaaacggacaaagaaaaaaccagcctcgacagcctctggtttttcggtgatgacgaagatcaatcaaaatgtgaacgctttaaagtctggcttgaacgccccgagcttgatattgacgcggcgctggaaaggctggtaaaaggcacggcgctgcatggcgccagctcccacaaattgcgagagaaaacagttgatgcgattactcttctgcaacagagatggctttccgtctatcgcgatcttgttgcacaggaacgcgaatcgcagccgcaaacgccttatcgcaagcgcatagaactggaaaaaaaacgacattgcggcgaatatctactgcgcgatctggcggccagaaccttccttcccggatacggcttcccaacggatgtggtgacgtttgataacttcacaatggaagactatattcgcgaaaaatcgcagaaaagccgggataaaaaagatcgcgaagataacgtgtcgcgttataaagggctcccgtcccgcaaccttggggttgctatccgtgaatatgcaccaggtgcagaaattattcttgatggcagggtcttccgttctgccggtgtctccctgcactggcacaatattaatgccgatacgaatgaagcgcagcgtctggattgcgcctggcgctgccacaaatgcgggaccatcggctatgaagagggaatgagcagttccggggtattatgctgtaccaacagcacctgtggtgaaaaaatcatcatggataatcgccgccaggtgctgcagcctgccgggtttgtgaccgatgcgcatgcacctgtgacaaacaacattgaaaccatgaaatttatcccggttgtccctgcctgggtatttgttaaagctgaacccgtaccgctgcctaacccgataatggggtatatgacgtctggtgctgatggtcatgttttccagcaaagtctcggagaaggtgggcatggttacgcgttatgcctgagctgtgggcgtgcagagtcgatgctgaatgagaatgatgcaccgagaagtatggaagctcactacccacctcgtccaggaaaagcggaccgcgatagccaaaatcagcggctgatttgccccggttcgacagcactgatgaaaaacgtcacgctgggggcattagcacgaacagatgtatttgaaatggttttgcgaaagcctcaaaacggtgaatacctgccggataatacagaagaaggtcggcttgtcgccatgactctggcggttgccctgcgtcaggcgctggcgggtgtattgggtatttctgctgcagaactgggctacgcagtacgtccagtcagactggaagatggacaatcggtgttagccgttcaactctacgatgtgattagcggtggcgcaggttttgcgtccagtgctccattacacattgagaccattctgctggggatggtgaaacagctgggctgcaaccattgtggtaccgcatgcagtgaatgtttgctcgattcccaaacccgccacgatcatgacctgctggatcgtaaagcggcgctgacttggcttggggatgacttcagtttctacattggtttaccagatgaagagacattctcgctaccggatgcccgctactgcccgggagccattggcgatacccttcgtcgggcgattaacgagggagctgaaaaactcacactgtggatgaacgggccactcaatgaatgggatctttatgcccgtcaattccgggcggctattcagaactaccggattaaagacaatgttgcggtcgaccttgtcattcctgctggcgtcgatgatccagagctgttgcacgagctttcgcagtttactgctttgggtgtgcgtttgtgtcatagcgaacaggctctggaattgccgattgtggcgcaaatcgcctttgtcgatcgcgtaatgacgctggcttcacgcagccagcaggcaactatcccagggccaggctggcaccagaatgacgaactggtcgttcgcagtctcggctataaaacggtaaaactgaacgagtttgttctgccgggtaaagcagcgaacgcggttgagcgtgtcaaagacatagagattcataaacagttaaatggtccactttcgcagttcggacaacgcttctgggacgcgctgtttaacagtcatgaagaagcacactcgctgatgaaaaaccaacggatcaccagcgttcactataccgatcgctatctgcaaaacccggttgcgctggcgctgctgggagcgatactgaaaccgctaaaaacaaagctgaccgataacgcagagttggggcttgatacgctgtttaagcccaaagatcgtcccggtaaccggccattccatgactggatgagcaacgcggattttcaggatttcgccgaccagtggtttactgcggcaatgggcagagcggtagaactgacggtgttcgattcgccacgtgatattccgcatcatcgtaagctgacggtggcctttgagaatggtcagacgttgaagattcgcttcgatcagggaatgggatactggcgtatcgacttcccgtatgcatggcgtaactttgactttactgacgatgtgacttatcagctagtaaaactggcgcaagcctgccaggagggcaaagtccttaatagcgaggaaagctgggcaacggatgtgctggtagaggtgatgacatcttaa

SEQ ID NO: 28425 - DNA, 3297 bp, Enterobacter cloacae
ttggttcaatcagaatgcatttcatggacaaaatgtacttcatggctaagaaattttcttagtcgtagaggattgagacaacccgatggccgcccgctttatgaatatcaagcgacgaatgaagaatatgtggacttaacgcagttacttcgagcggttagccaaactacaaatattgttgatgataaaggctatgcttcctgttttgtgtttttttgctctgaatggtatcgcagagactatgagcggaattgtgggtggacttgggagcccatttataaaaagataggtacatcgttaacggcgactgaactaaggcatatcgttcctaaagggatggagagttactggatgcgaccaattcgattttatgaatcggatagacgtaactttcttggaacgttgttcagtgagggtggtctaccttttcgtttactgaaggaatcagatagtagttttcaaaccgtattttctcggatccttaatcagtatgaacaagctcagatagcaggtttttccatgctttcgctggtaagaaaaattatagaaagatcttcgcttccagctgtatttattgaagatacatcagtagagctcatcagtcatatggcagaaaaactcagctcattggtactgatgtataacctaagcgatgactctgaaccagtagcgcagcttgataaaacgcatccaaaatggcgggatgaattccctatgccactggatgatgaaactggcacccgctttctaaatggattgttacgtactgcatctatagaaacaaaaccccgttcacaaaaaaataaatgtaccggttgtcagttcttttggacagaaaaatcaccggatcaaatacgtgcgatagtttcgttaccagatgaactctcttttccgattattagtgaaccttcaactacacgatttgaacttgctatttacgaaggcattaacgaagttgcaagccttggtgtagtctatgcctccctcgaaaatgctcatgccagagttcgcatccgcaaaaatgaatcacgatttgccagacatgacccttctgcgaatttattgttagttgctcgggcaggcggaatgactgttggcgcaataaaattggatgatagcgaaatcgccattggtgaggttccacttactttcgttgctgatggagaacgatggctattacaagggcaagcttcgtgcaatgttcgtaacagcgatgttcttattgttttacctcgagaaaagacaactgtttcaggatatgaaacaacgttgaatacaatttcagtcttaggactcgaaacactctccgtaaaaggttgccatgaattaattatttccggacatgaaacatatcgtatacgcactggaaaagaacagactaaccttgggggttttgagttttacggtaaaaaagtaaattgggtatgccaccctactgaaacatttcttggggtccctaaagttatctcgaaaaatccggatataaaacacatccaatttaaaccttattttaatagtaaatcaatcgaagaatgccagttgcaagagatgatgggatctcaatttgtttccgtcaggaataatgataatgagactatactccgtcgaaaaattggaatattaccggcagactttaatgttgagattcgcggtggcgatcaggtcaatgaaggtaccattgtcatctcgacgcaacatccctgcatgtctgtcttaaaaaataaaacactcgagattgcgcgaaagcgcgcagcaggacgcaccgaaatattactcaaagccgaaggcatccctccggcatttatctctctggaaatttatcctaatctaggggctgattcaattgaattgacttttccttatcctgctaaaggttgtttggttcttgatgcaaatggagaccttctggaaaaaaatatcactttgcatgatttacttggttcaagagcctacttgtttggtaaaaatggtgaaccgactcgattttcactggaattacatctacgcactataaatggtcaacaggcatggcatgaatggttttatacggcaggagaacgccctattgaactcaatttatacagtctaagagagcatattgaaaatttgctatctcttgagtcaggaattgaccaggttgtggatatgcgaatcagaggggctggcgtagcgatgagctggcagattcggcgctacaaatacagtttgcgttatgatcatgaaaaagaagttctgatcagccagtctacaaactatcgtgccgggcaactcccttctcccgtcatcatgttattgagcgagccagagcgaaaagcagtctcgttgtcatcgaggctaagtgagggtgtacctgttggtgaatatgaactgagttcaatcgttagcaaaaacgggccttggctagtagtcccaaaggaaggtgatgaaatggcgtttcgtccatgcttcattcgtggcgaatcttccttacatggcgatgaaagtagcgttcgttcacttcagaaagccacccaactttttaatccccaggcaaaagtgaataccataacgctggtgcttgatcagatggctaccgatcctgctcactccggttggcagtttatgcacagtctttatgaacattttggctatcttccgttggctacatttgaaatatggcgagcactcgtacaacatccaagagcgctggcgatgtctctcttcaagtttgaaatgtccgccgagtatttaaaccgcattgagaatgaattccctgttttttgggagttcttccctatattagaaattaaatccgcagcagaaaccttcaaacgattcctgtcccaaaaaggggcaccagatgaagttttggtaacactgctgagtaagatgtatcgacaattagggatcgtatttccgacttatgccgatgaagttgaaaaatggttaagttatgggaaattccctcctcccattccaacatcctttgtccgcgagtggtatcaggagcttttacgcgaacacagtgaagctcggtggccagaatatggctgtaagcgactgcataactggatgtcgtcacaaacagatgtagtgatagatatttatcccgaggctgattatcgctattcagttgcctggttacctgttttcgcggctgcagtggcaagcggtaaaacgtcctttgaaactgtgtttgaacacaaacctggcgccgtatttttcctgagacaagttcgggacttcgattctcgctggttcaaggccatattccagtgcagccttctgcgttatatttcaaaaaataaaaaggattaa

SEQ ID NO: 28426 - DNA, 6321 bp, Enterobacter cloacae; identical to SEQ ID NO: 28424

SEQ ID NO: 28427 - DNA, 3297 bp, Enterobacter cloacae; identical to SEQ ID NO: 28425

SEQ ID NO: 28428 - DNA, 6239 bp, Enterobacter cloacae
atgactacacgctttttttcgtcgcttattgaacaatcgttgtctcgctcaaccgaagcaacgctcagtattatggggatcacaaacccgaacttacgcaagcatctcgcagagcaaatgggtgccgattgtgggaaatcaggctcatttcttgcctcaccagtattccagcaaatgtttggctggaaagagtcaaattatacaatgcgcaacctgaccgaaggtcaggcattactgagtaaagctgttgttgattcactagatgatcataacaacggtcgttaccgttttggtgcagactggaaacccttcactcaccagctagccagttggaaggctttactggaagataaacattcggtagtggtgacaagtggtacggggtcaggcaaaacggaatgttttatggttcctgtgctggaagacctctacagagaattacatgaaaatggcaacaacccacttgtcggcgtcagggcccttttcctctaccccctcaatgccctaattaattcacagagggagcgcctggatgcgtggacacgtggatttggtactgggatccgttactgtctttataatggcaatacagaaaatcttcacgcttcggtaaaaagcgagcaggcaaaaaggccaaatgaagttctttcacgcgaaaagatgcgtgaagaacccgcaccaattctggtaacaaacggcacgatgctggaatatatgatggtccgccagattgatgctccaattattcaacagtctaaagcacaaaaatcattacgctggatagtactggatgaagcgcatacctatgtcggatcgcaggccgctgaattagcgctgcagttacgccgcgtgatgacggcctttggcgtgacgccagacgatgtgcgtttcgtggcaacctctgcaactattgccggaagtgatgccgaaaaacaactgaaaaaattcctctctgaattatccggtataccgcaggagcgcatcgacgtactggacggaagccgggtgattccgaaactggcatcgtgcaaacacgtttatatccctttagaagaaattgaacaaatccctgatacggacatgaagggcgtaagcccagagcgctttgaagctcttacgcattcacctgaagcacattacttgcgtgagatgttagttactcagccggatccaatgaagctggatacgatgacgaagcggttgaatacgctgaccaagcagaattatagccagcaggaagtacttcgctggatcgacgtctgctctggtacacaacctaatcctaaagatccggcattcctgaagataagagcgcatattttccagcgcaatacccagggagtatgggcttgcgttgataaagagtgcagacaaaagcatggcactccgctggaaaagggctggccctttggttatgtgtatgtgaatcaacggcaaaattgtgaatgcgggagcccggtctacgaactggcattctgtaatgaatgtaacgaaccgcatcttctggcccgggataaaaatggcaaacttgtccaatgggaaaataaaggtggcgatgaattctctttgcaggatgaggtgaatgttgaaaacgacgctactgaagaaaaagttgagaaagaaagtagttaccgccctccacttattattgcggcagaaaagaccagcgaaacaggttatatcctacagcgactcgatcgcaagactcgtcgtattggtgtagttaataatgaaagtattgaactgattattaatgatattgaacaggtatgtagtgccaatggctgcggctacagaggcacgagtggaaaacaacctttccgccgcgcattgctgggtagaccgttttatgtcaccaatattgtgccaaccgttctggagtattgtcaggactttgtcagcgaagatggaaaggagggagtggggcctgattcactgccaggtagaggccgccgtctcattaccttcaccgacagccgtcagggaacagcgcgcatggcggtacgcatgcagcaagaagctgaacgcagtcgcttacgtggcagcgtagtagaaatattgggctggcatcaacgaacacagacttccaccacaccaaatgccaatacagatcttgaaaagttagcggcgttggcaaaacaggcacgcgaacaggccgatgaatttagaagctggggattacctgaacaagcgaagctggcagaagtacaggccgagcagcttgaacaagcttttcaggctgcgaccggaggtaacgtagcgaccattctcatttcccgaacctggacagaaatagttaatgagcttagagagaaagccgatattagcggccctattctgcaatataatcactatctgaagcctgaaattttcaacgaaaacggcgggccgctgaagctttcggaaatgttgcttttccgggagtttatgcgtcgtcctaaacgaactaacagcctggaaacgcaagggctggtgcgggttggttatcaggggctagagaagattcataagatgccgatgcattggcatgagcaagggctgacgctggatgactggaaagattttcttaaggttactctggatctgtacgtacgtgaaagcaacttcacacaactggacgatgagttaaaaaactggattggtagtcgtttttcgtcaaaattcgtccgtaacccggaaacaaaagatcctgaagataatcagaacagacgctggccacaaattcgtaatggcaatttgtcccatcgtttggtgaagttattaatgcttggtgcgggattaaaaaaagtaaatacggcgacgattgatattatcaatacatggttaaaagaagcatggaaccagcttaccgggtcacttgccgtactgaagcctgatggtaaccgtttctatttgccgaaagagcatttgaccttctctttaatcacggatgcctggatttgtccggtcactaataaaattctggacactgcttttaaagggttaacaccatatctacccactcacatttcatttgaacaactcacccagacgcaatatgacgcatttgtcgcgcaaaaggtcaccatgcctgagatctggaaggtggatcgctcacaagaagactacgctccgggtttggctaaagtacgtgactgggtcagcaacgagccgctgatcgcacaattgcgttcggaaaatgtctggacggatatcaacgatcgtgtcgtagaaggtggcttctactaccgcactgcagagcactctgcccagcagtcttcagaacgcctgcaaagctacgaaaagatgtttaagaacgggcagcttaatgttctcaactgttccaccaccatggaaatgggggttgatatcggtggcattaccgccgtggtgatgaacaacgtaccgccgcatccggcaaattatttacagcgagccggacgagccggacgtagcaaggaatcgcgcgcgatatcttacacattgtgtaaaggtaacccgcacgatcaacaggtatttgccaacccgctctggccgtttgaaacgatgatccctgcaccgatggtggcgatgaactcagctcggctggtgcaacgccacgtcaatgcgttattgctctctgactttttatgtcacgttattggcgaaacggacaaagaaaaaaccagcctcgacagcctctggtttttcggtgatgacgaagaacaatcaaaatgtgaacgctttaaagtctggcttgaacgccccgagcttgatattgacgcggcgctggaaaggctggtaaaaggcacggcgctacatggcgccagctcccacaaattgcgagagaaaacagttgatgcgatttctcttctgcaacagagatggctttccgtctatcgcgatcttgttgcacaggaacgcgaatcgcagccgcaaacgccttatcgcaagcgcatagaactggaaaaaaaacgacattgcggcgaatatttactgcgcgacctggcggccagaaccttccttcccggatacggcttcccaacggatgtggtgacgtttgataacttcacaatggaagactatattcgcgaaaaatcgcagaaaagccgggataaaaaagatcgcgaagataacgtgtcacgttataaagggctcccctcccgcaaccttggggttgctattcgtgaatatgcaccaggtgcagaaattattcttgatggcagggtcttccgttctgccggcgtctccctgcactggcacaatattaatgccgttacgaatgaagcgcagcgtctggattgcgcctggcgctgccacaaatgcgggaccatcggctatgaagagggaatgagcagttccggggtattatgctgtaccaacagcacctgtggtgaaaaaatcatcatggataatcgccgccaggtgctgcagcctgccgggtttgtgaccgatgcgcatgcacctgtgacaaacaacattgaaaccatgaaatttatcccggttgtccctgcctgggtatttgttaaagctgaacccgtaccgctgcctaacccgacaatggggtatatgacgtctggtgctgatggtcatgttttccagcaaagtctcggagaaggtgggcatggttacgcgttatgcctgagctgcgggcgtgcagagtcgatgctgaatgaaaatgatgcaccgagaagtatggaagctcactacccacctcgtccaggaaaagcggaccgcgatagtcaaaatcagcggctaatttgccccggttcgatggcactgatgaaaaacgtcactctgggtgcattagcgcgaacggatgtatttgaaatggttctgcgcaagccacaaaacggtgaatacctcccggataatacagaagaaggtcgacttgtcgccatgactctggcggttgccctgcgtcaggcgctggcgggtgtactgggtatttctgctgcagaactgggctacgcagtacgtccagtcagactggaagatggacaatcggtgtttgctgttcaactctacgatgtgattagcggtggcgcaggttttgcgtccagtgcgccattacacattgagactattctgctggggatggttaaacagctgggctgcaaccattgtgataccgcatgcagtgaatgtttgctcgattcccaaacccgccacgatcatgacctgctggatcgtaaagcggcgctgacctggcttggggatgacttcagtttctacattggtttaccagatgaagagacattctcgctaccagatgcccgatattgcccgggagcgattagcgatacccttcgtcgggcgattaacgagggagctgaaaaactcacactgtggatgaacgggccactcaatgaatgggatctttatgcccgtcaattccgggcggctattcagaactaccggattaaagacaatgttgcggtcgaccttgtcattcctgctggcgtcgatgatccggagctgttgcacgaactttcgcagtttactgctttgggcgtgcgtttgtgtcatagcgaacagattctggaattgccgattgttgcgcaaatcgcctttgccgatcgcataatgacgctggcttcacgcagccagcaggcaactatcccgggtccaggctggcaccttaatgacgaactggtcgttcgcagcctcggctataaaacggtaaaactgaacgagtttgttttgccggggaaagcagcgaacgctgttgagcgtgtcaaagacatagagattcataaacagttaaatggtgcactttcgcagttcggacaacgcttctgggacacgctgtttaacagccatgaagaagcacaatcgctgatgaaaaaccagcgaatcaccagcgttcactataccgatcgctatctgcaaaacccggttgcgctggcactgctgggggcgatactgaaaccgctaaaaacaaagctaaccgatgacgcggagcttgagcttgatactctgtttaagcccaaggatcgtcccggcaaccggccgttccatgactggatgagcgatgcggattttcaggatttcgccgaccagtggtttactgcggcaatgggcagagcggtagaactgacggtgttcgattcgccacgtgatattccacatcatcgtaagctgacggtgacctttgaagatggtcagacgttgaagattcgattcgatcaaggaatgggatactggcgtatcgacttcccgtatgtatggcgtaattttgactttgccgatgatgtgacttatcagctagtaaaactggc

SEQ ID NO: 28429 - DNA, 3297 bp, Enterobacter cloacae
ttggttcaatcagaatgcatttcatggacaaaatgtacttcatggctaacaaactttcttagtcgtagaggattgagacaacccgatggccgcccgctttatgaatatcaagcgacgaatgaagaatatgtggacttaacgcagttacttcgagcggttagccaaactacaaatattgttgatgataaaggctatgcttcctgttttgtgtttttttgctctgaatggtaccgcagagactatgagcggaattgtgggtggacttgggagcccatttataaaaagctaggtacatcgttaacggcgacggaactaaggcatatcgttcctaaagggatggagagttactggatgcgaccaattcgattttatgaatcggatagacgtaactttctaggaacgttgttcagtgagggtggtctaccttttcgtttactgaaagaatcagatagtagttttcaaaccgtattttcccggatccttaatcagtatgaacaagctcagacagcaggtttttccatgctttcgctggtaagaaacattatagaaagatcttcgcttccagctgtttttattgaagacacatcagtagagctcatcagtcatatggcagaaaaactcagctcattggtactgatgtataatctaagcgatgactctgaaccagtagcgcagcttgataaaacgcatccaaaatggcgggatgaattccctatgccacttgatgatgaaacaggcacccgctttctaaatggattgttacgtactgcatctatagaaacaaaacctcgttcacaaaaaaataaatgtaccggttgtcagttcttttggacagaaaaatcgccggatcaaatacgtgcgatagtttcgttaccagatgaactctcttttccaattattagtgaaccttcaaccacacgatttgaacttgctatttacgaaggcattaacgaagttgcaagccttggtgtagtctatgcgtccctcgaaaaatcgcatgccagaattcgcatccgtaaaaatgaatcacgatttgccagacatgccccctctgcgagtttatcgttagttgctcgggcaggcggaatgaatgttggcgcaataaaactggatgatagcgaaatcgccattggtgaggttccacttacttttgttgctgatggagaacgatggctattacaagggcaagcttcgtgcaatgttcgtaacagcgatgttcttattgttctacctcgcgaaaagacaactgtttcaggatatgaaacgactttgaatacaatttcagtcttaggcttcgaaacactctccgtaaaaggttgccatgaattaattatttccggagatgaaatatatcgtatacgcactggaaaagaacagactaaccctagtggggttgagttttatggtaaaagagtaaattgggtatgcaaccctactgaaacattccttggggtccctaaagtcacctcgaaaaatcctgatgtaaaacatatccaatttaaaccttattttaatagtaaatcaatcgaagaatgccagttacaagagatgatgggatctcaatttgtttccgtcaggaatagtgataatgagacgatactccgtcgaaaaattggaatattaccggcagactttaatgttcagattcatggtggcgatcaggctaatgaaggtaccattgtcatctcaacgcaacatccctgcatgtctatcttaaaaaataaaacattcgagattgcgcgaaaacgcgcagcaggacgcaccgagatattactcaaagccgaaggcatccctcccgcctttatttccctggaagtttatcctaatttgggggctgactcaattgaattgactttgccttatcctgctaaaggttgtttggtttttgatgcaaatggagaccttcttgaaaaaaatatcactttgcatgatttacttggttcaagagcctacttgtttggtaaaaatggtgaaccgactcgattttcactggaattacatctacacactataaatggtcaacaggcatggcatgaatggttttatacggcaggagaacgccctattgaactcaatttatacagtctaagagagcatattgaaaatttgctatctcttgagtcaggaattgaccaggttgtggatatgcgaatcagaggtgctggcgtagcgatgagctggcagattcggcgctacaaatacagtttgcgttatgattatgaaaaagaagttctcaccagccagtcgacaagctatcgtgccgggcaactcccttctcctgtcatcatgttattgagcgagccagagcgaaaagcagtctcgttgtcatcgaggttaagtgagggtgtacctgttggtgaatacgaactgagttctatagttagcaaaaatggaccttggctagtagtcccaaaggaaggtgatgaaatggcgtttcgtccatgcttcattcgtggcgaatcttccttacatggcgatgaaagtagcgttcgttcacttcagaaagccacccaactttttaatccccaggcaaaagtgaataccataacgctggtgcttgatcagatggctaccgatcctgcgcactccggttggcagtttatgcacagtctttatgaacattttggctatcttccgctggctacatttgaagtatggcgagcactcatacaacatccaagagcgctggcgatgtctctcttcaaatttgaaatgtccgccgagtatttaaaccgcattgagaatgaattccctgttttttgggagtttttccctatattagaaatcaaatccgcagcagaaaccttcaaacgattcctgacccaaaaaggggcaccagatgaagttttggtaacactgctgagtaagatgtttcgacaattagggatcgtatttccaacttatgccgatgaagttgaaaaatggttaagttatgggaaattccctcctcccattccaacatcctttgtccgtgagtggtatcaggagcttttacgcgaacacagtgaagctcgatggccagaatatggctgtaagcgactgcataactggatgtcatcacaaacagatgtagtaatagatatttatcccgaggctgattatcgctattcagttgcctggttacctgttttcgctgctgcagtggcaagcggtaaaacttcctttgaaactgtgtttgaacacaaacctggcgccgtgtttttcctgagacaagttcgggacttcgattctcgctggttcaaggccatattccagtgcagccttctgcgttatatttcaaaaaataaaaaggattaa

SEQ ID NO: 28430 - DNA, 6239 bp, Enterobacter cloacae
atgactacacgctttttttcgtcgcttattgaacaatcgttgtctcgctcaaccgaagcaacgctcagtattatggggatcacaaacccgaacttacgcaagcatctcgcagagcaaatgggtgccgattgtgggaaatcaggctcatttcttgcctcaccagtattccagcaaatgtttggctggaaagagtcaaattatacaatgcgcaacctgaccgaaggtaaggcattactgagtaaagctgttgttgattcactagatgatcataacaacggtcgttaccgttttggtgcagactggaaacccttcactcaccagctagccagttggaaggctttactggaagataaacattcggtagtggtgacaagtggtacggggtcaggcaaaacggaatgttttatggttcctgtgctggaagacctctacagagaattacatgaaaatagcaacaacccacttgtcggcgtcagggcccttttcctctaccccctcaatgccctaattaattcacagcgggagcgcctggatgcgtggacacgtggatttggtactgggatccgttactgtctttataatggcaatacagaaaatcttcacgcttcggtaaaaagcgagcaggcaaaaaggccaaatgaagtgatttcacgcgaaaagatgcgtgaagaacccgcaccaattctggtaacaaacggcacgatgctggaatatatgatggtccgccagattgatgctccaattattcaacagtctaaagcacaaaaatcattacgctggatagtactggatgaagcgcatacctatgtcggatcgcaggccgctgaattagctctgcagttacgccgcgtaatgacggcctttggcgtgacgccagacgatgtgcgtttcgtggcaacctctgcaactattgccggaagcgatgccgaaaaacaactgaaaaaattcctctctgaattatccggtataccgcaggagcgcatcgacgtactggacggaagccgggtgattccgaaactggcatcatgcaaacacgtttatattcctttagaagaaattgaacaaatccctgatacagacatgaagggcgtaagccctgagcgctttgaagctcttacgcattcacctgaagcacattacttgcgtgagatgttagttactcagccggatccaatgaagctggatacgatgacgaagcggttgaatacgctgaccaagcagaattatagccagcaggaagtacttcgctggatcgacgtctgctctggtacacaacctaatcctaaagatccggcattcctgaagataagagcgcatattttccagcgcaatacccagggagtatgggcttgtgttgataaagagtgcagacaaaagcatggcactccgctggaaaagggctggccctttggttatgtgtatgtgaatcaacggcaaaattgcgaatgcgggagcccggtctacgaactggcattctgcaatgaatgtaacgaaccgcatcttctggcccgggataaaaatggcaaacttgtccaatgggaaaataaaggtggcgatgaattctctttgcaggatgaggtgaatgttgaaaacgtcgctactgaagaaaaagttgagaaagaaagtagttaccgccctccacttattattgcggcagaaaaggccagtgaaactggttatatcctacagcgactcgatcgcaagactcgtcgtattggtgtagttaataatgaaagtattgaactgattattaacgatattgaacaggtatgtagtgccagtggctgcggctacagaggcacgagtggaaaacaacctttccgccgcgcattgttgggtggaccgttttatgtcaccaatattgtgccaaccgttctggagtattgtcaggactttgtcagcgaagatggaaaggagggagtggggcctgattcactgccaggtagaggccgccgtctcattaccttcaccgacagccgccagggaacagcgcgcatggcggtacgcatgcagcaagaagctgaacgcagtcgcttacgtggcagcgtagtagaaatattgggctggcatcaacgaaaacagacttccaccacaccaaatgccaatacagatcttgaaaagttagcagcgttggcaaaacaggcacgcgaacaggccgatgaatttagaagctggggattacctgaacaagcgaagctggcagaagtacaggccgagcagcttgaacaagcttttcaggctgcgaccggaggtaacgtagcgaccattctcatttcccgaacctggacagaaatagttaatgagcttagagagaaagccgatattagcggccctattctgcaatataatcactatctgaagcctgaaattttcaacgaaaacggcgggccgctgaagctatcggaaatgttgcttttccgggagtttatgcgtcgtcctaaacgaactaacagcctggaaacgcaagggctggtgcgggttggttatcaggggctagagaagattcataagatgccgatgcattggcatgagcaagggctgacgctggatgactggaaagattttcttaaggttactctggatctgtacgtacgtgaaagcaacttcacacaactggacgatgagttaaaaaactggattggtagtcgtttttcgtcaaaattcgtccgtaacccggaaacaaaagatcctgaagataatcagaacagacgctggccacaaattcgtaatggcaatttgtcccatcgtttggtgaagttattaatgcttggtgcgggattgaaaaaagtaaatacggcgacgattgatattatcaatacatggttaaaagaagcatggaaccagcttaccgggtcacttgccgtactgaagcctgatggtaaccgtttctatttgccgaaagagcatttgaccttctctttaataacggatgcctggatttgtccggtcaccaataaaattctggacactgcttttaaagggttaaccccatatctacccactcacatttcctttgaacaactcacccagacgcaatatgacgcatttgtcgcgcaaaaggtcaccatgccagagatctggaaggtggatcgctcacaagaagactacgctccgggtttggctaaagtacgtgactgggtcagcaacgagccgctgatcgcacaattgcgttcggaaaatgtctggacggatatcaacgatcgtgtcgtagaaggtggcttctactaccgcactgccgagcactctgcccagcagtcttcagaacgcctgcaaagctacgaaaagatgtttaagaacgggcagcttaatgttctcaactgttccaccaccatggaaatgggggttgatatcggtggcattaccgccgtggtgatgaacaacgtaccgccgcatccggcaaattatttacagcgagccgggcgagccggacgtagcaaggaatcgcgcgcgatatcttacacattgtgtaaaggtaacccgcacgatcaacaggtatttgccaacccgctctggccgtttgaaacgatgatccctgcaccgatggtggcgatgaactcagcccggctggtgcaacgccacgtcaatgcgttattgctctctgactttttatgtcacgttattggcgaaacggacaaagaaaaaaccagcctcgacagcctctggtttttcggtgatgacgaagatcaatcaaaatgtgaacgctttaaagtctggcttgaacgccccgagcttgatattgacgcggcgctggaaaggctggtaaaaggcacggcgctgcatggcgccagctcccacaaattgcgagagaaaacagttgatgcgattactcttctgcaacagagatggctttccgtctatcgcgatcttgttgcacaggaacgcgaatcgctgccgcaaacgccttatcgcaagcgcatagaactggaaaaaaaacgacattgcggcgaatatctactgcgcgatctggcggccagaaccttccttcccggatacggcttcccaacggatgtggtgacgtttgataacttcacaatggaagactatattcgcgaaaaatcgcagaaaagccgggataaaaaagatcgcgaagataacgtgtcgcgttataaagggctcccctcccgcaaccttggggttgctatccgtgaatatgcaccaggtgcagaaattattcttgatggtagggtcttccgttctgccggtgtctccctgcactggcacaatattaatgccgatacgaatgaagcgcagcgtctggattgcgcctggcgctgccacaaatgcgggaccatcggctatgaagagggaatgagcagttccggggtattatgctgtaccaacagcacctgtggtgaaaaaatcatcatggataatcgccgtcaggtgctgcagcctgccgggtttgtaaccgatgcgcatgcgccggtgacaaacaacattgaaaccatgaaatttatcccggttgtccctgcctgggtgtttgttaaagcggaacccgtaccactgcctaacccgacaatggggtatatgacgtctggtgctgatggtcatgttttccagcaaagtctcggagaaggtggtcatggttacgcattatgcctgagctgtgggcgtgcggagtcgatgctgaatgaaaatgatgcaccgagaagtatggaagctcactacccacctcgtccaggaaaagcggaccgcgatagccaaaatcagcggctgatttgccccggttcgacggcactgatgaaaaacgtcacgctgggggcattagcacgaacagatgtatttgaaatggttctgcggaagccacaaaacggtgaatacctcccggataatacagaagaaggtcggcttgtcgccatgactctggcggttgccctgcgtcaggcgctggcgggtgtattgggtatttctgctgcagaactgggctacgctgtgcgtccggtcaggctggaagatggacaatcggtattagccgttcaactttacgatgtgattagcggtggcgcaggttttgcgtccagtgctccattacacattgagaccattctgctggggatggtgaaacagctgggctgcaaccattgtgataccgcatgcagtgaatgtttgctcgattcccaaacccgccacgatcatgacctgctggatcgtaaagcggcgctgacctggcttggggatgacttcagtttctacattggtttaccagatgaagagacattctcgctaccagatgcccgatattgcccgggaccgattagcgatacccttcgtcgggcgattaacgagggagctgaaaaactcacactgtggatgaatgggccactcaatgaatgggatctttatgcccgtcaattccgggcggcgattcagaactaccggattaaagacaatgttgcggtcgaccttgtcattcctgctggcgtcgatgatccggagttgttgcacgaactttcgcagtttactgctttgggcgtgcgtttgtgtcatagcgaacagattctggaattgccgattgttgcgcaaatcgcctttgccgatcgcataatgacgctggcttcacgcagccagcaggcaactatcccgggtccaggctggcaccttaatgacgaactggtcgttcgcagcctcggctataaaacggtaaaactgaacgagtttgttttgccggggaaagcagcgaacgctgttgagcgtgtcaaagacatagagattcataaacagttaaatggtgcactttcgcagttcggacaacgcttctgggacacgctgtttaacagccatgaagaagcacaatcgctgatgaaaaaccagcgaatcaccagcgttcactataccgatcgctatctgcaaaacccggttgcgctggcactgctgggggcgatactgaaaccgctaaaaacaaagctgaccgatgacgcggagcttgagcttgatactctgtttaagcccaaggatcgtcccggcaaccggccgttccatgactggatgagcgatgcggattttcaggatttcgccgaccagtggtttactgcggcaatgggcagagcggtagaactgacggtgttcgattcgccacgtgatattccacatcatcgtaagctgacggtgacctttgaagatggtcagacgttgaagattcgattcgaccagggaatgggatactggcgtatcgacttcccgtatgtatggcgtaattttgactttgccgaagatgtgacttatcagctagtaaaactggc

SEQ ID NO: 28431 - DNA, 2211 bp, Enterobacter cloacae; identical to SEQ ID NO: 28423

SEQ ID NO: 28432 - DNA, 6321 bp, Enterobacter cloacae subsp. cloacae
atgactacacgctttttttcgtcgcttattgaacaatcgttgtctcgctcaaccgaagcaacgctcagtattatggggatcacaaacccgaacttacgcaagcatctcgcagagcaaatgggtgccgattgtgggaaatcaggctcatttcttgcctcaccagtattccagcaaatgtttggctggaaagagtcaaattatacaatgcgcaacctgaccgaaggtaaggcattactgagtaaagctgttgttgattcactagatgatcataacaacggtcgttaccgttttggtgcagactggaaacccttcactcaccagctagccagttggaaggctttactggaagataaacattcggtagtggtgacaagtggtacggggtcaggcaaaacggaatgttttatggttcctgtgctggaagacctctacagagaattacatgaaaatagcaacaacccacttgtcggcgtcagggcccttttcctctaccccctcaatgccctaattaattcacagcgggagcgcttggatgcgtggacacgtggatttggtactgggatccgttactgtctttataatggcaatacagaaaatcttcacgcttcggtaaaaagcgagcaggcaaaaaggccaaatgaagtgctttcacgcgaaaagatgcgtgaagaacccgcaccaattctggtaacaaacggcacgatgctggaatatatgatggtccgccagattgatgctccaattattcaacagtctaaagcacaaaaatcattacgctggatagtactggatgaagcgcatacctatgtcggatcgcaggccgctgaattagctctgcagttacgccgcgtgatgacggcctttggagtgacgccagacgatgtgcgtttcgtggcaacctctgcaactattgccggaagcgatgccgaaaaacaactgaaaaaattcctctctgaattatccggtataccgcaggagcgcatcgatgtactggacggaagccgggtgattccgaaactggcatcgtgcaaacacgtttatatccctttagaagaaattgaacaaatccctgatacggacatgaagggcgtaagcctagagcgctttgaagctcttacgcattcacctgaagcacattacttgcgtgagatgttagttactcagccggatccaatgaagttggatacgatgacgaagcggttgaatacgctgaccaagcagaattatagccagcaggaagtacttcgctggatcgacgtctgctctggcacacaacctaatcctaaagatccagcattcctgaagataagagcgcatattttccagcgcaatacccagggagtatgggcttgtgttgataaagagtgcagacaaaagcatggcactccgctggaaaaggactggccctttggttatgtgtatgtgaatcaacggcaaaattgtgaatgcgggagcccggtctacgaactggcattctgcaatgaatgtaacgaaccgcatcttctggcccgggataaaaatggcaaacttgtccaatgggaaaataaaggtggcgatgaattctctttgcaggatgaggtgaatgttgaaaacgacgctactgaagaaaaagttgagaaagaaagtagttaccgccctccacttattattgcggcagaaaaggccagtgaaactggttatattctacagcgactcgatcgcaagactcgtcgtattggtgtagttaataatgaaagtattgaactgattattaacgatattgaacaggtatgtagtgccagcagctgcggctacagaggcacgagtggaaaacaacctttccgccgcgcattgttgggtggaccgttttatgtcaccaatattgtgccaaccgttctggagtattgtcaggactttgtcagcgaagatggaaaggaaggagtggggcctgattcactgccaggtagaggccgccgtctcattaccttcaccgacagccgtcagggaacagcgcgcatggcggtacgcatgcagcaagaagctgaacgcagtcgcttacgtggcagcgtagtagaaatattgggctggcatcaacgaacacagacttccaccacaccaaatgccaatacagatcttgaaaagttagcagcgttggcaaaacaggcacgcgaacaggccgatgaatttagaagctggggattacctgaacaagcgaagctggcagaagtacaggccgagcagcttgaacaagcttttcaggctgcgaccggaggtaacgtagcgaccattctcatttcccgaacctggacagaaatagttaatgagcttagagagaaagccgatattagcggccctattctgcaatataatcactatctgaagcctgaaattttcaacgaaaacggcgggccgctgaagctgtcggaaatgttgcttttccgggagtttatgcgtcgtcctaaacgaactaacagcctggaaacgcaagggctggtgcgggttggttatcaggggctagagaagattcataagatgccgatgcattggcatgagcaagggctgacgctggatgactggaaagattttcttaaggttactctggatctgtacgtacgtgaaagcaacttcacacaactggacgatgagttaaaaaactggattggtagtcgtttttcgtcaaaattcgtccgtaacccggaaacaaaagatcctgaagataatcagaacagacgctggccacaaattcgtaatggcaatttgtcccatcgtttggtgaagttattaatgcttggtgcgggattaaaaaaagtaaatacggcgacgattgatattatcaatacatggttaaaagaagcatggaaccagcttaccgggtcacttgccgtactgaagcctgatggtaaccgtttctatttgccgaaagagcatttgaccttctctttaataacggatgcctggatttgtccggtcaccaataaaattctggacactgcttttaaagggttaaccccatatctacccactcacatttcctttgaacaactcacccagacgcaatatgacgcatttgtcgcgcaaaaggtcaccatgccagagatctggaaggtggatcgctcacaagaagactacgctccgggtttggctaaagtacgtgactgggtcagcaacgagccgctgatcgcacaattgcgttcggaaaatgtctggacggatatcaacgatcgtgtcgtagaaggtggcttctactaccgcactgcagagcactctgcccagcagtcttcagaacgcctgcaaagctacgaaaagatgtttaagaacgggcagcttaatgttctcaactgttccaccaccatggaaatgggggttgatatcggtggcattaccgccgtggtgatgaacaacgtaccgccgcatccggcaaattatttacagcgagccggacgagccggacgtagcaaggaatcgcgcgcgatatcttacacattgtgtaaaggtaacccgcacgatcaacaggtatttgccaacccgctctggccgtttgaaacgatgatccctgcaccgatggtggcgatgaactcagcccggctggtgcaacgccacgtcaatgcgttattgctctctgactttttatgtcacattattggcgaaacggacaaagaaaaaaccagcctcgacagcctctggtttttcggtgatgacgaagatcaatcaaaatgtgaacgctttaaagtctggcttgaacgccccgaacttgatattgacgcggcgcttgaaaggctggtaaaaggcacggcgctgcatggcgccagctcccacaaattgcgtgagaaaacagttgatgcgattactcttctgcaacagagatggctttccgtctatcgcgatcttgctgcacaggaacgcgaatcgcagccgcaaacgccttaccgcaagcgcatagaactggaaaaaaaacgacattgcggcgaatatttactgcgcgatctggcggccagaaccttccttcccggatacggcttcccaacggatgtggtgacgtttgataacttcacaatggaagactatattcgcgaaaaatcgcagaaaagccgggataaaaaagatcgcgaagataacgtgtcgcgttataaaggactcccctcccgcaaccttggggttgctatccgtgaatatgcaccaggtgcagaaattattcttgatggcagggtcttccgttctgccggtgtctccctgcactggcacaatattaatgccgatacgaatgaagcgcagcgtctggattgcgcctggcgctgccacaaatgcgggaccatcggctatgaagagggaatgagcagttccggggtattatgctgtaccaacagcacctgtggtgaaaaaatcatcatggataatcgccgccaggtgctgcagcctgccgggtttgtgaccgatgcgcatgcacctgtgacaaacaacattgaaaccatgaaatttatcccggttgtccctgcctgggtatttgttaaagctgaacccgtaccgttgcctaacccgacaatggggtatatgacgtctggtgctgatggtcatgttttccagcaaagtctcggagaaggtgggcatggttacgcgttatgcctgagctgtgggcgtgcagagtcgatgctgaatgagaatgatgcaccgagaagtatggaagctcactacccacctcgtccaggtaaagcggaccgcgatagccaaaatcagcggctgatttgccccggttcgacggcactgatgaaaaaagtcacgctgggggcattagcacgaacagatgtatttgaaatggttttgcgaaagcctcaaaacggtgaatacctgccggataatacagaggaaggtcggctagtcgcgatgactctggcggttgccctgcgtcaggcgctggcgggtgtattgggtatttctgctgcagaactgggctacgctgtgcgtccggtcaggctggaagatggacaatcggtattagccgttcaactctacgatgtgattagcggtggcgcaggttttgcgtccagtgctccattacacattgagaccattctgctggggatggttaaacagctgggctgcaaccattgtgataccgcatgcagtgaatgtttgctcgattcccaaacccgccacgatcatgacctgctggatcgtaaagcggcgctgacctggcttggggatgacttcagtttctacattggtttaccagatgaagagacattctcgctaccagatgcccgatattgcccgggagcgattagcgatacccttcgtcgggcgattaacgagggagctgaaaaactcacactgtggatgaatgggccactcaatgaatgggatctttatgcccgtcaattccgggcggctattcagaactaccgggttaaagacaatgttgcggtcgaccttgtcattcctgctggcgtcgaggatccggagctgttgcatgaactttcgcagtttactgctttgggcgtgcgtttgtgtcatagcgaacaggctctggaattgccgattgtggcgcaaatcgcctttgccgatcgcgtaatgacgctggcttcacgcagccagcaggcaactatcccggggccaggctggcacctgaatgacgaactggtcgttcgcagcctcggctataaaacggtaaaactgaacgagtttgttctaccggggaaagcagcgaacgcggttgagcgagtcaaagacatagagattcataaacagttaaatggtccactttcgcagttcggacaacgcttctgggacgcgctctttaacagccatgaagaagcacaatcgctgatgaaaagccagcgaattaccagcgttcactataccgatcgctatctgcaaaacccggttgcgctggcactgctgggggcgatcctgaaaccgctaaaaacaaagctgaccgatgacgcggagctgaagcttgatacgctgtttaagcccaaagatcgtcccggtaaccggccattccatgactggatgagcgacgcagattttcaggatttcgccgaccagtggtttactgcggcgatgggcagagcggtagaactgacggtgttcgattcgccacgtgatattccacatcatcgtaagctgacggtgacctttgaagatggtcaggtgttgaagattcgcttcgaccagggaatgggatactggcgtatcgactttccgtatgcatggcgtaactttgactttactgacgatgtgacttatcagctagtaaaactggcgcaagcctgccaggagggcaaagtccttaatagcgaggaaagctgggcaacggatgtgctggtagaggtgatgccgtcttaa

SEQ ID NO: 28433 - DNA, 3297 bp, Enterobacter cloacae subsp. cloacae
ttggttcaatcagaatgcatttcatggacaaaatgtacttcatggctaacaaactttcttagtcgtagaggattgagacaacccgatggtcgcccgctttatgaatatcaagcgacgaatgaagaatatgtggacttaacgcagttacttcgagcggttagccaaactacaaatattgttgatgataaaggctatgcttcctgttttgtgtttttttgctctgaatggtaccgcagagactatgagcggaattgtgggtggacttgggagcccatttacaaaaagctaggtacatcgttaacggcgacggaactaaggcatatcgttcctaaaggaatggagagttactggatgcgaccaattcgattttatgaatcggatagacgtaactttctaggaacgttgttcagtgagggtggtctaccttttcgtttactgaaggaatcagatagtagttttcaaaccgtattttcccggatccttaatcagtatgaacaagctcagatagcaggtttttccatgctttcgctggtaagaaacattatagaaagatcttcgcttccagctgtttttattgaagacacatcagtagagctcatcagtcatatggcagaaaaactcagctcattggtactgatgtataatctaagcgatgactctgaaccagtagcgcagcttgataaaacgcatccaaaatggcgggatgaattccctatgccacttgatgatgaaacaggcacccgctttctaaatggattgttacgtactgcatctatagaaacaaaaccccgttcacaaaaaaataaatgtaccggttgtcagttcttttggacagaaaaatcgccggatcaaatacgtgcgatagtttcgttaccagatgaactctcttttccaattattagtgaaccttcaactacacgatttgaacttgctatttacgaaggcattaacgaagttgcaagccttggtgtagtctatgcctccctcgaaaattcgcatgccagaattcgcatccgtaaaaatgaatcacgatttgtcagacatgacccttctgcgagtttatcgttagttgctcgggcaggcggaatgaatgttggcgcaataaaactggatgatagcgaaatcgccattggtgaggttccacttacttttgttgctgaaggagaacgatggctattacaagggcaagcttcgtgcaatgttcgtaacagcgatgttcttattgttctacctcgagaaaagacaactgtttcaggatatgaaacgactttgaatacaatttcagtcttaggcttcgaaacactctccgtaaaaggttgccatgaattaattatttccggagatgaaatatatcgtatacgcactggaaaagaacagactaaccctggtggggttgagttttatggtaaaagagtaaattgggtatgcaaccctactgaaacattccttggggtccctaaagtcacctcgaaaaatcctgatgtaaaacatatccaatttaaaccttattttaatagtaaatcaatcgaagaatgccagttacaagagatgatgggatctcaatttgtttccgtcaggaatagtgataatgagacgatactccgtcgaaaaattggaatattaccggcagactttaatgttcagattcatggtggcgatcaagctaatgaaggtaccattgtcatctcaacgcaacatccctgcatgtctgtcttaaaaaataaaacattcgagattgcgcgaaaacgcacagcaggacgcaccgagatattactcaaagccgaaggcatccctcccgcctttatctctctggaaatttatcctaatttgggggctgactcaattgaattgactttgccttatcctgctaaaggttgtttggtttttgatgcaaatggagaccttcttgaaaaaaatatcactttgcatgatttacttggttcaagagcctacttgtttggtaaaaatggtgaaccgactcgattttcactggaattacatctacgcactataaatggtcaacaggcatggcatgaatggttttatacggcaggagaacgccctattgaactcaatttatacagtctaagagagcatattgaaaatttgctatctcttgagtcaggaattgaccaagttgtggatatgcgaatcagaggtgctggcgtagcgatgagctggcagattcggcgctacaaatacagtttgcgttatgattatgaaaaagaagttctcaccagccagtcgacaagctatcgtgccgggcaactcccttctcctgtcatcatgttattgagcgagccagagcgaaaagcagtctcgttgtcatcgaggctaagtgagggtgtacctgttggtgaatatgaactgagttcaatcgttagcaaaaacgggccttggctagtagtcccaaaggaaggtgatgaaatggcgtttcgtccatgcttcattcgtggcgaatcttccttacatggcgatgaaagtagcgttcgttcacttcagaaagccacccaactttttaatccccaggcaaaagtgaataccataacgctggtgcttgatcagatggctaccgatcctgcgcactccggttggcagtttatgcacagtctttatgaacattttggctatcttccgctggctacatttgaagtatggcgagcactcgtacaacatccaagagcgctggcgatgtctctcttcaaatttgaaatgtccgccgagtatttaaaccgcattgagaatgaattccctgttttttgggagttcttccctatattagaaattaaatccgcagcagaaaccttcaaacgattcctgtcccaaaaaggggctccagatgaagttttggtaacactgctgagtaagatgtatcgacaattagggatcgtatttccgacttatgccgatgaagttgaaaaatggttaagttatgggaaattccctcctcccattccaacatcctttgtccgcgagtggtatcaggagcttttacgcgaacacagtgaagctcggtggccagaatatggctgtaagcgactgcataactggatgtcgtcacaaacagatgtagtgatagatatttatcccgaggctgattatcgctattcagttgcctggttacctgttttcgcggctgcagtggcaagcggtaaaacttcctttgaaactgtgtttgaacacaaacctggcgccgtatttttcctgagacaagttcgggacttcgattctcgctggttcaaggccatattccagtgcagccttctgcgttatatttcaaaaaataaaaaggattaa

SEQ ID NO: 28434 - DNA, 6321 bp, Enterobacter cloacae UCICRE 12
atgactacacgctttttttcgtcgcttattgaacaatcgttgtctcgctcaaccgaagcaacgctcagtattatggggatcacaaacccgaacttacgcaagcatctcgcagagcaaatgggtgccgattgtgggaaatcaggctcatttcttgcctcaccagtattccagcaaatgtttggctggaaagagtcaaattatacaatgcgcaacctgaccgaaggtaaggcattactgagtaaagctgttgttgattcactagatgatcataacaacggtcgttaccgttttggtgcagactggaaacccttcactcaccagctagccagttggaaggctttactggaagataaacattcggtagtggtgacaagtggtacggggtcaggcaaaacggaatgttttatggttcctgtgctggaagacctctacagagaattacatgaaaatggcaacaacccacttgtcggcgtcagggcccttttcctctaccccctcaatgccctaattaattcacagcgggagcgcttggatgcgtggacacgtggatttggtactgggatccgttactgtctttataatggcaatacagaaaatcttcacgcttcggtaaaaagcgagcaggcaaaaaggccaaatgaagtgctttcacgcgaaaagatgcgtgaagaacccgcaccaattctggtaacaaacggcacgatgctggaatatatgatggtccgccagattgatgctccaattattcaacagtctaaagcacaaaaatcattacgctggatagtactggatgaagcgcatacctatgtcggatcgcaggccgctgaattagctctgcagttacgccgcgtgatgacggcctttggcgtgacgccagacgatgtgcgtttcgtggcaacctctgcaactattgccggaagcgatgccgaaaaacaactgaaaaaattcctctctgaattatccggtataccgcaggagcgcatcgatgtactggacggaagccgagtgattccgaaactggcatcgtgcaaacacgtttatattcctttagaagaaattgaacaaatccctgatacagacatgaagggcgtaagccctgagcgctttgaagctcttacgcattcacctgaagcacattacttgcgtgagatgttagttactcagccggatccaatgaagctggatacgatgacgcagcggttgaatacgctgaccaagcagaattatagccagcaggaagtacttcgctggatcgacatctgctctggtacacaacctaatcctaaagatccggcattcctgaagataagagcgcatattttccagcgcaatacccagggagtatgggcttgtgttgatatagagtgcagacaaaagcatggcactccgctggaaaagggctggccctttggttatgtgtatgtgaatcaacggcaaaattgcgaatgcgggagcccggtctacgaactggcattctgcaatgaatgtaacgaaccgcatcttctggcccgggataaaaatggcaaacttgtccaatgggaaaataaaggtggcgatgaattctctttgcaggatgaggtgaatgttgaaaacgacgctactgaagaaaaagttgagaaagaaagtagttaccgtcctccacttgttattgcagcagaaaagaccagcgaaacaggttatatcctacagcgactcgatcgcaagactcgtcgtattggtgtagttaataatgaaagtattgaactgattattaatgattttgaacaggtatgtagtgccagtggctgcggctacagaggcacgagtggaaaacaacctttccgccgcgcattgttaggtggaccgttttacgtcaccaatattgtgccaaccgttctggagtattgtcaggactttgtcagcgaagatggaaaggaaggagtggggcctgattcactgccaggtagaggccgccgtctcattaccttcaccgacagccgccagggaacagcgcgcatggcggtacgcatgcagcaagaagctgaacgcagtcgcttacgtggcagcgtagtagaaatattgggctggcatcaacgaacacagacttccaccacaccaaatgccaatacagatctggaaaagttagcagcattggcaaaacaggcacgccaacaggccgatgaatttagaagctggggattacctgaacaagcgaagctggcagaagtacaggcagagcagcttgaacaagcttttcaggctgcgaccggaggtaacgtagcgaccattctcatttcccgaacctggacagaaatagtcaatgagcttagagagaaagccgatattagcggccctattctgcaatataatcactatctgaagcctgaaattttcaacgaaaacggcgggccgctgaagctttcggaaatgttgcttttccgggagttcatgcgtcgtcctaaacgaactaacagcctggaaacgcaagggctggtgcgggttggttatcaggggctagagaagattcataagatgccgatgcattggcaagagcaagggctgacgctggatgactggaaagattttcttaaggttactctggatctgtacgtacgtgaaagcaacttcacacaactggacgatgagttaaaaaactggattggtagtcgtttttcgtcaaaattcgtccgtaacccggaaacaaaagatcctgaagataatcagaacagacgctggccacaaattcgtaatggcaatttgtcccatcgtttggtgaagttattaatgctgggtgcgggattaaaaaaagtaaatacggcgacgattgatattatcaatacttggttaaaagaagcatggaaccagcttaccgggtcacttgccgtactgaagcctgatggtaaccgtttctatttgccgaaagagcatttgaccttctctttaatcacggatgcctggatttgtccggtcaccaataaaattctggacactgcttttaaagggttaaccccatatctacccactcacatttcctttgaacaactcacccagacgcaatatgacgcatttgtcgcgcagaaggtcaccatgccagagatctggaaggtggatcgctcacaagaagactacgctccgggtctggctaaagtacgtgactgggtcagcaacgagccgctgatcgcacaattgcgttcggaaaatgtctggacggatatcaacgatcgtgtcgttgaaggtggcttctactaccgcactgccgagcactctgcccagcagtcttcagaacgcctgcaaagctacgaaaagatgttcaagaacgggcagcttaatgttctcaactgttccaccaccatggaaatgggggttgatatcggtggcattaccgccgtggtgatgaacaacgtaccgccgcatccggcaaattatttacagcgagccgggcgagccggacgtagcaaggaatcgcgcgcgatatcttacacattgtgtaaaggtaacccgcacgatcaacaggtatttgccaacccgctctggccgtttgaaacgatgatccctgcaccgatggtggcgatgaactcagcccggctggtgcaacgccacgtcaatgcgttattgctctctgactttttatgtcacgttattggcgaaacggacaaagaaaaaaccagcctcgacagcctctggtttttcggtgatgacgaagatcaatcaaaatgtgaacgctttaaagtctggcttgaacgccccgagcttgatattgacgcggcgctggaaaggctggtaaaaggcacggcgctgcatggcgccagctcccacaaattgcgagagaaaacagttgatgcgattactcttctgcaacagagatggctttccgtctatcgcgatcttgttgcacaggaacgcgaatcgcagccgcaaacgccttatcgcaagcgcatagaactggaaaaaaaacgacattgcggcgaatatctactgcgcgatctggcggccagaaccttccttcccggatacggcttcccaacggatgtggtgacgtttgataacttcacaatggaagactatattcgcgaaaaatcgcagaaaagccgggataaaaaagatcgcgaagataacgtgtcgcgttataaagggctcccctcccgcaaccttggagttgctatccgtgaatatgcaccaggtgcagaaattattcttgatggtagggtcttccgttctgccggcgtctccctgcactggcacaatattaatgccgatacgaatgaagcgcagcgtctggattgcgcctggcgctgccacaaatgcgggaccatcggctatgaagagggaatgagcagttccggggtattatgctgttccaacagcacctgtggtgaaaaaatcatcatggataatcgccgccaggtgctgcagcctgccgggtttgtgaccgatgcgcatgcacctgtgacaaacaacattgaaaccatgaaatttattccggttgtccctgcctgggtatttgttaaagctgaacccgtaccgctgcctaacccgacaatggggtatatgacgtctggtgctgatggtcatgttttccaacaaagtctcggagaaggtgggcatggttacgcgttatgcctgaactgtgggcgtgcagagtcgatgctgaatgagaatgatgcaccgagaagtatggaagctcactacccacctcgtccaggaaaagcggaccgcgatagccaaaatcagcggctgatttgccccggttcgacggcactgatgaaaaacgtcacgctgggggcattagcacgaacagatgtatttgaaatggttttgcgaaagcctcaaaacggtgaatacctgccggataatacagaagaaggtcggcttgtcgccatgactctggcggttgccctgcgtcaggcgctagcgggtgtattgggtatttctgctgcagaactgggctacgctgtgcgtccggtcagactggaagatggacaatcggtgttagccgttcaactctacgatgtgattagcggtggcgcaggttttgcgtccagtgctccattacacattgagaccattctgctggggatggttaaacagctgggctgcaaccattgtgataccgcatgcagtgaatgtttgctcgattcccaaacccgccacgatcatgacctgctggatcgtaaagcggcgctgacctggcttggggatgacttcagtttctacattggtttgccagatgaagagacattctcgctaccagatgcccgatattgcccgggagcgattagcgatacccttcgtcgggcgattaacgagggagctgaaaaactcacactgtggatgaatgggccactcaatgagtgggatctttatgctcgtcaattccgggcagctattcagaactaccgtgttaaagacaatgttgctgtcgaccttatcattcctgctggcgtcgatgatccggagctgttgcacgagctttcgcagtttactgctttgggcgtgcgtttgtgtcatagcgaacaggctctggaattgccgattgtggcgcaaatcgcctttgccgattgcgtaatgacgctggcttcacgcagccagcaggcaactatcccagggccaggctggcacctgaatgacgaactggtcgttcgcagtctcggctataaaacggtaaaactgaacgagtttgttctgccggggaaagcagcgaacgcggttgagcgtgtcaaagacatagagattcataaacagttaaatggtccactttcgcagttcggacaacgcttctgggacgcgctgtttaacaatcatgaagaagcacactcgctgatgaaaaaccaacggatcaccagcgttcactataccgatcgctatcttcaaaacccggttgcgctggcgctgctgggagcgatactgaaaccgctaaaaacaaagctgaccgataacgcagagttggggcttgatacgctgtttaagcccaaagatcgtcccggtaaccggccattccatgactggatgagcgaagcggattttcaggatttcgccgaccagtggtttactgcggcaatgggcagagcggtagaactgacggtgttcgattcgccacgtgatattccacatcatcgtaagctgacggtgacctttgaagatagtcagatgttgaagattcgcttcgaccagggaatgggatactggcgtatcgacttcccgtatgcatggcgtaactttgactttactgatgatgtgacttatcagctagtaaaactggcgcaagcctgccaggagggcaaagtccttaatagcgaggaaagctgggcaacggatgtgctggtagaggtgatgccgtcttaa

SEQ ID NO: 28435 - DNA, 2946 bp, Enterobacter cloacae UCICRE 12
atgcgaccaattcgattttatgaatcggatagacgtaactttctaggaacgttgttcagtgagggtggtctaccttttcgtttactgaaggaatcagatagtagttttcaaaccgtattttcccggatccttaatcagtatgaacaagctcagatagcaggtttttccatgctttcgctggtaagaaacattatagaaagatcttcgcttccagctgtttttattgaagacacatcagtagagctcatcagtcatatggcagaaaaactcagctcattggtactgatgtataatctaagcgatgactctgaaccagtagcgcagcttgataaaactcatccaaaatggcgggatgaattccctatgccacttgatgatgaaacaggcacccgctttctaaatggattgttacgtactgcatctatagaaacaaaaccccgttcacaaaaaaataaatgtaccggttgtcagttcttttggacagaaaaatcgccggatcaaatacgtgcgatagtttcgttaccagatgaactctcttttccaattattagtgaaccttcaactacacgatttgaacttgctatttacgaaggcattaacgaagttgcaagccttggtgtagtctatgcctccctcgaaaattcgcatgccagaattcgcatccgtaaaaatgaatcacgatttgtcagacatgacccttctgcgagtttatcgttagttgctcgggcaggcggaatgaatgttggcgcaataaaactggatgatagcgaaatcgccattggtgaggttccacttacttttgttgctgaaggagaacgatggctattacaagggcaagcttcgtgcaatgttcgtaacagcgatgttcttattgttctacctcgagaaaagacaactgtttcaggatatgaaacgactttgaatacaatttcagtcttaggcttcgaaacactctccgtaaaaggttgccatgaattaattatttctggaaatgaaatatatcgtatacgcactggaaaagaacagactaaccctggtggggttgagttttatggtaaaagagtaaattgggtatgcaaccctactgaaacattccttggggtccctaaagtcacctcgaaaaatcctgatgtaaaacatatccaatttaaaccttattttaatagtaaatcaatcgaagaatgccagttacaagagatgatgggatctcaatttgtttccgtcaggaatagtgataatgagactatactccgtcgaaaaattggaatattaccggcagactttaatgttcagattcatggtggcgatcaagctaatgaaggtaccattgtcatctcaacgcaacatccctgcatgtctgtcttaaaaaataaaacattcgagattgcgcgaaaacgcacagcaggacgcaccgagatattactcaaagccgaaggcatccctcccgcctttatctctctggaaatttatcctaatttgggggctgactcaattgaattgactttgccttatcctgctaaaggttgtttggtttttgatgcaaatggagaccttcttgaaaaaaatatcactttgcatgatttacttggttcaagagcctacttgtttggtaaaaatggtgaaccgactcgattttcactggaattacatctacgcactataaatggtcaacaggcatggcatgaatggttttatacggcaggagaacgccctattgaactcaatttatacagtctaagagagcatattgaaaatttgctatctcttgagtcaggaattgaccaagttgtggatatgcgaatcagaggtgctggcgtagcgatgagctggcagattcggcgctacaaatacagtttgcgttatgattatgaaaaagaagttctcaccagccagtcgacaagctatcgtgccgggcaactcccttctcctgtcatcatgttattgagcgagccagagcgaaaagcagtctcgttgtcatcgaggctaagtgagggtgtacctgttggtgaatatgaactgagttcaatcgttagcaaaaacgggccttggctagtagtcccaaaggaaggtgatgaaatggcgtttcgtccatgcttcattcgtggcgaatcttccttacatggcgatgaaagtagcgttcgttcacttcagaaagccacccaactttttaatccccaggcaaaagtgaataccataacgctggtgcttgatcagatggctaccgatcctgcgcactccggttggcagtttatgcacagtctttatgaacattttggctatcttccgctggctacatttgaagtatggcgagcactcgtacaacatccaagagcgctggcgatgtctctcttcaaatttgaaatgtccgccgagtatttaaaccgcattgagaatgaattccctgttttttgggagttcttccctatattagaaattaaatccgcagcagaaaccttcaaacgattcctgtcccaaaaaggggctccagatgaagttttggtaacactgctgagtaagatgtatcgacaattagggatcgtatttccgacttatgccgatgaagttgaaaaatggttaagttatgggaaattccctcctcccattccaacatcctttgtccgcgagtggtatcaggagcttttacgcgaacacagtgaagctcggtggccagaatatggctgtaagcgactgcataactggatgtcgtcacaaacagatgtagtgatagatatttatcccgaggctgattatcgctattcagttgcctggttacctgttttcgcggctgcagtggcaagcggtaaaacttcctttgaaactgtgtttgaacacaaacctggcgccgtatttttcctgagacaagttcgggacttcgattctcgctggttcaaggccatattccagtgcagccttctgcgttatatttcaaaaaataaaaaggattaa

SEQ ID NO: 28436 - DNA, 6321 bp, Enterobacter sp. BIDMC109; identical to SEQ ID NO: 28422

SEQ ID NO: 28437 - DNA, 2211 bp, Enterobacter sp. BIDMC109; identical to SEQ ID NO: 28423

SEQ ID NO: 28438 - DNA, 5853 bp, Epilithonimonas lactis
atgaacttcaaaaatttttacacaaaagcagaaaaccgtttgacggatgcaatcctttctctttgggcaactggggacaaagaaatgcaggattattttaaatccattttatcccaagaaccaataatggcagatgcggttttccaagcaatgtttccttgggagcagtctcatatagattttcaaaataccaatttcttatatggtaccaattttataaaatctttggattcaattagaaatcccgaatttcagttccctaaagacagattcccgtacaagcaccagatagaaagctggcaatctttgttgctagacaaaaagtctatagctgtgactacaggaacaggatctggaaaaacagaatgctttatgttgcccgttttgcaggatatatatgaaaataaccgagatcaggaaggcgtcaatgctattttcctttatcctttgaatgcgcttattgcaagccagcaaaagagaatgcacgcttggtgtaacgctttgggcggaatcaattatgccttgcttacaggaagtacagccaatcgagagtcaagtattgaaaagaaagacagcgcaatgcctcagcttatttccagagaacaaattagaaattcgccaccacagattttattcacaaatcctacaatgctggaatatatgctggtacgtaatgccgatgtgccaattatcgagaaatctgaaggtaaattaagatggattcttttggatgaagcgcataccttgacgggatccaaagcggctgaaatggctttgttgatcagaagagttatttcagctttcaaagttaatattaaggatgttcgttttgccattacttctgcaacagtcggaaatggaaattctgacattttaaagaaatttatgtccaatttatgcggtatctcagaagatcagattcaagtgatcactggctctagagtaaatgactttccggatacagatattccaaatatttctgaaatattgaacaaaactcaaattaaaaatttgagaaaccttttattgaatacttcaggattgaccaattcagaaattggaaatcgtttaggtcttcaaagtagagcagatcagattgaagcgatggacattcttgcggatcaaaaaataaatggtaaaaaccttctgccattgcgaggtcatttttttacaagaggaattggtggtgtttatgtttgcaccaataacaattgtacagaaccggatattcccataaaagctttgggcagaatgacaaccgtagcagaaacacattgcaattgtggctttccaatgctggaattaattgcctgcaacagctgtggtaatatgatgctggaaggagaactgaaaaacagtgttgtctctcaaaaagcaagcagcggatacgaagcttttcagattgatggggagaatgaagatgaaacttcaaataacaattcttctaaaactgtaaggtttataaaaaataatagcagagaaagattggttaatagaaacttgatacaatgttcaattaatcaggaaggaaagataatctatgaaaatgaaaatctcttaaaaattgatgacttcaaatgcccacattgcggtaatcaaactgaaaattcaattcatttcaggatttcttctgcatttaccaatcggattctttcggatattgttttagatcaaacgcagcctgcttcaagtttaacaaataaaactctttacaacggcagaaaatacatttcgtttacagacagccgacaagggactgcaaaaatttctgccttgattaatatcgatgcggaaacagattggatcaggtatcaagtttatcatttgatgattagaaaacttgcgcagcagacaaatagattttctaatgatcagctcctgcaagaaagggcgtacataacaggacaattggaaactgatattcctccttttttaatagccggattgggagccagattatctgaaatagagaatttattatcgaatgaaaataacgtgaatcattcattgacccgaacgaaatggcaggatatcatcgataaaatgatgacagaaaacggattcaaaacattgtttataaaggctgcaaaaggaaaagattttgaattggatggtaaaatatatgccaaaggtttgttgtacagtcagtttgcaagaagaatcggtagggaaagatcattagagaatcttggattggtcaatattgtttatccggaattggattctgtcattttaccagaggaagcatcgttgctgaacatcaatctgcaagaatggaaaactttactcaaaattgcggcggattatgttattcgtgatggtttcaactttacttttgatgacaggatgcgtctatttaattcaaaattataccatcctaaattaatctacccaagcgcatccgcgcagaagaatagctggaaattatataaagcagattcaaaaacgcaaccaagatttgtcctattgatttgcgctggtttaggatggtacaaccctgaagatattgatgcggtaagagaaagtcagctaaatcatttactagaaaaaatctggaaaaccttgcaggaaaagattcttaccaaagatggagacggttataagctggatttttttacccatacgcaacttgagattgctggcaaagaagttctttgccctgtcacaaacaggcttttagataatacttttagagattatacaccttggataaaaggttcgctgagcgaagaaaatattcagaattacaaaatccaaagtcagacagatattcagatgcctatttatccgtatccatttcatttgtcagatcagaatgaagatttacacgatgatattattaatagttggattgaagaaaataggctagaagccagaaacaaaggtttgtggaatgatttgcacgagaggatatttgataaggaaaaactatatctagcaggagaacattctgcacagcagaaaaaatcccgattggtagagttggaagaccagtttgaaaagggagagatcaatgttctgagctgttccacaactatggaaatgggagttgatattggcggaatctcggcggttgtgatgagcaatgttcctccaatgccggccaactatttgcaaagagccggacgagccgggcggcgcgcagaaaacaaatcattggcgctcactttttgcgcacccaatccaattggtctgagaacgatggctcagccaaaatgggctttggagcatcccatcgctccacctattttgaaatttgacagcaagaatattgttttgagacacaccaattcattgttatttgggctcttcatccgaaacaatgcgaacagaggattgaacatcaaagaaaatatagaaaaattctttctgggagagcaacccaatcttggacagaactttttgaattggctgtctgatctttctgttgataattacaaagatgacctcgtatatctgataaaaggaacatcacttgaaaatacagatcccatccagttgaagttctctgtttacgataattttatgaaaaccgcaagaggggttacaggacagtttacaagctttgaagaaaagcttagaatcttgttggaaactgatggagaaaatagtgcagcctataaagccataaagtaccgcaaaagccagtttctgaaaaaacatattcttacctacctagcagaaaatgggtttttaccaaatgctggtttaccaactggcatcgtagattttgaaaaaacagtttatgatgacattaaaaatgataactcgaaagtaacagaaaatccaagttatccgcttactagtgcattgacggagtttgcgcccggcaacagcgtgttgatagacggactcagctatatgtctgccggaatcataatgaagaataattggggacaagagggagaacgaaatgcagtacaggcttgcaaaaattgtggctaccaaagaatcatttccttaagtaatcaattaaatgataattgcgatcattgctacgctacagattcattaattggtatcgaccttggagaatatcgtggaaagctgacagaattggtggagcctgtgggatttgcagtcgatcttttcaaaaaacctacgcgcgtgatctcggaaaaatctaaaccacaatatttagagccactgctgttgaatatcaagccttggaatcaggatcaaagcagtattgtagatgtacgttctacagatgatgacagatcagaaatcttgttttacaatatgggagatggagaaggttacagcctttgtaccagttgcggtagggtagaaactgctagtgataagttagttggtcacagcagactgcgtggtggtaaaaataacgatggcgaaagtttttgcgatgggaagtcaaaagaccacatcattttaggagccagattcaaaacagattttacagaaattcgccttttgaatagagaaggacaaagagtaaatgacaagacgttgatgtacactttgggagtcgtcttcacaaaatctttggcagaatttcttgccatagaagaaagtgaattaggattcggaatcaaaacttacagcggctatcaaaccatttttatctacgacacagcaaaaggtggagcaggctattcttctcagttttctatgtacaccaaagaagtactcacgaaagcttaccaggctttgggttgtgattgtaacaaagcctgcacaaaatgtttgatagacagatcttcccaatggcatttggaagatttggatagaaatgttgcccgtgactggcttcggtttgctaatgaaaatcaggtgccgaaaaatttacaaaatacaggactttctatttccaatatttttggaacattgactaatgaagtcatcagcctgcaataccatcagggcgtgaaagagatcaacatccatatcaacaaccaagtttctagttgggatattgataaattatacgatctggaagaattcaagagaaacagaatcaaaataaatctgattatagaaggcagtttagactgcaataaccatcaggaaaaactctctatccacaagctggaagtaggatatcaattaaaaaaaggaatcgaagacaaaatagcagattatcctgttcacttttctgtaatattgaatgacaatcagtcgatttcttatattgctgaagctgattatcctttcttggtaggcgatattttgaaaagtagaagcattacatattataaagtgggaggtcagcagttagcgaattatgcagactgtatattgcctactttcactgccaatatctttgaagcaagagtgggatcattgccttttaattccgatagcaatgatcttgtattagcaatgtttaataatcttgaaaacaaagaggatttgatggacaaaataaagaacagaaacttttctgtagattattttgataagtacaatcagtctgaattttctatgcggttagtcttgcagttcatagatcagattaaaacgatttgtgagatcaaaattgatgatttcaaaattcatttatccgagaacgattttagaagtaacagagaaccatattacattatagataattacaaaactattgtcgattatgaaaatcatttacagcacatctcgcaagactttgactttaatatagatctggtaaatgaaaatcgtttgcctcattacagatttttccaatttaagaatgatgaggtgtcttttagcataaggatagacggtggaatttcccacggtctgaaacctataagttttctgaaatctgaagatatggaattggaaaaccttgtttttaagatcaaaaaagacattactcacgatatcatttacaccataaatattggataa

SEQ ID NO: 28439 - DNA, 3024 bp, Epilithonimonas lactis
atgagcgaattcgataagatcttaacgtccagaaatattcaaaagtattctggagatccattatggaaatttcagttgtcaaataatgagtttagtcaattgaaaacatctttttcactcagtgaaaataaaaataagataaatccggtagattgcgcattgtattttgccgaatggtggaagcgttgctacaacggcggaaaaccaagcaaggaaatcatctttcaatcattaggaatcaacctcgaatctgtaatcgactgcgatgaattctacaaaaaagccaaaataggcgcagaaatactcggtgtaaaatggttgaagaagcaaaatattttatttttcagaacattacttctgcagggtggacttccaattttgcatatttccgaaaatcaaggaagttacaaaaatttccttttggcagtgctagaagagcaaccagaatcgattgaagattttatgtttcaaccacaaattattaatcttttacccccttccagcagaaatgatattgtttatgaaaactgtttggaaattgtaaaatcaattctgaatgacgaaacaacttacgatgatcttctaaattctaatgttgcaattaaaaaaataaacaaggagctaagggaaagaaaaacgcatttacaaaaaaagcaacgagcttctaaaattcagaattactggattctaaacattgatcccaaaaaactaaaactaagtctacgtctgggtctagcagatagttacacaaaagaggtattggaacatattttaggtttggaaattgttgagaaaagcaatcattttttcatcaatgatcaattggtttgcgtttttcaaaagatgctaagcggaaattacaaaacagagtggaacaaccgccttgctcaggaatggacaagggatactcttttaccaaattgctacataatagtcaataataacagatttgaggtaaaagattttataaccacagctccagatttttctgaacctagtttgtgggtgccattttctgataatgaatggcggcttataaaaggtaactctacaagtagtgaaattgcagcaattttatcccccgaaagttggaaatcaaaacaggagcctgaattgtttaatctattcgacacaaacttcaattggataaaatttgaaggtcagacagaaataagcaatgagttttatacaagacattttatcagcaatgtatcttcttttgattggacaattgtaagtcaaatgccaaaatggatgtttaaggccaagatggttgttgtacaaaatgtacccaaaataattgtttataatgatcaaaatgaagctttaaaaagtagcgattatgaagtttttatcaagcataaatcattcgaaatttggaaaactatcaacgaattgaatcatcttccgcttggctgcattgatgtgaaaattgtaaatgaccaaactacagcttatgattgtttctataatattggaaatctcagaatagattactccaatcagaatatttcttcagcagaattatcttgttcaaataacaattttgatttcaaaattaaagaaacaccgatcttgaaagtctttgaacaaagtaaaaatcgtgcgtataagctttctgtagaaacgaaatttaacaaaattccaaacagcatacttgcgagtttaagaataggaaattccaaaagtctgcattttgagattgtttgtccgtttactggaattactttaatagatcaagaagggaaaataattcttgaggaatcacaacttacatttaatcatttgcacggcatcaggattttgagcgagagtgaggaatctgttattataaaatttaaaaatattctaagaccagaggttataatatccaaagaattacggctaaaaatacaacctttgatttattttaaagatgaacttctgcgtctgtatttcttggcagatgctatgaaccacgaaaatatgttgagcatcgagcttgaaaaaaatggcgtctctaaacaatattttctgaaaggctttacacacactttgaatgtagaaaatcaatttcagggaaaactgaacttgtggaattccgaagatgatttgtccttatatgcagttccgctcaattgttcggcagaaaatattagcctaattcctttgttaaaagaatcggaagattacaaaataccgaaaactaactttacaaatcaatacatcattatttcttcttacgaaaaaaacagacatctgatgcctagatttgtgagcacagataatcaattcaaaagtctccaaaagaatgaaagaattgagttgtaccatcataagcttgaaacttctgacttcaaatctgaaatttggaaagagatattggcttatttcaatatctgtatcaatcaaaatattccattttcaactttcgatcagttgagagctgtttctcggagttcagctgtcgcatcgagagcgtttttctttttaggaattaatcaaattaacacagatgaatttatacagaaaatgattccagaattagaaacagatttgggattttgcttccactggattagaaaagatgattggcacgatgcaattaatgaagttgctcaatttatcggagaagaatatttcagaaatgtgattgcattattttcgaattatatgaatgaaaatgacttgggcgagatgattcaatttttgaatggtcaaagaatttttacagataaagtttataatcctttcattaatcaaataagatctgatttaggagagcgtgttttgaaagaattaccagatatgaaacctaatgtaaatgattattataatattccaaacaatgagtatggtaagttttttctgctgatcaaagcaccaattgccgtggcagaatctataaaaaatgtccagaaagaatttcctatttggggcggaaatgattttcgggagcagattaggaggaatattcagtacgcgcagtatctatctccagaattttacaacagaataattttacaagtattatcgcaaaactaa

SEQ ID NO: 28440 - DNA, 5970 bp, Erythrobacter sp. s21-N3
atggccgctagtgacgcctcccagttttcacgcttgtctccaatggaggtccaccagcggttgcggaccggtcttgccgaagcggtcgtttcccgggccggcatccggcatgaaggcctcaatgcttttctccgacgaaacctggccggaacagaaccgcagcagggtggtcttctgtccgagcaactttttcaggcggccccgggctacgtgtcgtctggcaaacgccctgaccaattgcagacgctcctgcacccgcgaacaatcgatgcgatcagccaaacgccagtcaccgacctgcgcttcgattatgaggcctatgcacaccagctgagcacctgggagctcttaagctctaaagacccgcaatccgttttggtttccagcggcacgggctcggggaagaccgaatgctttcttgttccgatgctggatgatctggttcgtgaagcggcaacagaaggtccgcttaccggggtacgagccctgatgctgtatccgctcaatgcgttgatcgcgagccaggaaaagcgcctgacggcctggacaaagccgcttcgcggcgatgttcggtttgcgctctacaacggtttgatgggaacggcacgaaaatccaatcgcgacaaggccgaacacgagatcccgcaccaggtcctctaccgcgaaaccctccgagccaaccctccgccgatcctcgtcaccaatcagaccatgctcgaatatatgacgatccgtcgtgaggatcgccaaatcctcgagaagtcccaaggcaagcttcgctggatcgtcattgacgaagcgcacagctatatcggctcggcagctgcagagctttcactcctgctccggcgtgtgatgaacgccttcgaggtcactccggatcaggtccggtttgtcgcaacgtcagccacgatcggatcggccgatgatgagaaggcgcgagaagatctccagagatttcttgctgacattgccggagttccgctcgaccgagcgcatgtcgtggtgggtaagcctcagccggtcgacctatcaaaggttctgactgcgtccgatgatcccgccgcccagtctatcgccgaaaagctcgagcgagaaccgcaaactcttgcttcactcagaaccctcgccccaaacgccgggcaggtcctgctcgacttgtccgcgcacaatgcagcagaggcaaagcccgtcctgccgatgcgtgcgcatagttttacgcgggcaatttctggcctctggacttgcatcaatcccgattgctctggtgaagcgcggccaaagggctggccgtttggcactgtcctgttcgagcagcgggatcaatgcccgcactgccagtcattggtgttcgaaatccagaattgtctcgattgcggcgaaccttatttgccggccgacgacatgggtgaccgaatccttcctcgtggaagcgaccacgatgccgacgaatttcgtgaggacagctaccgggagcacgatcatgatgatgctgatgacgatgatgccgcaaggcacgagggagttggacatccgcggttgatagccatcaatccaaaagccgatgcgaaggccaccggcttcgatgttagcagtggcgaattcaccggggaggctggcaacttccacctgacgcagctggatgaagggcgctgtccttcctgccttggcaacaagcggcgcggtcgcccagcggttttccccttccgcttcggcaccccttttttgacgcagaacgccgcgccgatcctcctggaaggtgtctcaccgcatgaggcggagcatgcgctgccgttcgatggccgtcagctcatcagtttttccgacagcagacaaggtactgcacgcttcgccgcgaatgtcgaaacgaatggcgagcgtggttttgtccgcggcttcatctaccacgctgttcagaaggctgctcatggcggtgatctgaccgaagagcgcagagccgagctactcgaaaagcgggaggcgctggctcgtcttgtgaacgacatgccggcctttaaggatgatatcgcgaaaattgacgacgagctctgtggcacgggtgccgcaggagtccggtggcaggacctcgtgcctgcgctcgccgccgagccggccattggcatgatggccaaagtctgggatctcgatcgcagcgaacgctttcatgataaccgcgaggcgctcgcccgcttcatgcttttgcgcgaactcgcccgccgtccccgcaatgccaacgcaatggaaacgctcggacttgcgcggttgcggttcccggacatcgaaagaattggtcaggacaagctaccgccaatcgtgcgcgagaagggctactcgatcgagcactggcgcgatttcctgtactacatggtcgactatcttcgtggccagttcgcccttgaggttgatgacggcgacgcacgctggatgcccggacgggctcggccgcgaaatgttatcggacccgatcagcctccaggcgaaaagcgcgacgcttcctggccgaccgtcaattctaagggacggcagcccgatagcattctcattgttgcagccgctctgagccttgacctctcttcggatcgcggccgtcatgagattaatcagcttttgcgtgcggcctgggatcagttggcgccccttctatccggggttggcgggacttacagcctgcgcctggaaaagacggccgagatcgaggctgtcagcaaggcctggcaatgcccgctcacccgccggattttaccgcgactggtctttggtaaatcgcccaatctcatcagcgcggggaagatcttcgcgagccagcccgctatcgaagtgcggctcccgcgccttccgcaaacaagaccactttcgactgaacagcgagaggaaataacggcctggcttggtgccaacgaacaagtagcgacccttcgcgagcgcggcatctggatgaactggcacgatcaggcagcgctagcgacgccatatctgcgagccgaagagcacagcgcacagcagcctcctcaacggctgcgcgaattcgaggagcagtttaaagtaggcgacatcaaccttctggcctgctcgaccacaatggaaatgggcgtcgatatcggttcgattgaagctgtgctcatgaccaacgttcctccctcgatcgccaactataaccagcgggccggccgtgcgggccgccgcggacagggcttctctaccagcctcacgatcgctcggaatacaccgctcgatctcgaaaccttcgccgatccggcaggctatctgcggcgcaaactggcctctccgcgcgtatcgctcgattctgaccggatcgcacagcgtcacgccaacgcttacctgctcgcggagtggtttcgcgaagtcgacggtgaattcgccaagacaaaaactggcgatttttttggctgccgctcggacctccgtccatttgaaggccgcgctccggtcgacgccttctgcgagtggcttgagcttccggcgacaactccggccaccaaaaacgggctcaagcggctcctcaagggaactggcctagagtacgacactgagatcagaaaacacacggcggacatgttcgccgatgaaactgggaacttccggcgcacgtggcagcgcctcaaggaggatggggacgcgctcgagggtccggccaagaaggcgatagaattccaggcccggcgcctctgcaaagagttccttttgaaggaacttgccaatcgttcgcttatccctggcagcggcttcccgacatcagttgttccgttcgacaccctttgtgcagaaacccaaaaggcgcaggagcgcaatcgatcagacgatgaaggcgcccgcgaccggcgctatgaatgcccgacacgaaatgccgacatagctattcgcgagtatgccccaggggccgaggttgtcgtcgacggcttggtctggaaatcagccggggtcactcttaactggctgagcccgatcgatagcggtcatcgcgagccccagaaccttcgttgggcctggtggtgtgatcattgtggcggcgcaggaagtgatcaccagatgccggatcactgtgatcattgcggtgaacaggcaatcaacatcgagcagtttctcgatcctgccggattccgcgtggactggaatgcgcagcctcacgccgatactgatcaggcggtttatatcgaaccaaagtctcccaaggtcagcgtgggtgatgctctctggcagcctttgttgcagcccgaaagtggccggatccgcgcttcacacgaagggtatatctatcaccattcgcgcgggcctaaagacaagggctacgagatttgcctcgaatgcggacgggccggggatgcggggactgatgctcttaaagaccacaggccgcttaccccgagaaacaagaaagcgatggatcgctgccccggcaacgacgagggctatgcgataacaggggccctcgctttgggtcacgaagtcctcacagacgttatcgaggtccagttgccaggcctggaaagcgatggcgcggcctgggcgtttggcgcagcgctgcgcgagggtcttgtgcgctggctagggatcgagcctagggaactgggaatcgcggtggcagccagagatggtaagcttggccgcagagtcccatcggtttacctgttcgatgaagcgtccggcggtgcaggatatgctccgaggcttcttgatgatatctatcacgtcttcgagcgagcggctaaagtcctcgattgcccgaatgagtgtgagatgggctgttctgcctgcgtgctttctgccgatctctacaagcaacagggtaaactcgacaggcgtgctgcactcgttgcagtccaggccttccttgagacgaatgccgaactgccagaggaagatcgggctgttgcagatgcaaggcccatcaatgatgcggcaaacacgcttctgctgaaagcaggcggcggagacatcatctcgatcttcttgccgtcgtcgttcgatctggctgagctgacatcaaccaagatgcggtctttcttctcggcagcctcggcacggggattgcctgtcacgctggtgctcgatgcgaagtcgtttgaaaacttggaagaagttgagcggcgattcctgcgcgatgcttcggtgcgcttcgagttcgctcttggtcttgcaaaagcagagggcggacccttcgatagcgttcgcctcgctgaactgaaatcgggcgaccgcgtgacagggttcttctcgcgcgatgcgaacgctgctcagcccggtgaactctggggcgtaggcgaaacgcacgcagtggttgccggtagtcaggatagccatactatttttgagccaatcaacccagaggatctggagcgtcaggttgcagcgggagatcaggtggagctgatgcaagggtttggccaatgccctgtgggccagtttgggaaacgcttcggatcgaagttgaaactgcaaatggaggcggctggcgtctggaagcctggcagtcttgtgcggatcacctacaccgaccgctatcttaatgcgcctctgcccatgcttctcttcctgcggacatgcgaagctctatctgcggaccttaaggcgagtagtccggtcgaagtcgacattgtcgtccagccactgaaaaaggatcggccacctcatcggatcttccatgactgggagtatgaagacgaccgggcggaagtcgccgagatgttgggcgaaaagtttggcctcgatgtcgatcttcaggtcacggcaaattcgggccacggccgcaagctcgaacttgaatacgccgacggtcagaaggtcattgtgctgctcgaccagggttttggatactggcgcatagcaggtagcccacctcgccacgatttccgcgcggcaccggccgttcaggccagcgcactgttgcgctcaacttctgcggtttccggggtaggcgagagctattttgctgtgaagagagatccgaagtga

SEQ ID NO: 28441 - DNA, 3297 bp, Erythrobacter sp. s21-N3
atggacggtcgcgactttaagtcagaaattgacgcggcgcgcggcgatccagcagcgcttcggagaattgcgcaggacatccaggatgccggagcgtctcgcctgctcatgattaaggctattcagctagcgcgggcggcagatagtggtccgcatccgcttggaaagatctgcggcgagcttggtttaccacggcccgaaggcgtacccctttaccgttacaaactggctccaggcgttttcgacaggatcgagaaaaagctcgtttcaaacctgcattcagatctgatccgacccactctggctgctgcatttgtcgtctgggcggccgactggtttcgtcgatcctatcagggcggcacgcagcgctggagggatatcgaaggcgcgcttgggctttctttaccgcaatcggaatggcgtgatcttgcggaccgcggttttcgcgcgtggaagatagatccgctggttactgcgcatggcaatcagcgcctggccaatcttgcgcgccatggcggatttcctgctgccgcgatttccagcggagcaaattggccccgccgcttccttgaacgagctgtcggcgagcttctcgggtcggacatccaggatatcacaaccgcggtggggatctgcgaacgcaacgagtatctgctcccgtcaatctggcgtagccaggaaatgcacgcgatttgcggagaactctctctaaagatcgtggagttgcgcgcattcgttgataaggcgctgccgtcggacgggcggccttattcggcccgcctcgacctagcttatgaagactggcgcgatgagcttccgatgacgcttgatggagcagcagccggccttatcgacacacttttggaggcccgaacgcttaccggcacagggagcattcgtgtagaccggttgatgcgtctttccggcggcgagtggcgtgagtgcctcgacttccatctcaacggtcgttgggaagacaaggatggcagtcttgcggtcgatgatagtgttcgagtctttctccagccctcaggtggccttgcagaccgcgtttcgggtcgtctcgcgtatctggagttcgaatccgggaactgctggattgcccgcgccatgcgaagcgagacagcaatcgagtatccgcttgaccttgccgtagcagctgagtttcactcgcgcggtgagcgcctgtcccgcgaatttattctgcctggcggaaaaccggtttcgaatggattacgcgtctttgaacgccgccgcggagaaaatgacgacggcgtattcgcactcatcgggcaaggatccggtagctaccgctcagaagtggtcttcatcgatgtgccgcatgactgggcccttcgcggcaaagacagcaatgccgaaattgagcctgaagacttcgtgtttgcagccggtcgttcgctttaccgctgtgccggccagattatcgccgaaaagccgaatggcgatacatacctggtccggacagggcagagcgtggacaggaaggatcgcctgacaatcgtggccgataccgcttccggcgtacaggcgccaagtggtgagcggctgttgaagcatccgttgcacgcacaggtggaagatggcgtttcgcggcggtccggatcccgcggggaagtgtgctggcgtttcgttggagagaaatcctggcgtgaagatctggcaagcgcaggtcctggcgcttgcgaattcgcctggctcgacggttcgacgagacatgtgcgcgaccgtgtcaccgccgttgtgctccccagcgaattcgcgctgtcccaaaggataaatgcatttcatgcccaaatcactctggagggatggaccgggaaggccacactcggggatgacgcgcatgatgttgagcaccagtggacagtccggatcgatccgcctcgccgcgctttgcttccactgcatctcgttacaccacagggttcggctctccagctcagcgttccgctacgatcaaaagaatggcttacgacttggggtggagagctgctgaagcgcgatgcggtacttggtctggccgatctgcgcgatactgtcgcccgagcgccagcgagtgctgtcctgatgggcgaggttgcccatcacaccggagcatcgcttgaagtgagctggaaactcgatggcgaactgggcctctcggctctgcggaacgacatagcggcacttatgcgaccgctcggtattgatgcacaggtcaggctcgactttcataatggcagcaacgacaactggtatgtgacggagttcgggaatgtcctggagtgggagccctcgggagggtggcgaccgaggactggcattgtcggcgaagctgtgcggatctgcggccgtttcttgggggcccccgagaaggaaatcgactacggcggctttgacggattgaatgtgggtttgggcgggcagctcattcagctcccacgcctgcgtggcccatggctcatatacctgcgcgaaggctcgcgtgtcctgaccaggcccaagttcattgacggcgatcctgtccacgaccttccccagcacaggctcgggcgtgcaatggcacagccaattttactggcgcgcgaagagctcaccctgataacaaatgatatcattgccgaccctgcctcgcccgaagccataaagactatcagggctgtcatggatttggccctttcactgaacggcctgcctccacaaaccttcgagatattcagcaagttcgatgccgctggccctcttgcgcccctgcttctctatcgctgcgaggagcagcatctttcaacgattctcgagctgttcgacgggctttgttcaagctggacacttctccccatcgaagtctgggacgcggccttccaggcgcagggcgcctttttggtaagcaggcttgacgaccctcaatgggcattggccaacatctcagagcgccagaacgaaattgccgctcgggccccgcaattggcgccgctgatttgccgcgattattcgccgctcgcgtatgaagcggttcgcaagcatttcacgagccatacgagcgagagcatcaatatcggtgccgccgggttcaatcccttccgcgttgattttggccacatgctacccaaggaaaacttcgtcgaaggcctgatgcgggtcttcgatgcaccttttgccgccgccctttcgacttttggttctgtcgttctcgacaagaaacagatcctgaccgtcaaggacgtcgagcgacgccaccctgattatttcgcaaaagcctatggctatgccctcttggagcttaaaaatggccgctag

SEQ ID NO: 28442 - DNA, 5967 bp, Erythrobacter sp. SD-21
atggccgccagtgatcccctccctacatcccgattgtcgccgatggaggtgcaccagcggctgaggactggcctcgccgaagcggttgtctcgcgggcgggtatccggcacgaagggctcaacgcttttctccggagcacgcttgccggtacggatccagcaaacggcagcctcctttccgaacagctttttcaggcagctcccggctacgtatcctcaggcaagagccccaaccaacttcaagcgctgctgcatcagcgcacaatcgacgcgatcacccaaacatcggatactgatctacgcttccattaccccgcctacgcgcaccagctggcgacgtgggaactgctcagcacgcaagagccgcaatcggttctggtttcgagcggcacggggtcgggcaagaccgaatgtttcctggtcccgatgctcgatgatctggtccgggagtccgcagagcaaggtcctctgacaggcgttcgggcgctcatgctctaccctctcaatgctcttatcgcgagtcaggagaagcgccttacagcatggaccaagccgctgcgcggcgatgtccgctttgccctctacaacggattgatgggaacggcgcggaagtccaatcgcgacaaggccgagtacgagctaccgcatcaggttctgtaccgcgaaaccctccgggctaacccaccaccgatcctcgttaccaaccagacgatgctcgaatacatgacgatccggcgcgaggatcgtccgatcctcgatgcatcaaaaggcaagttgcgctggatcgtgattgacgaagcgcacagctacatcggctcggcagcggcggagctctcgctcctgcttcgccgggtaatgaacgcattcgatgtgacgcccgatcaggtccgcttcgttgcgacgtcggcgaccatcggctctgcggacgaccagaaggcccgcgaagaccttcagagattcctcgccgacattgctggcgttccgcttgagcgggcgcatgtcgttgtgggcaaacctcagccggtcgatctctcgaaagtgctgacagcatccgatgatccggcagcatcgtcggttgccgagaggctggaaggtgagcctcagaccctggcttcgcttaaagcgctctcgccggacgccgaaaggattttgctcgatctgtcggcccataatgccaacgaagcgaagcctgtcctgccgatgcgagcgcacagcttcacgcgggcagttgccgggctctggacctgcatcaatgttgattgcccgggtgagatgcggcccaaggattggccatttggtgccgtactcttcgaccatcgggaccaatgcccgcattgccagtcgatggtgttcgaaattcagaactgcctcgattgtggcgagcccttcctcccggccgatgacatgggcgacaggatcgtaccgcggcgaagcgatcatgatgcagatgagtttcgtgaagatagctatcgtgatcgcgatcatgatgatgacgatgaagaagatgagcacgaggggatcggccatccacggctgattgccatcaacccgaaatccaaagcgaccgcgaccgctttcgatgtatccagcggcgagtttactggcgaggcgggacattttcatctgacccagctcgatgagggacgttgcccggcctgtctcgggaacaagcggcgcgggcgacctgccgtcttcccctttcgctttggcacaccattcctcacccagaatgcagcaccgatcctccttgagggtgtgtcgccacatcaggcggagcacgccctgccgttcgatggccgtcagctgatcagcttttcggacagcagacagggaactgctcgcttcgctgccaatattgaaaccaacggagagcggggctttgtccgcggcttcatctatcatgccgttcagaaggctgcccagggtagcgacctgaccgatgagcgcagagaagagctgctcaagaagaaggctgctctagcgaaccttgtggcagacatgcctgccttcaaagatgatatcgccaagatcgacgcggagctcgcgggtggcgctgcaaccggaatactctggaaggacctcgtgtcagcgctcgcttctgagccggcgattgggatgatggccaaggtctgggacctcgatcgcagcgaacgttttcacgataatcgggaagcgctggcccgcttcatgctcttgcgcgaactcgcccgtcgtccgcgtaacgccaatgcgatggagacgcttggtctggcacggctccgtttcccggatatcgagcggattgacccggataagctacccgagcttgtcggccagaagggctattcgatcgaagattggcgcggcttcctctactacatggtcgactatcttcgcggccagtttgcaattgaagtggacgacggtgatgcgcgctggatgcctgggcgcgcgcggcctcgcaatgtgatcgggcccgaccagccccctggcgcgaaacgcgacgtctactggccattggtcaacaccaaggggcgccagcccgactccattcttctcttggcgtcagccatgaaccttgaccttacgtcgcagcgcgatcgccatgaaatcaatcaggtcatgcatgccgcctggaatcagcttgctccccttctgtcgggtgttggtgggacgttcagcctgcggctcgagcaaaaggccgagatcgaggcggttgatcgagcttggcaatgccccctaacgcgccgcgttctaccgcgacttgtatttggcaggtcacccaatcttgttgggtctggaagcaagattgacggcaaagcggttttgcctgttgagtttcctaagctcccacgcacgcgaccgctctcgtcaggcgacaagaaggagattagaggttggctggttgaggacaagctagtccaagcccttcgacagttgcacctttggacctatcttcacgatcaggcggcactcgcaacgccttatctgcgagccgaggagcacagtgcccagcagcccccgcaccgactgcgggagttcgaggagcagttcaaggaaggcgatatcaacctgctcgcctgctcgaccaccatggaaatgggtgtcgacatcggttcgatcgaagccgtgctgatgaccaatgttccaccctcgatcgccaactacaatcagcgggccggtcgtgcggggcgccgcggacagggcttttcgacaagtctcacgattgcccgcaatacacctctcgatcttgaaacgtttgccgatcctgcgggctatttgcgccgcaaactcgcatcgccgcgcgtatcgcttgattccgatcggatcgcgcaacgtcacgcgaacgcctatcttcttgcccaatggtttcgcgaagttgagggggagtttgcccggacaaagaccggggatttcttcggctgtcgtgctgaccttcgtcctttcgaaggtctcgctcccgtggacgccttttgcgaatggctcgatctaccaacaacggcatccgcaaccgaagaaggtctgctgcggctgctcaggggaactggtctcgaatacgacaccgaaatccgggggcatacggcggagatgtttgggcaggaagctgggaatttccgtcgtacatggcagcgcctaaaggaagactcggacgcgctcgaagggccggcaaagaaggcgatcgagtttcaggcacggcgattgtgcaaggagttcctcctgaaggagctcgccaatcgctcgcttatccctgggagcggttttccgacatcagttgtcccgtttgataccctctgtgccgagacgcagaaggcgcaggagcgcaatcgttcggaagaggaaggcgcacgtgatcggcgctatgaatgcccgacgcgcaacgccgacatcgccattcgagagtatgccccgggggcagaggtcgtcgtagacgggctggtttggaaatcggccggggtcaccctcaattggcttagcccgatcgacagtggccaacgtgagccgcagaaccttcgttgggcctggtggtgcgaccattgtggtggggcgggcagcgatcaccagatgccagaccagtgtgcccattgcggcgagcgaagcataaacattgagcagtttcttgaaccggccgggttccgggtcgattggaacgcccagccgcatgccgacaccgatcaggctgtctacatcgaacccaagtccccgaaggtcagtgtcggggatgccccgtggcaacccatgctacagcctgagaccggccggatccgcgcttcacatgaaggctatatctatcatcattcgcgtggccccaaagaccagggttacgagatttgcctggagtgtggacgggccggggatgccgggacggacgctctcaaagaccatcggccgctctcgccgagggaccgaaaggcgatagaccgctgtccgggcaatgatgaaggttatgcaatcacgagcgcacttgcgctgggccatgaagttctaaccgatgtcgtagagctgcaattgcctggattggaaagtgacggcgcagcctgggcgcttggcgcagcgttgcgcgagagtcttgcgcgctggctcggcattgagtcgcgcgagcttggaatttctgtggcagctcgagacggcaagctcggtcgcagagtgccgtcggtctatatcttcgatgaggcatctggaggtgccggatacgctccgagacttctcgatgacatctatcatgtcttcgaacgggcggcccgtgtcctcgattgccccaaggaatgcgagatggggtgttcggcctgcgtcctcgctgccgatctctccaagcaacagggacgtctcgaccgccggtctgctctcctcgcggtccaggcgtttcttgagacgaatgctgaactgccgcaggaagatcgtgcggtccccgatgccagagcaatcaatgacgcggcaaacacactccttttgagagcgcgaagcggagacagcatttccgtcttgttgccgaccgtgttcgatctggcagagctgacttctaccaagatgcgcacgttcttttctgccgcctcggcccgcggcgttccggtgacgctcgtgcttgatccaagttcttttgataagctcgaagaggtcgaacggcgctttttgcgcgatgccgcggtgcggttcgaattctctttggccctgggtaaaggggaagacgcgcctttcgagagcaagcggctggccgaattgatttcgactgatcgcgccacagggttcttctcccgcgatatgtctgcgacgcagccgggtgagcgctggggcatgggtgagacgcatgcgattgttgctggcactctcagcgaccccaccgcctacagcccgatcaaccctgaagatctagagcgacaggttgcggctggtgatcaggtcgagctgatgcaaggtttcgggcaatgcccggttggccaatttggcaaacgctttggctcgaaactgaagcagcagatggaagcggctggtgtttggaggcctggcagtcttgtgcggatcacctacgccgaccgctacctgaactctccgctgaccatgctcctcttcctgcggacgtgcgaagctctatccgctgacctgaaggcggatagtcccgttgaagtcgatatcctggttcagccactaaagaacgatcgtagtccttatcagatcaaacacgattggacttatgaggatgaccgagcggaagtagccgagcttttgggagaaaaatttggcctcgatgtcgatcttcaggtcacgcaaaattccgaccacggccgcaagctcgagcttgaatacgtcgatggtcaaaaggtcctcgtgctgctcgaccaggggtttggatattggcgcatagcgggtagcccgccgcggcatgactttcgttcggcacccgctgcgcaggcgagtgagctcctacgctcatcgactgcggtcgccggcgttggggaaagctattttgcagtgaagaacgtcagggccaattga

SEQ ID NO: 28443 - DNA, 3300 bp, Erythrobacter sp. SD-21
atgggcgatcgtaacttcaagcaggaaatcgacgcggccaaaagcgacccggttcggctgcgcaagattgcggatgacattcacgctagcggcggtccgcgtatcctgatgatacgcgcgatccagctggccagggcagcagatagcggaccgcatcctttgggcaagagctgcggggatcttggtttaccgcgcccgactggcctcccgctttaccgctataagctcgcaccgggaatttttcagcggatcgaagcgaagctttccgccaatctcgcatcggatttgctgcggccgtcgctagctccagctttcgtcatgtgggcggcagactggtttcggcgctcctaccagggcggcatgcagcgctgggccgatatcgaggcggtcttgaagctccaactcccgcaatcggaatggcgggcacttgcagaccgcggtttcgatgcctggggcgttgaacctcttatcacggcgcacggaaaccagcgtctctccaatctcgcgcgtcatgggggctttcctgcagcagcaatcgcaggcggtgcgagctggccgcgccgcttcctggagcgggcagtcggtgagctgctcggggcagacattcaggacatcgctaccgctgtctcgatctgcgaacgcaacgaatatttgcttccctcaatctggcgcagcccggaaatgcacgcaatctgcggggaacttgccctcaagatcgtcgagcttcgtgcattcatcgacaaggaagtgccagttgacggtcgcccttattcggcccggctggaccacgcttacgaagactggcgcgatgaactgccgatgacgctcgacggggcagctgcgggcctcattgatacgctccttgaagccagaaagctgaccggaacagggagtatccgggtcggacggttgatgcgttcgcaggatggagaatggcgcgaaagtctggatttccatctcgaaggtcgctgggacgacaaggatcgtgcgctgtccgcaggtgaatacgtccgggtgtttcttcagccctcgggtgccttggcggaccgtatctctggtcgactggcttacctggaggttgaatcaggcaattgctggatcgcgcgcgctatgcgcagcgaagctgcgatcgatttccccttggacctctccgtcaccgccgaattccatgcgcgcggcgaaagactcgctcaaagctttttactaccgggcggcaaagcggttggggatggactgcggatatttgagcggcggaccggagacacggagctaggcgcgttttcccttatcggtcaggggtcgggtggttatcgcgccgaaccagtctttgtcgatgtcccgcaggattggatgcttcgcggcaaggacagcaatacagagatcgaatccgaagactttgcctttgcacctggtcgttcgctctaccgctgtgctggccagatcatcgccgagaagcccaatggcgacgcatttctggtgcggacggggcagagtgcagatcgtaaggatcgcctgaccatagtcgcccaagaggcgaccggtgtgcaggcacccggcggcgaacggttgatcaaacatccgctgcatgcagaggtcgaagacggggtttcccggcgcactgcaacgcgcggagaggtcggctggcggtttgcaggggaaagcgcctggcgcgatgatcttgtcaacgcgggccctgggcattgcgagttcgcctggctagatggagcgaccaagcatgttcgggaccggacgagcgcactggttctgccggccgaattcgcactcagccagcggatcaatacggcccatgcggaaatccttttgggtggttggaccggagaagcggtgctcagcgatgaaacgccgattgcggaccgtcgctggcgggtgcgtgtcgatccgccccgtcgcgcgctgctcggcttgcggctcacccccgaccatggctccaccttcgaactcaatgtgccattgcgatcgaaagaatggctgaccacctgggatggtgaacttctcaggcgcgatgctgtcctaggccttgccgatcttcgtgacaccgttgccagtgcaccgggccgtgcgatgctgatgggcgaagttgcccatcacgctgaagcgtcgcttgaggcaagttggaaggtcgatgtcgaactgggcctgtcggctctgcggaacgatattgccgcgttgatgcggccgctcggcatcgatgcccaggtccggctcgacttccacaacggcagcaatgacaactggtacgttacggaattcggcaattctctcgagtgggaaccttcgggagggctgcgtccaaagacggccattgtcggcgaggatgtccgcgttggcggccgctttctaggtgctcccgagaaagaggtggatttcggtccgtttgacggattgcttggcggcctcggaggacaattgattcaactgccacgattgcgcggtccatggctcgtctatctgcgcgaaggttctcgcgtcctcacgaggccgaagtttatcgacggcgatccggttcacgacgttccgcaacacaggctcggccgggccatggcacagcctcttttgcaagcgcgcgaggacctggtgcggctggcggaggaactcgctgccgagcccatgtcttccgaagcgacccagaccattcgtgcagtcatggacttggcgctgtcgctcaatggcttgcctccgcagaccttcgaaatcttcagcaagtttgagattgccggtccgcttgcgccgctccttctttatcgctgcgaagagcaacacctctcgacgatcctcgagctgtttgatggcgtatgctcaagctggtcccttttgccgatcaaggcctgggacgctgcctttcaggcgcagatcgggttcttgctcgaaaagttcgatgaccttacttgggcaatgtctcacatctacgagcgtcagaacgaaatcgcggcccgtgcgccgcagcttgcgccactcatttgccgggacttctcgccgttgagctgggaagagcttcgcaaccatttcacgagccatacaagcgaactgatcaatgaggatgttggcggcttcaaccctttccggcctgcttacagcgagctactgccaagagagaacttcgtcgaagcgctgatgcgggtcttcgatgctcctttcgccgctgctctgtccgctaccggacatgcttctctcgagaaggagcaagtcctcaccatcaaggacgtcgaacgacgtcaccccgactattttgccaaagcctttggctatgccgtttcggagctcaagaatggccgccagtga

SEQ ID NO: 28444 - DNA, 6315 bp, Escherichia coli
atggacgttcagcaactgcattatgcgccacttctaaatcagcttcatcagcgtgcggtgaggtcggtggtaagtcagttggcattgcggagcaagtcgttgactcattatctggaatcacaatattttcagcctcccggtcaggaggggtcactgcttgcagacccggtattcgaaagtacattcggctggatgcctgcggatgaaacaatggaggatttgcgggacaagctgatctccagcccgctggttgatgcattgagcaaagcgccagtgccatttcgtcatcaacttactgcgtggcgaacgattctggaagacaaaaaatccttgttagtgagcagcggtacgggatccgggaaaacagaatgctttatggtaccggttctggaagatcttattcgtcagcaaaaatcgacccgccagtcactaacagggacacaagctattttcttgtatccgttaaatgcattaattaacagccaacaggagcggcttcgcgaatggacgcgcggatttaaggggaaaatacgcttcgcgctatataatggcgaaacccggcataccaaatacgaaattcaggaagatcagttgaaagtacctgaacaagctttgagtcgggaagccatttatgaagcaccaccttccatcatggtgacgaataccaccatgctggaatatatgctgattcgtcgtaaagatgccccaatcatcgaaaagtctcaggggatgttaaagtatatcgtcctggatgaagcccatagttatattggttctcaggctgctgagttagcgctgcttttacgtcgtgttatgcaggctttcaatgttggacccggcacagataaacctgtgcagattatcgcgacctctgccactattggtgaagactctcctgaaggtaataaggagcttgctaaatttgtcgctgatctcgcgggcgttacagaacgtgatgtcaaagtggttcgcggttatcgacaaataccgcgggtatcggagtcgctgattcgtcatgaataccccacatctttaacttctcttaaatccctgagccctcaggatctttaccaacagctttgtcattaccgtgtggcccagcaattgcgtcaggcgttaactcatcccggacggcaggcagtacgtttgagtgagttgctcaatgttgccagaagaacctggccagatattaatcaccgtgagctactgcaactcctcgatctaatggcaagatcgcgagaaggtgaactggcttttacgccattacgtatgcatgggtttatcagaacactggcgggtctatgggcatgttcaaacaaacaatgctcacataaagcacatgaattaaatcagagtgactggccatttggtcaggtatggtttgagcagcgccaatattgtgactgtggagcgccggtatttgaagttttacgttgctccgggtgtggttcagcttatttgtctgccaaagaggagatgcgcggtgatggaacgaactggttggtagcgcaaccagccgctgccgaagtggatgagtttgctcttgatgtagatgtttattctgaagatgaagacaacgacgaattagacaataactctcaatttgatcgtctgattgcgagcgatggtgaaaaatatatcatttcactggaagaaacgacggcggggaaaattgatagtgaagcgcaaaagcactatgaaataaacctgttaagaccggaatctcgaggtgagggacgcaataactcctttgcttgtgtttgctgtggtgacactcaacggaaaaataatcctttattccgtccgcttcggctcggcgcgcccttttttttaaatgaaattattcctactctgctggagttttctccattaccgcaaacaagagaagagcagttaggaccgtttaatggtcgacgcttgctcacctttacggattcgcgtcagggtaccgctcgcatttcagcccgcttacagcaggatgccgataaagcgacgttgcgagctctttgttaccaggaactggcaaatattacagagccttcagcaaaactcagcccggcacactgtgcactgttagagaaagttattagccagttttctgtcctccctttaaaaaattccatcgacgcgctgaaaaaagcgatggctgcgaatgaggagcttagcccgacggacattcaggcacttaaaattattgagccgatggtgagttccttaagcacggagcatgctgaagcgatgcaaatacttcaggctaactctggcaatcagcagaagaaaaccatgtcatggcaaacgctgtctgaacagctggttggcagtgtggaccttgccgatagaatgagaggcagttttaaagaattgtctgggcttgatcttactaaacaacagtttgcagatttttgtttatacagcgagtttggtcgccgccctaaaaatgcctggaccctcgaaagtctgggtctggtagccattcactatccattcattgataaagttacaacctgcccgcaggactggaagacattattacccgatcccgataagcaattagcggaatggcgtaatttattgaagattactcttgatttctttatccgtgaaaacagtgccgttttttacgaaaacgagcaataccctcgctggatgggggcacgtttcccggtaaaaatgctccaggggccagataaaaaaaacaaagggcagaaacgtgatcaactttggccacaaatacgcgatcgccattataaccgggtcattaagctattaatcgcagtctttccggcaatacaacctgagcaggctcactggaaatcgttagttaaccacttaatgattgaggtctgggatgcaattcgaccctgcttacgtcagtttgagtcgggttatcagctggatattaaacaacaagctgaattttacagtccaaagcaagtgtggcgttgcccctatactcgacgtgcgttagacgtcacgttgctgggatactctccgtatttgccgggtagcaaagaaattgcacctgaaaaagcagtgttgattgaaatgcctgagcttcctgtacgtcactggcgtttgtctggtggtggagaaatcgcccgagaagaacgtctggagtggctggaaagtaatgcgctgattcaacatgcccgcgaggaaggattatggtctactcgcagcgaccgactggccctgaaagatagctggtatcgtctggaggaacactctgcgcagagaacgcctgagcagaaccagtttaatgaaaaacaatttaagtcaggcaaagttaatgtgctgaactgttccacgaccatggagatgggggtggatattggtggtatgagtttggtggcaatgaacaacgttcctccagcgccggcaaattatttgcaacgtgcaggtcgcgcggggcgtcgtggagagagtgcatctgctgccattacgttatgtaaaaacacggcgcatggaatggaggtattcaaagcccccctctgggcgttcaacactactgccagtgcgccacgggttcgttttgggagcagtagcattgttcaacgacatgttaatgcccaggttttaggtctgtttttacgagctgaagttcctgatgcgacaaaactgagttgcaaatggttctttgaaggtgatgagagccagtgtcttcgttttcttcattggttaaatcaccaggccgatgagctggcggataaacttaaacgccttactcagggaaccgtcctgatgtcattgacggcaacccagctcttgacccgcacacaagcaatgatgcagcaggttgatatccgctggagaagccaacttgcgatactgttggaaaatatcgaagcgttgaaggcggataacagcgcgtgggaagaaacgccagcaggtaaagccatcgcttatcagcttcgtgattatcgcggtgcatatctgttttctaaactcattagtgaagcgttcctgccggggcatggtttcccggttggcgtagtcaatttcaattatctgacggcagatgagctggaaaaacgtcgcgcaataaaagccactcaggctgaccctaatgaagggggagaaagcttttctcgtcgtattgaaaaattgcccagccgtgatttgcctacagcattacgcgagtatgcgcctggtgcagatgtggtattgggcggaaaagtatatcgttcctcgggcattatgcttggcaaggtgcttgccagcgggcaggagctgtcaggcgatcatcatattccgtggttctggcattgccgtaaatgtggtgcgggggcaaccagtactacccatcctgtcgaatgtagtcactgcaaagcggatatacagcaacttgatgtgaagcgttatttacagcctgttggttttgcgacagatattcgttatcaggcacataatgatgtatccatgcctgcacaacttccctggaaagatccacgtgttcttgtaccgtcttcggtgtgggtttctttacccgatgctgggctaggacgttaccgttttagccatagtggggaattgttccacttcagtgaaggggaatttgggcacggctacgcaatttgcctctcatgtggtcgggcagaatctcaaactcaaccccagcgtacccctgaaaatctaaagaacccagagcgggaaaatacgcattacctgttgcgagggggcagtaacgatcgtcaggggagcaataaattgtgccacggtcatgtgcataaagatctgtggttggggtatagcagtcgtacagatatggttgagctgcaacttaatgatgataatggcctgttgatccgtgatgaggttgccgcgcgttcccttgcggtcgctttgcgtgaagggttagcgcataaattgggtatcgaaaatactgagctgggcgtgacgacgcagcaagcgcgcgatatcaatggctataccggatattccatcttcatatacgacaataatgcgggtggtgcaggttatgcagtgcaattgatcgaccattgggctgatgtctttaattacgccagaaaattgctcgattgcagttgcgataaattttgtcaccactgcttgctcagctacgacagtcagcattatgtcaacagattagatcgtcaccatgcattaaccctgcttaccaatgtacggttgcagcgacttaacctcgcgccagaatatcagtacttcggcgatggtagccgggttgaaactaaccctctgagtttacgtattgcgcaatgcctgaacagcgagatttatgactcctgctcgctggttcttgcggggccgcaggaacagtgggactttgcccaatggccattatttaaagagttgctccagtttgcctcctccggtgggaatgttgagttgctggtggccacgccgctggaaaacttaactgatagctccagacatcagctttccgcgttggcggcgatgccgggaggacgcttacaagtgaaatccattgccactgcgcaactcatgcaaggaaaggggcgctggcttgcgcaggtgactcgcaaagggcaaagccaacagtgggccgcagacgacagcgctaccgttgcccctggtgaattatggggacaaagtgcgtcttcaccagtagtgacacttaaaggaacgtccggaaaaaccttctcgggtcagaccttaagtgcagaagatttactgcccgccttacccaccggggcggtgcgcatcaatctctgtgaacaactggacgggccgctggaaggttttggttcgcgtttctggtcgttagtcacgcaacagcacgctggctggaagcaggcatttacccgccacaaagagataacgcatgttgagtacagcgatcgttatcttaatagcccattcacggcgcgtttgttaggtgaaatcttaaccgagctggttgaacagggaatggcggaacgcgccagcctcactgtttgcgtcaaaaaattggattacaactctcgccaacacgacgctctctataacgcgtggcttaatgaggaagatcgtcagcaggttgtgaccactttacttgaagaaggatatctggggcctgcgtggccgggagcaattagctggttaacgggggataaccagagtacggagcatggacgagaactgacagtcaccttcagcgatggcagtcagcattatgtcctgctcgacatggggcttagctactggcgctgtattgaagataccttctttgattttgccctgcgagtaccgcagcaagttgaacggctggcaaacacgcgagcgcgagctgttgccccgggtaatgaccttaggagttatattatcgctggataa

SEQ ID NO: 28445 - DNA, 2937 bp, Escherichia coli
atgattgaaaatgagagcggttatttgattacctatttcagaaggatatatcaggcgcttcgtgggcaatcatctcaatatcctgccgctaaaattgcacaagaattaggcgatacgattcctgtcacaatgcaaaacgaactggtctatgaaatagccggtgaattctgcgagactctctgccgattacttagtgagcatcctcctcatagcagtgatcccgtttctgcattacgtaagctctctccagactggcatcttcaacttccactcgttctccccgaagcgaatgctgcagagattgtaaggcgattactttctcaatcttctgaaatacgcagtgcaagtagtcttcaggttgaaagaatctgggtcgatgttgatgacagttggtattgcgatgcccggttccgattcccggccacaatgcgtacagaacagttaacctctttgtttgaatgccatattcagccggagcagacccgactcatcatttcaggaaaatggaaaaatggcggggcaaggttggcaatgctaagccgttatgagcagcaagattggcgggtcgagttattacctattgcgatgcaaaaactctctggtgcagatgcaatggccgaaatctcattgtcgcttcatgaaggtccaattctgttaggtcacacaattccaaaaggcggttatgaacttactgaagaacttccctgggtttttgaagcgatgaatgagagtgaatcgcagctaaaacttgttggtatggggtctgtgagttccaggctaaatgctctgtttatttcgctaccgaaaaatagccatttagatattagtggagaaggtgagtttgatatcccaaggttgctgaaaaacagtgaacgcagcttaactaaaataagtggagtatttagcgttgttttacatgatggtgctgtttgtacaattcgcacccagcaactttatgattctgcgattgaatattatattaaatcgacagaagttgaactggttaaatcggattatcctgtccatcgagcctggccgaagatcggttggaaaaaggatctgcaatatggcattgtaccggagaaagaacttttttggcgttccattcgttcaggtaataatgcctggtattctgtcgcatcagaaatgccaaaaggacagatagaagtccggcgaatagttaatgatgaggttttatttagcggtaaagttgtagttttaccagcagacttcgatattaatattatacctgagagtgctcagcaaggcattattatgctttctggtataacggatactagaattgataaatattcaaacaatgaaaaagtaacacttaagtccgattattcacaaaacgagtgtgctatttattataattcatcgctgatgctggaaaataccgttgatttacgggtctcctggaaagatggttctaatcttaaactattattacctaagccggttagcggtggccgatttgtaactaatgatggttctgttcattttgatggtgtggcatctatagcacatttgcatggaatagatgctgagttattaaccatatcatgtgctggaagaggatatcttaatatcgagttattggatgaaaatccagtagctgaaaaattccgctatttacatgccgaccttcctcttttatcaggacgcaatgacaaattacaacaaatttcactttatgagaactataatttgctaaatgctatgctggcatgtgcatggaacagcaatagtacattatgtgttgatttttactctgacagatttggaaaggataaagcaacactcaatattaaacgctacgatggtagttttattgaacacgatcaagggttactggttgatataaaaaattctgttgtttttcctgcaaatagaatagacgaactggttgttgatgctatttctcttaagaatcctggcttacacatatcattgttaaaaaaagatgagtttgcttatgatctttcagctctgaatgttcaggatagtccatggttaattgtgggaaaacttgatggtacagctcgcattgcaccagtaattaaatggatgctacctgtattgcagacaaatgatttattactaaatgctctatgcgaagcagacccagaacagcgcaaaaaaaattttaatgagctaatttttgaaatagataacaacccattgcaaaattattgctgtttattaacagagtatattaagaaatacaaaatgaataatggcttatccttgctggatctggacttgttcagaggtatttcgagtaattaccgcgtggttgttcaattgttaatatcatcatgtctttctggtgatagcgatacgatttatgatatacaggaagaattacccttttcatggggatggattcccgtttcaatctggaaagatgttttccaaaaatgttggacttatctggagaaacagattaacgataaaacattagcattacatatattgcaaccctttattgcttttatgaaccatcgtgcacatatcgatcgtcggctggctccgattgcgaatatgttacttacatatagtgagagcctaccaaccggttgtgatgtattgccaactgttagtcgtgagcagtttaatgaagctaaacagatgctattaaggaaccccgacagctttgggcgtatcagtatcttccctaaagaactttggtctagtgctattactccagagttaaaatctgtttttaataagctttggattgaagataaatatcactcacggcttgaaaaacgttttaatttgatgttagtcgcagcgctgttaacccaaaaagataataacctgatacatcaactgtctgcgctttttgaatttcactatcagcaagccccacagcaattaggggtaatctatcaatattattttgaacaagcaggagtatgtcattga

SEQ ID NO: 28446 - DNA, 6345 bp, Escherichia coli
atgactacacgctatttttcgtcacttattgaacaatcgttgtctcgttcaactgaagcaacgctcagtatcatgggcgttacaaacccgcagttgcgtgaacatctcgcgcagcaaatgggggctgattgtgggaaaccgggctcattccttgcttctccggtattccagcaaatgtttggctggaaggagtcaaaccacacgatgcgcagtctgacggaaggcaacgcattgttgagcaaagcagtggttgattcactggatgatcagagtaatggccggtaccgatttggtgctgactggaagccttttacacaccagttagccagttggaaagctttgctggaaaagaaacattcagtggtggtaaccagtggtacgggttcaggtaaaacggaatgttttatggtaccggtgctggaagatctttaccgggaactgcatgaaaatggcaacaatccgttggtcggtgtccgagccctttttctctatccattgaacgccttgattaattcacagcgcgagcgtctggatgcctggacgcgtggttttggtactgggatccgctactgcttgtataacggaaatacagaagagctccacgcaaaaatgaaaacagtgcaggataatagaccaaatgaagtcttatcccgtgaaaagatgcgtctggagccagccccgattctggtgaccaacggcacgatgctggaatatatgatggttcgccaggtcgacgccccgattatccagcaatccaaagcacaaaaatcactacgctggattgtactggatgaagcgcatacctatgtcgggtcgcaggccgctgaactggcactccagctgcgtcgtgtgatgacagcgtttggcgtgacgccagatgatgtgcgctttgtagcgacctctgcgaccattgcctgcagcgacgccgaaaagcagctgaaaaaatttctctctgaattatccggtatcccgcaggagcgcatcgatgttctggacggaagtcgggtgattcctgaactggaaccatccaaaaacgtttctgttccgttagacgaaatagagcaaatacctgatctggatctaaaagataaaaatgataataaaattaaagggataagccctgagcgcttttatgcgcttacgcactcccccgaagcgcgttacatacgtgaaatgttggttagccaacccaatccaatgaaactggatgagatgacgcagcggttaaatgcgctgacaaaacagcattacagccagcaggaagtactgcgttggatcgatgtctgttcagggactcaacctaatgcaaaggatcccgcatttcttaaagtcagggcgcatatcttccagcgtaatacccaaggaatatgggcttgtgttgataaagattgcagattaaagcacggtacaccgctcgaaaaaggctggccctttggctatgtgtatgtgaaccagcgacaaaattgtgactgtggaagccctgtatacgaagttgcattctgtaatgattgtaatgagcctcatcttctggcgcaggacaaaaagggcaaacttgtccaatgggaaaataaaggtggcgatgagttctccttgcaggatgaagtacctgttgaacatgacactacagaggaaaaagtcgaaaaagagaacggtttcctgcctccgttgattattgccgcaggagagaccagcgagacaggctataccctacaacgcctcgaccaccagacgcgccgtattggcgttattaacaatgacagcattccgctgattattaatgatgttgaacaggtttgtagcgccagtggctgtggctacagaggcatgagtgggaaacagcccttccggcgtgcactattaggtgggccattttacgttactaatatcgtgcccaccgttcttgagtattgtcaggactttaccagtgatgaaggcaaagagggcgtcggaccagattcgttgccagggcgaggacgtcgactcattacctttacggacagtcgacaaggtacagctcgaatggcggtgcgtatgcagcaagaagcagaacgcagtctcttacgcggaagcgtagtcgaaattctgagctggcatcaacggacgcaaacgtccacggcgccgaatgccaatgccgatctggaaaaattagcggccagggcaaagcaagcccgtgagcaggcagaagaatatcgaagctggggaatgccagaccaggcgaaattgtcacaagcacaggctgaacagcttgaacaggcttatcaggctgcaaccggtggaaaagcagcaactaccctggtatcccgcacctggacagaaatggttaacgagcttaaagataaagccgatatccgtggcccggtactgaaatataaccactatttgcagcctgaagtgtttaataaaaacggcgggccactaaagctttcggaaatgttgttgttccgggaattcatgcgtcgccctaaacggactaacagcctggaaacacaggggctggttcaggttggttaccaggggctggagaaaatacataagagccccttgcactggcaggaaaaaggattaacgctggatgactggcgcgattttctcaaggttacgttggatctttatgttcgcgaaagcaacttcacacagctggatgatgagctgaaaaactggattggtagccgtttttcatcaaaattcgtccgtaacccggaatcaaaagatcctgaagataatcagaacagacgctggcctcaaattcgtaatggcaacgtatcccatcgtttagcgaagttactgatgctgggggctggattcaaaaccgtcaatacggcgactattgatattatcaatacatggctgaaagaagcatgggcccaacttaccggaccacttgcagtactgaaacccgatggcaaccgtttttatttaccgaaagagcatatgactttttctttaatcacggatgcctggatttgcccggtaaccaataaaatcctggatacggcttttaaaggcttaaccccttatctgcccacccatatttcgttcgagcatcttacccaggcgcaatatgacacttttgtcgcgcagaaagtcaccatgccggaaatctggaagctggatcgttcacaggaagactacgcagagggtctggcaaaagcacgagactgggtcaacaatgatccgctgatcgcacaattgcggtcggaaaacgtctggacagacatcaacgatcgtgtagtggaaggcggtttctactatcgcactgccgagcactctgcccagcagtcgtcagaacgcctgcaaagctatgaaaagatgttcaagaacgggcaactaaatgttctcaactgttccaccaccatggaaatgggggttgatattgggggcattactgcggtggtaatgaacaacgttccgccacatccggccaactatttacagcgcgccgggcgagccgggcgtagtaaagaatcacgcgcgatctcttataccctatgcaaaggtaacccacacgaccagcaggtttttgccaacccactctggccatttgaaaccatgatcccggcacccatggtcgcgatgaactccgcccgactggtgcaacgtcacgtcaatgcattattactgtctgactttttatgtaacgttattggcgaaaccgataaagagaaaaccagcctcgatagcctctggtttttcggtgaagatgacgggcagtcaaaatgcgaacgctttaaagtctggctggaacgcccggttcttgatatcgacacggcgctggaacggctggtgaaaggtacggcgttgcatggcgcaagagccgaacatctgcgggataaaacaatcaatgcgatcaccttcctgcaacagcggtggctctccgtttatcgcgatctcgtgacccaggagcgtgagtcgcagccgcaaacgccttatcgtaagcgcatagagctggagaagaaacggcactgtggcgagtatctgctgcgcgatctggctgccagaaccttcctgccgggatacggtttcccgacagatgtagtgacgtttgataacttcacgatggaagattatatccgcgaaaaatcgcagaaaagtcgtgataaaaaggaccgtgaagataacgtctcccgttataaaggattaccttcccgtaacctcggtgttgccattcgtgaatatgcaccgggagcagagatcattcttgatggtcgtgtcttccgctctgccggtgtctcactgcactggcacaacattaatgctgataccaatgaagcccagcgtctggattgcgcctggcgctgtcacaaatgcgggaccattggctatgaagaggggatgagcagttccgggatgctcttttgctccaacagcgcctgcggcgaaaaaataaccatggataatcgccgtcaggtgttgcagcctgccgggtttgtcaccgatgcacacgctccggtaacgaacaatattgaaaccatgaaattcgtcccggttgtccccgcgtgggtctttgttaaagcagagcccgtaccgttgcctaacccgctaatgggttatatggcttctggggctgatgggcatgttttccagcaaagtttgggggaaggtggacacggttatgcattgtgtctgagctgtggccgtgcggagtcgatgctgaatgaaaatgatgcaccgaaaagtatggaagctcactatccaccgcgtccgggtaaagcggaccgcgacagccagaatcatcgtctgatttgccccggttcgacggcactcatgaagaacgtcaccctgggcgcactggcgcgcaccgatgtctttgaaatggttctgcgcaaaccgcaaaacggcgagtatctgccagataacacagaagaggggcggattgtcgctatgactctggcggttgctctgcgtcaggcgctggcaggcgttctgggtatctccgccgcagaactcggctattctgtacgtccggtcagactggaggatgggcaatcggtattagccgttcagctttatgatgtgatcagcggtggtgctggttttgcctccagcgcaccggtacatattgaagctatattgcagggaatggtgaaacagttaggctgccgccattgtgatactgcatgcagtgaatgtctgcttgattcccagactcgccacgatcacgatttgctggatcgcaaagtggcgctggcttggcttggcgatgacttcacgtattacatcggtttaccggatgaagagacattctcgctgccggatgcccgctactgccctggcgctattggcgatacgattcgccgggcgattaacgaaggcgctgaaaagctcaccctgtggatgactggcgcgcccaatgagtgggatttatacgcccgtcagttccgcgcggctattcagagctatcggctaaaagacaacgtcgaggtcgatcttgttattcctgcgggagtggatgacccagacctgttgcatgaactatcgcaatttactgcgctgggtgtgcggttgtgccatgttgagcaggagctgcaattaccgattgttgcccaggtcacctttgccgatcgcgtgatgacgctggcctctcgcagtcagcaggcaacgattccggggccggagtggcacctgaatgacgaactggtggtgcgtagtctcggttatcaaacggtagaactgaacgagtttattctgcccgctaaagccgccaacgctgtcgagcgggtcaaagacattcagatccacaaacagttgaatggaccactttcgcagtttgggcaacgcttctgggacgtgctgtttaacgaccatgaagaagcgcagtcactgatgaaaaacacgcgaattaccggcgttcactataccgatcgctatctgcaaaacccggttgcgctggcgttgttgggatcaattctgaaaccgctaaaaacaaagctgaccgatggcgctgaagtggcgctggatacgctgtttaaagataaagatcgccccggtaaccggcctttccatgactggatgagcatagcggattttcaggatttcgctgatcagtggtttgctgctgcgctgggcaggccgatagaactgacggtgttcgattcgccgcgcgatatccctcaccatcgtaaactgacggtgacttttgaggatggtcaggtattgaagatccgcttcgatcaggggatgggctactggcgcatcaactttgcatcgcaatggcattactttgatttccgcgatgacgtttctttccagttagtcaaaatggctcaggcctgcaaggaagggaatgtggccaacagcgaagagagctgggcaacggatgtgctggtggaggtgatcgcctcctga

SEQ ID NO: 28447 - DNA, 3291 bp, Escherichia coli
ttgggtcaatcagaatacatttcatgggtaaaatgtacttcctggctaagtaactttgtgaatcttagagggttgagacaaccggatggacgtcctctttatgaatatcatgcaaccaatgctgaatataaccaattaacgcagctactctgtgctgttggtcaatcacaatctaatatatgtaatagagactttgctgcctgttttgttcttttttgctctgagtggtaccgcagggattatgaacggcaatgcggatggacgtgggaccctatatataaaaaaatagggatttcattcaccgccacagagcttggtactatcgtaccgaaagggatggaagattactggctgcgcccaattcgattttatgaatctgaacgacgtaattttctcggaacattattcagtgaaggtggtttacctttccggctactcaaagaatcagacagtcgctttctggctgttttctccaggatccttggacaatatgagcaagcaaagcagtcaggtttttctgccctttcgctggcaagagctgtcatagaaaaatcagcgctgccaactgtttttagcgaagatacctctgtagaacttatcagtcatatggctgataacctcaattccttagtacttactcacaacctaacaaatcacaaagaaccagtacaacagcttgataaggttcaccctacctggcgaagcgagtttccaataccgttagatgatgaaacaggaacgcattttttgaatggactgctatgcgcagcctctgtagaggctaagcctcgactacaaaaaaataagagtacgcgttgccaattctattggtcagaaaagcatccagatgagcttagggtgatagtatctcttcctgacgaagtttcctttcctgtaactagcgagccgtcaactacgcgctttgaacttgccatttatgaagatggtgaggaagtctctggccttgggccagcctatgcttccctggaaaacagacaggcaacagttcgattacgtaaaagcgaagtgagatttgtcaggcaaaatccatctgcaggtttgtcgttagtggctcgtgctggagggatgattgttgggagcattaaacttgatgacagtgaaattgccattggtgaggtgccgttaaccttcatcgttgatgcagatcaatggctgttacagggacaggcctcctgcagtgtgcgaagcagcgatgttctgattgtgctccctcgggacaatagcactgttgctggttttgatggccaatcgagtgcagtaaacgtattaggacttaaagcgctacctgttaagggatgtcaggacgttacagttacagcaaatgaaacttatcggattcgcaccggaagagaacaaatcagcatcggaaggtttgctctaaatggaaagcgtgcaagctgggtttgtcatccagatgagacatttattggtgtaccaaaagtcatttctacactaccagatattcaaagcattgatgtaacgcgttacctgagcggaatttcaattgagcaatgtcatatacaagagatgctaggggctcaatatctttctatccgtaatagtaataatgaaacgctcttgcgtcgcaaaatcggtatcttgcctgctgatttcagtattgagataaaaggtggaatgcacgcaaatgaaggcactatcgtaatcaccacacagcatccttgtgtagcaacacttaaagataaaacattggaggctacacgtaagcgtactgaggggcgaacagagatacaactcaaagcggaaggggtacctccggcatttattacattacaagttctgcctaatttggcggctgataccatcgacattgagttacctttcccagctaaaggctgccttgctcttgatgtaaacggacgtcctctggataaaaacattacgctgcatgatctgctgggttccagagcattcctgttctccagaaatggtgagccgacaaaatatacattgcagttgcatttgcgctccattagtggattacaggcatggcacgaatggagttatacggcattgagcgagcgtcctgttgaattgaatctctatagtctacgtgaacacattgaaaatctgatttcacttgaggcaggtattgatcaggttgttgagatgcgtattacgggggcgggtgtggtcatggcctggcaaattcgtcgctataaatacagcctgcgctatgattatgaaaaagaactattactcagccagtcagtgaaccatcgtgctggacagattccttcccccgttatcatgctgttaagtgaacccgagaggaaatccattcccttagcatcaagaatgagcgagggagtgcctgtcggtgaatatgagttgagctcaatcgttaacaaaaacggaccatggttggttgttcctaaaccgggtgaagagatggcttttcgcccctgcttcattcgtggcgaatcttcgttaccggtagaagaaagcaacatccgctcattgcagaaagcgacccagctttttaatccacaggcagaagttaataccatcacacgggttctcggacagatggctaacgatcctgcccattccggctggcaatttatgcgtagcctgtacgatcaatttggttatttaccgctggcaacctttgaagtatggcgtgcactagtgcagcatccgcaggcattggcgatgtcgctcttcaaattcgaaatgtcagcagagtatctgagtcgtattgagaatgagttccctattttatgggagtttttccccatctttgagatcaaagctgcatctgagcgtttcaaattgttcctgagccaaaaaggtgcaccggaggaaacccagaaattactggttaccaatatgtttcaacggctggggctcgtgttcccgacatatgccgatgaaattgagaaatggttaagtaatggatatctccccccgtctattcctgaatcttgtgtccacgggtggtatcaggagctcttacgtgagcacagtgaagctcgctggcctgaatacggctgcaagcgtctgtataaatggatgatgtcacaaaaaaatccagtgattggtattaatcctgacgcaaatcaccgctattccgtggcctggttacccgtcttcgccgcagcggtggcaagcggaaatgcttcttttgaatctgtatttgaccgtaaacccggtgccgtatttttcctgaggcaagtcagggatttcgattcccgctggtttaaggccatcttccagttcagcctgttgcgttatgttgctaaaaaataa

SEQ ID NO: 28448 - DNA, 6345 bp, Escherichia coli
atgactacacgctatttttcgtcacttattgaacaatcgttgtctcgttcaactgaagcaacgctcagtatcatgggcgttacaaacccgcagttgcgtgaacatctcgcgcaacaaatgggggctgattgtgggaaaccgggctcattccttgcttctccggtattccagcaaatgtttggatggaaggagtcaaatcacacgatgcgcagcctgacggaaggcaacgcattgttgagcaaagcagtggttgattcactggataatcagagtaatggccggtaccgatttggtgctgactggaagccttttacacaccagttagccagttggaaagctttgctggaaaagaaacattcagtggtggtaaccagtggtacgggttcaggtaaaacggaatgttttatggttccggtgctggaagatctttaccgggaactgcatgaaaatggcaacaatccgttggtcggtgtccgagccctttttctctatccattgaacgccttgattaattcacagcgcgagcgtctggatgcctggacgcgtggttttggtactggaatccgctactgcttgtataacggaaatacagaagagctccacgcaaaaatgaaaacagtgcaggataatagaccaaatgaagtcttatcccgtgaaaagatgcgtctggagccagccccgattctggtgaccaacggcacgatgctggaatatatgatggttcgccaggtcgacgccccgattatccagcaatccaaagcacaaaaatcactacgctggattgtactggatgaagcgcatacctatgtcgggtcgcaggccgctgaactggcactccagctgcgtcgtgtgatgacagcgtttggcgtgacgccagatgatgtgcgctttgtagcgacctctgcgaccattgccggcagcgacgccgaaaagcagctgaaaaaatttctctctgaattatccggtatcccgcaggagcgcatcgatgttctggacggaagtcgggtgattcctgaactggaaccatccaaaaacgtttctgttccgttagacgaaatagagcaaatacctgatctggatctaaaagataaaaatgataataaaattaaagggataagtcctgagcgcttttatgcgctcacgcactcccccgaagcacgttacatacgcgagatgttggtcaaacatcccaatccaatgaagctggatgagatgacagagcggttaaacatactgacaaaacagcatcacagccagcatgaagtactgcgttggatcgacgtctgttcagggacccaacctaatgcaaaggatcccgcatttcttaaagtcagggcgcatatcttccagcgtaatacccagggaatatgggcttgtgtggataaagattgcaggttaaagcacggtacaccgctcgaaaaaggctggccctttggctatgtatatgtgaaccagcgacaaaattgcgattgtggaagccctgtttacgaagtggcgttctgtaatgattgtaatgaacctcatcttctggcgcgggacaaaaagggcaaactagtccagtgggaaaataaaggtggcgatgaattctctttgcaggatgaagtacctgttgaacatgacgctacagcggaaaaagtcgaaaaagagaacagtttccagcctccgttgattattgccgcaggagagaccagcgaggccggttataccctacaacgcctcgaccgccagacgcgccgtattggcgttattaacaatgacagcattccgctgattattaatgatgttgaacaggtttgtagtgccagtggctgtggctacagaggcatgagtgggaaacagcccttccggcgtgcactattaggtgggccattttacgttactaatatcgtgcccaccgttctagagtattgtcaggactttaccagtgatgaaggcaaagagggcgtcggaccagattcgttgccaggacgaggtcgtcgactcatcacctttacagacagtcgacaagggacagcccgaatggcggtgcgtatgcagcaagaagcagaacgcagtcgcttacgcggaagcgtagtcgaaattctcagctggcatcaaaggacgcaaacgtctacagcgccgaatgccaatgccgatctggaaaaattagcgaccagggcgaagcaagcccgtgagcaggcagaagaatatcgaagctggggaatgccagaccaggcgaaattgtcacaagcgcaggctgaacagcttgaacaggcttatcagtttgcaatcggcggaaaagcagcaaccaccctagtatcccgcacctggactgaaatggttaacgagcttaaagataaagccgatatccgtggcccggttctgaaatataactactatttgaagcctgaagtgtttaatgaaaacggcgggcctctaaagctttctgaaatgttgttgttccgggaattcatgcgtcgccctaaacggactaacagcctggaaacacaggggctggttcaggttggttacctgggactggagaaaatacataagctccctatgcactggcaggaaagggaattaacgctggatgactggcgcgattttctcaaggttacgttggatcattacgttcgcgagagcaacttcacacagctggatgatgagctgaaaaactggattggtagccgtttttcatcaaaattcgtccgtaacccggaatcaaaagatcctgaagataatcagaatagacgctggcctcaaattcgtaatggcaacgtatcccatcgtttagcgaagttactgatgctgggggctggattcaaaaccgtcaatacggcgactattgatattatcaatacatggctgaaagaagcatgggcccaacttaccggaccgcttgcagtactgaaacccgatggcaaccgtttttatttaccgaaagagcatatgactttttctttaatcacggatgcctggatttgcccggtaaccaataaaatcctggatacggcttttaaaggcttaaccccttatctgcctacccatatttcgttcgagcatcttacccaggcgcaatatgacacttttgtcgcgcagaaagtcaccatgccggaaatctggaagctggatcgttcacaggaagactacgcagagggtctggcaaaagcacgcgactgggtcagcaatgatccgctgatcgcacaattgcggtcagaaaacgtctggacagacatcaacgatcgtgtcgtggaaggcggtttctactatcgcactgccgagcactctgcccagcagtcgtcagaacgcctgcaaagctatgaaaagatgttcaagaacgggcaactaaatgttctcaactgttccaccaccatggaaatgggggttgatatcgggggcattacagcggtggtaatgaacaatgtaccgccacatcctgccaactatttacagcgcgccgggcgagccgggcgtagtaaagagtcgcgtgcgatctcttacaccctatgcaaaggtaacccacacgaccaacaggtttttgccaacccgctctggccgtttgaaaccatgatcccggcacccatggtcgcgatgaactccgcccaactggtacaacgtcacgtcaatgcattattactgtccgactttttatgtaacgttattggcgaaaccgataaagagaaaaccagcctcgatagcctctggtttttcggtgaagatgacgggcagtcaaaatgcgaacgctttaaaatctggctggaacgcccggttcttgatatcgacacggcgctggaacggctggtgaaaggtacggcgttgcatggtgcaagagctgaacatctgcgggataaaacaatcagcgcgatcaccttcctgcaacagcggtggctctccgtttatcgcgatctcgtgacccaggagcgtgagtcgcagccacaaacgccttatcgtaagcgcatagagctggagaagaaacgacactgtggagagtatctgctgcgcgatctggctgccagaactttcctgccgggatacggcttcccgacagatgtagtgacgtttgataacttcacaatggaagattatatccgcgaaaaattgcaaaaaagtcgtgataaaaaggaccgtgaagataacgtctcccgttataaaggattaccttcccgtaacctcggtgttgccattcgtgaatatgcaccgggagcagagatcattcttgatggccgtgtcttccgctctgccggtgtctcactgcactggcacaatattaatgctgataccaatgaagcccagcgtctggattgtgcctggcgctgtcacaaatgcgggaccattggctatgaagaggggatgagcagttccgggatgctcttttgctccaatagcgcctgcggcgaaaaaataatcatggataatcgccgtcaggtgttgcagcctgccgggtttgtcaccgatgcacacgctccggtaacgaacaatattgaaaccatgaaattcgtcccggttgtccccgcctgggtctttgttaaagcagagcccgtaccgttgcctaacccgctaatgggttatatggcttctggggctgatgggcatgttttccagcaaagtctgggggaaggtggacacggttatgcattgtgtctgagctgtggccgtgcggagtcgatgctgaatgaaaatgatgctccgaaaagtatggaagctcactatccaccgcgtccgggtaaagcggaccgcgacagccagaatcatcgtctgatttgcccaggttcgacggcactcatgaagaacgtcaccctgggcgcactggcgcgcaccgatgtctttgaaatggttctgcgcaaaccgcaaaaaggcgagtatctgccagataacacagaagaggggcggattgtcgctatgactctggcggttgctctgcgtcaggcgctagcgggcgttctgggtatctccggcgcagaactcggctattctgtacgcccggtcagactggaggatgggcaatcggtattagccgttcagctttatgatgtgatcagcggtggtgcaggttttgcctccagcgcaccggtacacattgaagctattttgcagggaatggtgaaacagttaggttgccgccattgtgatactgcatgtagtgaatgcctgcttgattcccagactcgccacgatcacgatttgctggatcgcaaagcggcgctggcctggcttggcgatgacttcacgtattacatcggtttaccggatgaagagacattctcgctgccggatgcccgctactgccctggcgctattggcgatacgattcgccgggcgattaacgaaggcgctgaaaagctcaccctgtggatgaccggcgcgcccaatgagtgggatttatacgcccgtcagttccgcgcggcggttcagagctatcggctaaaagacaacgtcgaggtcgatcttgttatacctgcgggagtggatgacccggatctgttgtatgaactatcgcaatttactgcgctgggtgtgcggctgtgccatgttgaacaggatctgcaattgccgatcgttgcccaggttacctttgccgatcgcgtgatgacgctggcttctcgcagccagcaggcaacgattccggggccggagtggcacctgaatgacgaactggtggtgcgtagtctcggttataaaacggtagaactgaacgagtttattctgccggctaaagccgccaacgctgtcgagcgggtcaaagacattcagatccacaaacagttgaatggaccactttcgcagtttggacaacgcttctgggacgtgctgtttaacgaccatgaagaagcacagtcactgatgaataacacgcgaattaccggcgttcactataccgatcgctatctgcaaaacccggttgcgctggcgttgttgggatcaattctgagaccgctaaaaacaaagctgaccgatggcgctgaagtggcgctggatacgctgtttaaagataaagatcgccccggtaaccggcctttccatgactggatgagcatagcggattttcaggatttcgctgatcagtggtttgctgctgcgctgggcaggccgatagaactaacggtgttcgactcgccgcgcgatatccctcaccatcgtaaactgacggtgacttttgaggatggtcaggttttgaagatccgcttcgatcaggggatgggctactggcgtatcaactttgcatcgcaatggcattactttgacttccgcgatgacgtttctttccagttagtcaaaatggctcaggcctgcaatgaaggaaatgtggccaacagcgaagagagctgggcaacggatgtgctggtggaggtgagcgcctcctga

SEQ ID NO: 28449 - DNA, 3291 bp, Escherichia coli
ttgggtcaatcagaatacatttcatgggtaaaatgtacttcctggctaagtaactttgtgaatcttagagggttgagacaaccggatggccgtcctctttatgaatatcatgcaaccaatgatgaatataaccaattaacgcagctactccgtgcagtcggtcaatcacaatctaatatatgtaataaggactttgctgcctgttttgttcttttttgctctgagtggtaccgcagggattatgaacggcaatgcggatggacgtgggaccctatatataaaaaaatagggatttcatttaccgccacagagcttggtaccatcgtaccgaaagggatggacgattactggctgcgcccaattcgattttatgaatctgaacgacgcaattttctcggaacattattcagtgaaggtggtttacctttccggttactcaaagaatcagacagtcgctttctggctgttttctccaggatccttggacaatatgagcaagcaaagcagtcaggtttttctgccctttcgctggcaagagccgtcatagaaaaatcagcgctgccaactgtttttagcgaagatacttctgtagaacttatcagtcatatggctgataacctcaattccttagtacttactcacaacctaataaatcacaaagaaccagtacaacagcttgataaggttcaccctacctggcgaagcgagtttccaataccgttagatgatgaaacaggaacgcattttttgaatggactgctatgcgcagcctctgtagaggctaagcctcgactacaaaaaaataagagtacgcgttgccaattctattggtcagaaaagcatccagatgagcttagggcgatagtatctctccctgacgaagtttcctttcctgtaacaagcgagccgtcaactacgcgctttgaacttgccatttgtgaagatggtgaggaagtctctggccttgggccagcttatgcttccctggaaaacagacaggcaacagttcgattacgtaaaagcgaagtgagatttgtcaggcaaaatccatcggcaggtttgtcgttagtggctcgtgctggagggatgattgttgggagcattaaacttgatgacagtgaaattgccattggtgaggtgccgttaaccttcatcgttgatgcagatcaatggctgttacagggacaggcctcctgtagtgtgcaaagcagcgatgttctgattgtgctccctcgggacaatagtactgttgctggttttgatggccaatcgagtgcagtaaacgtattaggacttaaagcgctgcctgttaagggatgtcaggacgttacagttacagcaaatgaaacttatcggattcgcaccggaagagaacaaatcagcatcggaagatttgctctaaatggaaagcgtgcaagctgggtttgtcatccagatgagacatttattggtgtaccaaaagtcatttctacactaccagatattcaaagcattgatgtaacgcgttacctgagcggaatttcaattgagcaatgtcatatacaagagatgctgggggctcaatatctttctatccgtaatagtaataatgaaacgctcttgcgtcgcaaaatcggtatcttgcctgctgatttcagtattgagataaaaggtggaatgcacgcaaatgaaggcactatcgtaatcaccacacagcatccttgtgtagcaaaacttaaagataaaacattggaggctacacgtaagcgtactgaggggcgaacagagatacaacttaaagcggaaggggtacctccggcatttattacattacaagttctgcctaatttggcggctgaccccatcgacattgagttaccttttcccgctaaaggctgtctcgctcttgatgtaaacggacgtcctctggataaaaacattacgctgcatgatctgctgggttccagagcgtttctgttctccagaaatggtgagccgacaaaatatacattgcagttgtatttgcgctccgttagtggattacaggcatggcatgaatggtgttatacggcgttgagcgatcgtcctgttgaattgaatctctatagtctgcgcgaacatattgagaacctgatttcacttgaggcaggtattgatcaggttgttgagatgcgtattacgggggcaggtgtggtcatggcctggcaaattcgtcgctataaatacagcctgcgctatgattatgaaaaagaactattactcagccagtcagtgaaccatcgtgctgggcagattccttcccccgttatcatgctgttaagtgaacccgagaggaaatccattcccttagcatctagaatgagcgagggagtgcctgtcggtgaatatgagttgagctcaatcgttaacaaaaatggaccgtggttggttgtccctaaaccgggtgaagagatggcttttcgtccctgcttcattcgtggcgaatcttcgttaccggtagaagaaagcaacatccgctcattgcagaaagcgacccagctttttaatccacaggcagaagttaataccatcacacgggttctcggacagatggctaacgatcctgcccattccggctggcaatttatgcgtagcctgtacgatcaattcgggtatttaccactggcaacctttgaagtatggcgtgcactggtgcagcatccgcaggcattggcaatgtcgctcttcaaatttgaaatgtcagcagagtacctgagtcgtattgagaatgagttccctattttatgggagtttttccccatctttgagatcaaagctgcatctgagcgtttcaaattgttcctgagccaaaaaggtgcaccggaggaaacccaaaaattgctggttactaatatgtttcaacggctggggctcgtgttcccgacatatgccgatgaaattgagaaatggttaagtaacggatatctccctccgtctattcctgaatcttgtgtccacgggtggtatcaggagctcttacgtgagcacagtgaggctcgctggcctgaatatggctgtaagcgtctgtatgaatggatgatgtcacaaaaaaatccagtgattggtattaatcctgatgcagattaccgctattccgtggcctggttacccgtcttcgccgcagcggtggcaagcggaaatgcttcttttgaatctgtatttgaccgtaaacccggtgccgtatttttcctgaggcaagtcagggatttcgattcccgctggtttaaggccatcttccagtgcagcctgttgcgttatgttgctaaaaaataa

SEQ ID NO: 28450 - DNA, 6315 bp, Escherichia coli
atggacgttcagcaactgcattatgcgccacttctaaatcagcttcatcagcgtgcggtgaggtcggtggtaagtcagttggcattgcggagcaagtcgttgactcattatctggaatcacaatattttcagcctcccggtcaggaggggtcactgcttgcagacccggtattcgaaagtacattcggctggatgcctgcggatgaaacaatggaggatttgcgggacaagctgatctccagcccgctggttgatgcattgagcaaagcgccagtgccatttcgtcatcaacttactgcgtggcgaacgattctggaagacaaaaaatccttgttagtgagcagcggtacgggatccgggaaaacagaatgctttatggtaccggttctggaagatcttattcgtcagcaaaaatcgacccgccagtcactaacagggacacaagctattttcttgtatccgttaaatgcattaattaacagccaacaggagcggcttcgcgaatggacgcgcggatttaaggggaaaatacgcttcgcgctatataatggcgaaacccggcataccaaatacgaaattcaggaagatcagttgaaagtacctgaacaagctttgagtcgggaagccatttatgaagcaccaccttccatcatggtgacgaataccaccatgctggaatatatgctgattcgtcgtaaagatgccccaatcatcgaaaagtctcaggggatgttaaagtatatcgtcctggatgaagcccatagttatattggttctcaggctgctgagttagcgctgcttttacgtcgtgttatgcaggctttcaatgttggacccggcacagataaacctgtgcagattatcgcgacctctgccactattggtgaagactctcctgaaggtaataaggagcttgctaaatttgtcgctgatctcgcgggcgttacagaacgtgatgtcaaagtggttcgcggttatcgacaaataccgcgggtatcggagtcgctgattcgtcatgaataccccacatctttaacttctcttaaatccctgagccctcaggatctttaccaacagctttgtcattaccgtgtggcccagcaattgcgtcaggcgttaactcatcccggacggcaggcagtacgtttgagtgagttgctcaatgttgccagaagaacctggccagatattaatcaccgtgagctactgcaactcctcgatctaatggcaagatcgcgagaaggtgaactggcttttacgccattacgtatgcatgggtttatcagaacactggcgggtctatgggcatgttcaaacaaacaatgctcacataaagcacatgaattaaatcagagtgactggccatttggtcaggtatggtttgagcagcgccaatattgtgactgtggagcgccggtatttgaagttttacgttgctccgggtgtggttcagcttatttgtctgccaaagaggagatgcgcggtgatggaacgaactggttggtagcgcaaccagccgctgccgaagtggatgagtttgctcttgatgtagatgtttattctgaagatgaagacaacgacgaattagacaataactctcaatttgatcgtctgattgcgagcgatggtgaaaaatatatcatttcactggaagaaacgacggcggggaaaattgatagtgaagcgcaaaagcactatgaaataaacctgttaagaccggaatctcgaggtgagggacgcaataactcctttgcttgtgtttgctgtggtgacactcaacggaaaaataatcctttattccgtccgcttcggctcggcgcgcccttttttttaaatgaaattattcctactctgctggagttttctccattaccgcaaacaagagaagagcagttaggaccgtttaatggtcgacgcttgctcacctttacggattcgcgtcagggtaccgctcgcatttcagcccgcttacagcaggatgccgataaagcgacgttgcgagctctttgttaccaggagctggcaaatattacagagccttcagcaaaactcagcccggcacactgtgcactgttagagaaagttattagccagttttctgtcctccctttaaaaaattccatcgacgcgctgaaaaaagcgatggctgcgaatgaggagcttagcccgacggacattcaggcacttaaaattattgagccgatggtgagttccttaagcacggagcatgctgaagcgatgcaaatacttcaggctaactctggcaatcagcagaagaaaaccatgtcatggcaaacgctgtctgaacagctggttggcagtgtggaccttgccgatagaatgagaggcagttttaaagaattgtctgggcttgatcttactaaacaacagtttgcagatttttgtttatacagcgagtttggtcgccgccctaaaaatgcctggaccctcgaaagtctgggtctggtagccattcactatccattcattgataaagttacaacctgcccgcaggactggaagacattattacccgatcccgataagcaattagcggaatggcgtaatttattgaagattactcttgatttctttatccgtgaaaacagtgccgttttttacgaaaacgagcaataccctcgctggatgggggcacgtttcccggtaaaaatgctccaggggccagataaaaaaaacaaagggcagaaacgtgatcaactttggccacaaatacgcgatcgccattataaccgggtcattaagctattaatcgcagtctttccggcaatacaacctgagcaggctcactggaaatcgttagttaaccacttaatgattgaggtctgggatgcaattcgaccctgcttacgtcagtttgagtcgggttatcagctggatattaaacaacaagctgaattttacagtccaaagcaagtgtggcgttgcccctatactcgacgtgcgttagacgtcacgttgctgggatactctccgtatttgccgggtagcaaagaaattgcacctgaaaaagcagtgttgattgaaatgcctgagcttcctgtacgtcactggcgtttgtctggtggtggagaaatcgcccgagaagaacgtctggagtggctggaaagtaatgcgctgattcaacatgcccgcgaggaaggattatggtctactcgcagcgaccgactggccctgaaagatagctggtatcgtctggaggaacactctgcgcagagaacgcctgagcagaaccagtttaatgaaaaacaatttaagtcaggcaaagttaatgtgctgaactgttccacgaccatggagatgggggtggatattggtggtatgagtttggtggcaatgaacaacgttcctccagcgccggcaaattatttgcaacgtgcaggtcgcgcggggcgtcgtggagagagtgcatctgctgccattacgttatgtaaaaacacggcgcatggaatggaggtattcaaagaccccctctgggcgttcaacactactgccagtgcgccacgggttcgttttgggagcagtagcattgttcaacgacatgttaatgccctggttttaggtctgtttttacgagctgaagttcctgatgcgacaaaactgagttgcaaatggttctttgaaggtgatgagagccagtgtcttcgttttcttcattggttaaatcaccaggccgatgagctggcggataaacttaaacgccttactcagggaaccgtcctgatgtcattgacggcaacccagctcttgacccgcacacaagcaatgatgcagcaggttgatatccgctggagaagccaacttgcgatactgttggaaaatatcgaagcgttgaaggcggataacagcgcgtgggaagaaacgccagcaggtaaagccatcgcttatcagcttcgtgattatcgcggtgcatatctgttttctaaactcattagtgaagcgttcctgccggggcatggtttcccggttggcgtcgtcaatttcaattatctgacggcagatgagctggaaaaacgtcgcgcaataaaagctactcaggctgaccctaatgaagggggagaaagcttttctcgtcgtattgaaaaattgcccagccgtgatctacctacagcattacgcgagtatgcgcctggcgcagatgtggtattgggcggaaaagtatatcgttcctcgggcattatgcttggcaaggtacttgccagcgggcaggagctgtcaggcgatcatcatattccgtggttctggcattgccgtaaatgtggtgcgggggcaaccagtactacccgtcctgtcgaatgtagtcactgcaaagcggatatacagcaacttgatgtgaagcgttatttacagcctgttggttttgcgacagatattcgttatcaggcacataatgatgtatccatgcctgcacaacttccctggaaagatccacgtgttcttgtaccgtcttcggtgtgggtttctttacccgatgctgggctaggacgttaccgttttagccatagtggggaattgttccacttcagtgaaggggaatttgggcacggctacgcaatttgcctctcatgtggtcgggcagaatctcaaactcaaccccagcgtacccctgaaaatctaaagaacccagagagggaaaatacgcattacctgttgcgagggggcagtaacgatcgtcaggggagcaataaattgtgccacggtcatgtgcataaagatctgtggttgggatatagcagtcgtacagatatggttgagctgcaactcaatgatgataatggcctgttgatccgtgatgaggttgccgcgcgttcccttgcggtcgctttgcgtgaagggttagcgcataaattgggtatcgaaaatactgagctgggcgtgacgacgcagcaagcgcgcgatatcaatggctataccggatattccatcttcatttacgacaataatgcgggtggtgcaggttatgcagtgcaattgatcgaccattgggctgatgtctttaattacgccagaaaattgctcgattgcagttgcgataaattctgtcaccactgcttgctcagctacgacagtcagcattatgtcaacagattagatcgtcaccatgcattaaccctgcttaccaatgtacggttgcagcgacttaacctcgcgccagaatatcagtacttcggcgatggtagccgggttgaaactaaccctctgagtttacgtattgcgcaatgcctgaacagcgagatttatgactcctgctcgctggttcttgcggggccgcaggaacagtgggactttgcccaatggccattatttaaagagttgctccagtttgcctcctccggtgggaatgttgagttgctggtggccacgccgctggcaaacttaactgatagctccagacatcagctttccgcgttggcggcgatgccgggaggtcgcttacaagtgaaatccattgccactgcgcagctcatgcaaggaaaggggcgctggcttgcgcaggtgactcgcgaagggcaaagccaacagtgggccgcagacgacagcgctaccgttgcacctggtgaattatggggacaaagtgcgtcttcaccagtagtgacacttaaaggaacgtccggaaaaaccttctcgggtcagaccttaagtgcagaagatttactgcccgccttacccaccggggcggtgcgcatcaatctctgtgaacaactggacgggccgctggaaggttttggttcgcgtttctggtcgttagtcacgcaacagcacgctggctggaagcaggcatttacccgccacaaagagataacgcatgttgagtacagcgatcgttatcttaatagcccattcacggcgcgtttgttaggtgaaatcttaaccgagctggttgaacagggaatggcggaacgcgccagcctcactgtttgcgtcaaaaaattggattacaactctcgccaacacgacgctctctataacgcgtggcttaatgaggaagatcgtcagcaggttgtgaccactttacttgaagaaggatatctggggcctgcgtggccgggagcaattagctggttaacgggggataaccagagtacggagcatggacgagaactgacagtcaccttcagcgatggcagtcagcattatgtcctgctcgacatggggcttagctactggcgctgtattgaagataccttctttgattttgccctgcgagtaccgcagcaagttgaacggctggcaaacacgcgagcgcgagctgttgccccgggtaatgaccttaggagttatattatcgctggataa

SEQ ID NO: 28451 - DNA, 2937 bp, Escherichia coli
atgattgaaaatgagagcggttatttgattacctatttcagaaggatatatcaggcgcttcgtgggcaatcatctcaatatcctgccgctaaaattgcacaagaattaggcgatacgattcctgtcacaatgcaaaacgaactggtctatgaaatagccggtgaattctgcgagactctctgccgattacttagtgagcatcctcctcatagtagtgatcccgtttctgcattacgtaagctctctccagactggcatcttcaacttccactcgttctccccgaagcgaatgctgcagagattgtaaggcgattactttctcaatcttctgaaatacgcagtgcaagtagtcttcaggttgaaagaatctgggtcgatgttgatgacagttggtattgcgatgcccggttccgattcccggccacaatgcgtacagaacagttaacctctttgtttgaatgccatattcagccggagcagacccgactcatcatttcaggaaaatggaaaaatggcggggcaaggttggcaatgctaagccgttatgagcagcaagattggcgggtcgagttattacctattgcgatgcaaaaactctctggtgcagatgcaatggccgaaatctcattgtcgcttcatgaaggtccaattctgttaggtcacacaattccaaaaggcggttatgaacttactgaagaacttccctgggtttttgaagcgatgaatgagagtgaatcgcagctaaaacttgttggtatggggtctgtgagttccaggctaaatgctctgtttatttcgctaccgaaaaatagccatttagatattagtggagaaggtgagtttgatatcccaaggttgctgaaaaacagtgaacgcagcttaactaaaataagtggagtatttagcgttgttttacatgatggtgctgtttgtacaattcgcacccagcaactttatgattctgcgattgaatattatattaaatcgacagaagttgaactggttaaatcggattatcctgtccatcgagcctggccgaagatcggttggaaaaaggatctgcaatatggcattgtaccggagaaagaacttttttggcgttccattcgttcaggtaataatgcctggtattctgtcgcatcagaaatgccaaaaggacagatagaagtccggcgaatagttaatgatgaggttttatttagcggtaaagttgtagttttaccagcagacttcgatattaatattatacctgagagtgctcagcaaggcattattatgctttctggtataacggatactagaattgataaatattcaaacaatgaaaaagtaacacttaagtccgattattcacaaaacgagtgtgctatttattataattcatcgctgatgctggaaaataccgttgatttacgggtctcctggaaagatggttctaatcttaaactattattacctaagccggttagcggtggccgatttgtaactaatgatggttctgttcattttgatggtgtggcatctatagcacatttgcatggaatagatgctgagttattaaccatatcatgtgctggaagaggatatcttaatatcgagttattggatgaaaatccagtagctgaaaaattccgctatttacatgccgaccttcctcttttatcaggacgcaatgacaaattacaacaaatttcactttatgagaactataatttgctaaatgctatgctggcatgtgcatggaacagcaatagtacattatgtgttgatttttactctgacagatttggaaaggataaagcaacactcaatattaaacgctacgatggtagttttattgaacacgatcaagggttactggttgatataaaaaattctgttgtttttcctgcaaatagaatagacgaactggttgttgatgctatttctcttaagaatcctggcttacacatatcattgttaaaaaaagatgagtttgcttatgatctttcagctctgaatgttcaggatagtccatggttaattgtgggaaaacttgatggtacagctcgcattgcaccagtaattaaatggatgctacctgtattgcagacaaatgatttattactaaatgctctatgcgaagcagacccagaacagcgcaaaaaaaattttaatgagctaatttttgaaatagataacaacccattgcaaaattattgctgtttattaacagagtatattaagaaatacaaaatgaataatggcttatccttgctggatctggacttgttcagaggtatttcgagtaattaccgcgtggttgttcaattgttaatatcatcatgtctttctggtgatagcgatacgatttatgatatacaggaagaattacccttttcatggggatggattcccgtttcaatctggaaagatgttttccaaaaatgttggacttatctggagaaacagattaacgataaaacattagcattacatatattgcaaccctttattgcttttatgaaccatcgtgcacatatcgatcgtcggctggctccgattgcgaatatgttacttacatatagtgagagcctaccaaccggttgtgatgtattgccaactgttagtcgtgagcagtttaatgaagctaaacagatgctattaaggaaccccgacagctttgggcgtatcagtatcttccctaaagaactttggtctagtgctattactccagagttaaaatctgtttttaataagctttggattgaagataaatatcactcacggcttgaaaaacgttttaatttgatgttagtcgcagcgctgttaacccaaaaagataataacctgatacatcaactgtctgcgctttttgaatttcactatcagcaagccccacagcaattaggggtaatctatcaatattattttgaacaagcaggagtatgtcattga

SEQ ID NO: 28452 - DNA, 6345 bp, Escherichia coli
atgactacacgctatttttcgtcacttattgaacaatcgttgtctcgttcaactgaagcaacgctcagtatcatgggtgttacaaacccgcagttgcgtgaacatctcgcgcagcaaatgggggctgattgcgggaaaccgggctcattccttgcctctccggtattccagcaaatgtttggctggaaggagtcaaaccacacgatgcgcagcctgacggaaggcaacgcattgttgagcaaagcagtggttgattcactggatgatcagagtaatggccggtaccggtttggtgctgactggaggccttttacgcaccagttagccagttggaaagctttgctggaaaagaaacattcagtggtggtaaccagtggtacgggttcaggtaaaacggaatgttttatggtaccggtgctggaagatctttaccgggaactgcatgaaaatggcaacaatccgttggtcggtgtccgagccctttttctctatccattgaacgccctgattaattcacagcgcgagcgtctggatgcctggacgcgtggttttggtactgggatccgctactgcctttacaacggcaacaccgaaaacctacacgcttcggtaaaaagtgaacaggcaaaaaggccgaatgaggtgctttcgcgcgaaaaaatgcgtgaagaacctgccccgattctggtgaccaacggcacgatgctggaatatatgatggttcgccagatcgatgccccgattatccagcaatccaaagcacaaaaatcactacgctggattgtactggatgaagcgcatacctatgtcgggtcgcaggccgctgaactggcgctccagctgcgtcgtgtgatgacagcgtttggcgtgacgccagatgatgtgcgctttgtagcgacctctgcgaccattgccggcagcgacgccgaaaagcagctgaaaaaatttctctctgaattatccggtatcccgcaggagcgcatcgatgttctggacggaagtcgggtgattcctgaactggaaccatccaaaaacgtttctcttccgttagacgaaatagagcaaatacccgatctggatctaagagataaaaatgataataaaattaaaggtataagtcctgagcgcttttatgcgcttacgcattcccccgaagcgcgttacatacgtgagatgttggtcaaacagcccaatccgatgaagctggatgagataacagagcggttaaatacgctgacaaaacagcattacagccagcaggaagtactgcgttggatcgatgtctgttcagggactcaacctaatgcaaaggatcccgcatttcttaaagtcagggcgcatatcttccagcgtaatacccagggaatatgggcttgtgttgataaagattgcagattaaagcacggtacaccgctcgaaaaaggctggccctttggctatgtgtatgtgaaccagcgacaaaattgcgactgtggaagccctgtctacgaagtggcgttctgtaatgattgtaatgagcctcatcttctggcacgggacaaaaagggcaaactagtccagtgggaaaataaaggtggcgatgaattctctttgcaggatgaagtacctgttgaacatgacgctacagaagaaaaagtcgaaaaagagaacagttttcagcctccgttgattattgccgcaggagagaccagcgaggcaggttataccctacaacgcctcgaccgtcagacgcgccgtattggcgttattaacaatgacagcattccgctgattattaatgatattgaacaggtttgtagcgccagcggctgtggcttcagaggcatgagcgggaaacagcccttccggcgtgcactattaggtgggccattttacgttactaatatcgtgcccaccgttctagagtattgtcaggactttaccagtgatgaaggcaaagagggcgtcggaccagattcgttgccaggacgaggtcgtcgactcatcacctttacagacagtcgacaagggacagcccgaatggcggtgcgtatgcagcaagaagcagaacgcagtcgcttacgaggaagcgtagtcgaaattctcagctggcatcaaaggacgcaaacgtctacagcgccgaatgccaatgccgatctggaaaaattagcggccagggcgaagcaagcccgtgagcaggcagaagaatatcgaagctggggaatgccagaccaggcgaaattgtcacaagcacaggctgaacagcttgaacaggcttatcaggctgcaaccggtgggaaagccgcgactatcctggtatcccgaacctggacggagatggttaacgagcttaaagagagagccgatatccgcgggccggttctgcaatataaccattatcttaagcctgaagtgtttaatgaaaacggcggcccccttaagctttctgaaatgttgttgttccgggaattcatgcgtcgccctaaacggactaacagcctggaaacacaggggctggttcaggttggttaccaggggctggagaaaatacataagagccccttgcactggcaggaaaaaggattaacgctggatgactggcgcgattttctcaaggttacgttggatcattacgttcgcgagagcaacttcacacagttggatgatgagctgaaaaactggattggtagccgtttttcatcaaaattcgtccgtaacccggaatcaaaagatcctgaagataatcagaacagacgctggcctcaaattcgtaatggcaacgtatcccatcgtttagcgaagttgctgatgctgggggctggattcaaaaccgtcaatgcggcaactattgatattatcaatacatggctgaaagaagcatgggcccaacttaccggaccgcttgcagtactgaaacccgatggcaaccgtttttatttaccgaaagagcatatgactttttctttaatcacggatgcctggatttgcccggtaaccaataaaatcctggatacgacttttaaaggcttaaccccttatctgcctacccatatttcgttcgagcatcttacccaggcgcaatatgacacttttgtcgcgcagaaagtcaccatgccggaaatctggaagctggatcgttcacaggaagactacgcagagggtctggcaaaagcacgcgactgggtcagccatgatccgctgatcgcacaattgcggtcggaaaacgtctggacagacatcaacgatcgtgtcgtggaaggcggtttctactatcgtactgccgagcactctgcccagcagtcgtcagaacgtctgcaaagctatgaaaagatgttcaagaatgggcaactaaatgttctcaactgttccaccaccatggaaatgggggttgatatcgggggcattactgcggtggtaatgaacaacgtaccgccacatccggccaactatttacagcgcgccgggcgagccgggcgtagtaaagaatcacgtgcgatctcttacaccctatgtaaaggtaacccacacgaccagcaggtttttgccaacccgctctggccatttgaaaccatgatcccggcacccatggtcgcgatgaactccgcccgactggtgcaacgtcacgtcaatgcattattactgtccgactttttatgtaacgttattggcgaaaccgataaagaaaaaaccagcctcgatagcctctggtttttcggtgaagatgacgggcagtcaaaatgcgaacgctttaaaatctggttggaacgtccggttcttgatatcgacacggcgctggaacggctggtgaaaggtacggcgttgcatggtgcaagagccgaatatctgcgggataaaacaatcaacgcgatcaccttcctgcaacagcggtggctctccgtttatcgcgatctcgtgacccaggagcgtgagtcgcagccgcaaacgccttatcgtaagcgcatagagctggagaagaaacggcactgtggcgagtatctgctgcgcgatctggctgccagaaccttcctgccgggatacggtttcccgacagatgtagtgacgtttgataacttcacaatggaagattatatccgcgaaaaatcgcagaaaagtcgtgataaaaaggaccgtgaagataacgtctcccgttataaaggattaccttcccgtaacctcggtgttgccattcgtgaatatgcaccgggagcagagatcatccttgatggccgtgtcttccgctctgccggtgtctcactgcactggcacaatattaatgccgataccaatgaagcccagcgtctggattgcgcctggcgctgtcacaaatgcgggaccattggctatgaagaggggatgagcagttccgggatgctcttttgctccaatagcgcctgcggcgaaaaaataatcatggataatcgccgtcaggtgctgcagcctgccgggtttgtcaccgatgcacacgctccggtaacgaacaatattgaaaccatgaaattcgtcccggttgtccccgcctgggtctttgttaaagcagagcccgtaccgttgcctaacccgttaatgggttatatggcttctggggctgatgggcatgttttccagcaaagtctgggggaaggtggacacggttatgcattgtgtctgagctgtggccgtgcggagtcgatgctgaatgaaaatgatgcaccgaaaagtatggaagctcactatccaccgcgtccgggtaaagcggaccgcgacagccagaatcatcgtctgatttgccccggttcgacggcactcatgaagaacgtcaccctgggcgcactggcgcgcaccgatgtctttgaaatggttctgcgcaaaccgcaaaacggcgagtatctgccagataacacagaggaggggcggattgttgccatgactctggcggttgctctgcgtcaggcgctggcgggcgttctgggcatctccgccgcagaactcggctattctgtacgtccggtcagactggaggatgggcaatcggtattagccgtacagctttatgatgtgatcagcggtggtgcaggttttgcctccagcgcaccggtacacattgaagctatattgcagggaatggtgaaacagttaggctgccgccattgtgatactgcatgcagtgaatgtctgcttgattcccagactcgccacgatcacgatttgctggatcgcaaagcggcgctggcctggcttggcgatgacttcacgtattacatcggtttaccggatgaagagacattctcgctgccggatgcccgctactgccctggcgccattggcgatacgattcgccgggcgattaacgaaggcgctgaaaagctcaccctgtggatgaccggcgcgcccaatgagtgggatttatacgcacgtcagttccgcgcggcggttcagaactatcggctaaaagacaacgtcgaggtcgatcttgttattcctgcgggagtggatgacccggacctgttgcatgaactatcgcaatttactgcgttgggtgtgcggctatgccatgttgaacaggatctgcaatcgccgattgttgcccaggttacctttgccgatcgcgtgatgacgctggcctctcgcagccagcaggcaacgattccggggccggagtggcacctgaatgacgaactggtggtgcgtagtctcggttataaaacggtagaactgaacgaatttattctgccagctaaagccgccaacgctgtcgagcgggtcaaagacattcagatccacaaacagttgaatggaccactgtcgcagtttgggcaacgcttctgggacgtgctgtttaacgaccatgaagaagcgcagtcactgatgaaaaacacgcgaattaccggcgttcactataccgatcgctatctgcaaaacccggttgcgctggcgttgttggggtcaattctgaaaccgctaaaaacaaagctgaccgatggtgctgaagtggcgctggatacgctgtttaaagataaagatcgccccggtaaccggcctttccatgactggatgagcatagcggattttcaggatttcgctgatcagtggtttgcagctgcgctgggcaggccggtagagctgacggtgttcgactcgccgcgcgatatccctcaccatcgtaaactgacggtgacttttgaagatggtcaggtattgaagatccgcttcgatcaggggatgggctactggcgtatcaactttgcatcgaaatggcattactttgacttcagcgatgacgtttctttccagttagtcaaaatggctcaggcctgtcaggaagggaatgtcgccaacagcgaagagagctgggcaacggatgtgctggtggaggtgatcgcctcctga

SEQ ID NO: 28453 - DNA, 3291 bp, Escherichia coli
ttgggtcaatcagaatacatttcatgggtaaaatgtacttcctggctaagtaactttgtgaatcttagagggttgagacaaccggatggccgtcctctttatgaatatcatgcaaccaatgatgaatatacccaattaacgcagctactccgtgcagtcggtcaatcacaatctaatatatgtaatagggactttgctgcctgttttgttcttttttgctctgagtggtaccgcagggattatgaacggcaatgcggatggacgtgggaccctatatataaaaaaatagggatttcattcaccgccacagagcttggcactatcgtaccgaaagggatggaagattactggctgcgcccaattcgattttatgaatctgaacgacgcaattttctcggaacattattcagtgaaggtggtttacctttccggctactcaaagaatcagacagtcgctttctggctgttttctccaggatccttggacaatatgagcaagcaaagcagtcaggtttttcagccctttcgctggcaagagctgtcatagaaaaatcagcgctgcctactgtttttagcgaagatacctctgtagaacttatcagtcatatggctgataacctcaattccttagtacttactcacaacctaataaatcacaaagaaccagtacaacagcttgataaggttcaccctacctggcgaagcgagtttccaataccgttagatgatgaaacaggaacgcattttttgaatggactgctatgcgcagcctctgtagaggctaagcctcgactacaaaaaaataagagtacgcgttgccaattctattggtcagaaaagcatccagatgagcttagggcgatagtatctcttcctgacgaagtttcctttcctgtaacaagcgagccgtcaactacgcgctttgaacttgccatttgtgaagatggtgaggaagtctctggccttgggccagcctatgcttctctggaaaacagacaggcaacagttcgattacgtaaaagcgaagtgagatttggcaggcaaaatccatcggcaggtttgtcgttagtggctcgtgctggagggatgattgttgggagcattaaacttgatgacagtgaaattgccattggtgaggtgccgttaaccttcgtcgttgatgcagatcaatggctgttacagggacaggcttcttgcagtgtgcgaagcagcgatgttctgattgtgctccctcgggataatagcaatgttgctggtttcgatggccaatcgagcgcagtaaacgtattaggactaaaagcattacctgttaagggatgtcaggacgttacagttacagccaatgaaacttatcggattcgcaccggaagagaacaaatcagcatcggaaggtttgctctaaatggaaagcgtgcaagctgggtttgtcatccagatgaaacatttattggtgtaccaaaagtcatttctacattgacagatattcaaagcattgatgtaacgcgttacctgagcggaatttcaattgagcaatgtcatatccaggagatgctgggggctcaatatctttctatccggaatagtaataatgaaacgctcttgcgtcgcaaaatcggtatcctgccagcagatttcagtgttgagataaaaggcggtgagcgcgcaaatgaaggttctatcgtaatcaccacacagcatccttgtgtagcaaaacttaaagataaaacattggaggctacacgtaagcgtactgaggggcgaacagagatacaactcaaagcggaaggggtacctccggcatttattacattacaagttctgcctaatttggcggctgaccccatcgatattgagttaccttttcccgctaaaggctgtctcgctcttgatgtaaacggacgtcctctggataaaaacattacgctgcatgatctgctgggttccagagcgtttctgttctccagaaatggcgagccgacaagatatacattgcagttgcatttgcgctccgttagtggattacaggcatggcacgaatggtgttatacggcgttgagcgatcgtcctgttgaattgaatctctatagtctgcgcgaacatattgagaacctgatttcacttgaggcaggtattgatcaggttgttgagatgcgtattacgggggcgggtgtggtcatggcctggcaaattcgtcgctataaatacagtctgcgctatgattatgaaaaagaactattactcagccagtcagtgaaccatcgtgctggacagattccttcccccgttatcatgctgttaagtgaacccgagaggaaatccatccccttagcatcaagaatgagcgagggagtgcctgtcggtgaatatgagttgagctcaatcgttaacaaaaatggaccatggttggttgttcctaaaccgggtgaggagatggcttttcgcccctgcttcattcgtggcgaatcttcgttaccggtagaagaaagcaacatccgctcattgcagaaagcgacccagctttttaatccacaggcagaagttaataccatcacactggttctcggacagatggctaacgatcctgcccattccggctggcaatttatgcgtagcctgtacgatcaatttggttatttaccgctggcaacctttgaagtatggcgtgcactagtgcagcatccgcaggcattggcgatgtcgctcttcaaattcgaaatgtcagcagagtatctgagtcgtattgagaatgagttccctattctatgggagtttttccccatctttgagatcaaagctgcatctgagcgtttcaaattgttcctgagccaaaaaggtgcaccggaggaaacccagaaattactggttactaatatgtttcaacggctggggctagtgttcccgacatatgccgatgaaattgagaaatggttaagtaacggatatctccctccgtctattcctgaatcttgtgtccacgggtggtatcaggagcttttacgtgagcacagtgaagctcgctggcctgaatatggctgcaagcgtctgtataaatggatgatgtcacaaaaaaatccagtgattggtattaatcctgacgcagactaccgttattccgtggcctggttacccgtcttcgctgcagctgtggcaagcggaaatacttcttttgaagctgtatttgaccgtaaacccggtgccgtatttttcctgaggcaagtcagggacttcgattcccgctggtttaagactatcttccagtgcagcctgttgcgttatgttgctaaaaaataa

SEQ ID NO: 28454 - DNA, 6345 bp, Escherichia coli; identical to SEQ ID NO: 28452

SEQ ID NO: 28455 - DNA, 3291 bp, Escherichia coli; identical to SEQ ID NO: 28453

SEQ ID NO: 28456 - DNA, 6315 bp, Escherichia coli
atggacgttcagcaactgcattatgcgccacttctaaatcagcttcatcagcgtgcggtgaggtcggtggtaagtcagttggcattgcggagcaagtcgttgactcattatctggaatcacaatattttcagcctcccggtcaggaggggtcactgcttgcagacccggtattcgaaagtacattcggctggatgcctgcggatgaaacaatggaggatttgcgggacaagctgatctccagcccgctggttgatgcattgagcaaagcgccagtgccatttcgtcatcaacttactgcgtggcgaacgattctggaagacaaaaaatccttgttagtgagcagcggtacgggatccgggaaaacagaatgctttatggtaccggttctggaagatcttattcgtcagcaaaaatcgacccgccagtcactaacagggacacaagctattttcttgtatccgttaaatgcattaattaacagccaacaggagcggcttcgcgaatggacgcgcggatttaaggggaaaatacgcttcgcgctatataatggcgaaacccggcataccaaatacgaaattcaggaagatcagttgaaagtacctgaacaagctttgagtcgggaagccatttatgaagcaccaccttccatcatggtgacgaataccaccatgctggaatatatgctgattcgtcgtaaagatgccccaatcatcgaaaagtctcaggggatgttaaagtatatcgtcctggatgaagcccatagttatattggttctcaggctgctgagttagcgctgcttttacgtcgtgttatgcaggctttcaatgttggacccggcacagataaacctgtgcagattatcgcgacctctgccactattggtgaagactctcctgaaggtaataaggagcttgctaaatttgtcgctgatctcgcgggcgttacagaacgtgatgtcaaagtggttcgcggttatcgacaaataccgcgggtatcggagtcgctgattcgtcatgaataccccacatctttaacttctcttaaatccctgagccctcaggatctttaccaacagctttgtcattaccgtgtggcccagcaattgcgtcaggcgttaactcatcccggacggcaggcagtacgtttgagtgagttgctcaatgttgccagaagaacctggccagatattaatcaccgtgagctactgcaactcctcgatctaatggcaagatcgcgagaaggtgaactggcttttacgccattacgtatgcatgggtttatcagaacactggcgggtctatgggcatgttcaaacaaacaatgctcacataaagcacatgaattaaatcagagtgactggccatttggtcaggtatggtttgagcagcgccaatattgtgactgtggagcgccggtatttgaagttttacgttgctccgggtgtggttcagcttatttgtctgccaaagatgagatgcgcggtgatggaacgaactggttggtagcgcaaccagccgctgccgaagtggatgagtttgctcttgatgtagatgtttattctgaagatgaagacaacgacgaattagacaataactctcaatttgatcgtctgattgcgagcgatggtgaaaaatatatcatttcactggaagaaacgacggcggggaaaattgatagtgaagcgcaaaagcactatgaaataaacctgttaagaccggaatctcgaggtgagggacgcaataactcctttgcttgtgtttgctgtggtgacactcaacggaaaaataatcctttattccgtccgcttcggctcggcgcgcccttttttttaaatgaaattattcctactctgctggagttttctccattaccgcaaacaagagaagagcagttaggaccgtttaatggtcgacgcttgctcacctttacggattcgcgtcagggtaccgctcgcatttcagcccgcttacagcaggatgccgataaagcgacgttgcgagctctttgttaccaggagctggcaaatattacagagccttcagcaaaactcagcccggcacactgtgcactgttagagaaagttattagccagttttctgtcctccctttaaaaaattccatcgacgcgctgaaaaaagcgatggctgcgaatgaggagcttagcccgacggacattcaggcacttaaaattattgagccgatggtgagttccttaagcacggagcatgctgaagcgatgcaaatacttcaggctaactctggcaatcagcagaagaaaaccatgtcatggcaaacgctgtctgaacagctggttggcagtgtggaccttgccgatagaatgagaggcagttttaaagaattgtctgggcttgatcttactaaacaacagtttgcagatttttgtttatacagcgagtttggtcgccgccctaaaaatgcctggaccctcgaaagtctgggtctggtagccattcactatccattcattgataaagttacaacctgcccgcaggactggaagacattattacccgatcccgataagcaattagcggaatggcgtaatttattgaagattactcttgatttctttatccgtgaaaacagtgccgttttttacgaaaacgagcaataccctcgctggatgggggcacgtttcccggtaaaaatgctccaggggccagataaaaaaaacaaagggcagaaacgtgatcaactttggccacaaatacgcgatcgccattataaccgggtcattaagctattaatcgcagtctttccggcaatacaacctgagcaggctcactggaaatcgttagttaaccacttaatgattgaggtctgggatgcaattcgaccctgcttacgtcagtttgagtcgggttatcagctggatattaaacaacaagctgaattttacagtccaaagcaagtgtggcgttgcccctatactcgacgtgcgttagacgtcacgttgctgggatactctccgtatttgccgggtagcaaagaaattgcacctgaaaaagcagtgttgattgaaatgcctgagcttcctgtacgtcactggcgtttgtctggtggtggagaaatcgcccgagaagaacgtctggagtggctggaaagtaatgcgctgattcaacatgcccgcgaggaaggattatggtctactcgcagcgaccgactggccctgaaagatagctggtatcgtctggaggaacactctgcgcagagaacgcctgagcagaaccagtttaatgaaaaacaatttaagtcaggcaaagttaatgtgctgaactgttccacgaccatggagatgggggtggatattggtggtatgagtttggtggcaatgaacaacgttcctccagcgccggcaaattatttgcaacgtgcaggtcgcgcggggcgtcgtggagagagtgcatctgctgccattacgttatgtaaaaacacggcgcatggaatggaggtattcaaagaccccctctgggcgttcaacactactgccagtgcgccacgggttcgttttgggagcagtagcattgttcaacgacatgttaatgccctggttttaggtctgtttttacgagctgaagttcctgatgcgacaaaactgagttgcaaatggttctttgaaggtgatgagagccagtgtcttcgttttcttcattggttaaatcaccaggccgatgagctggcggataaacttaaacgccttactcagggaaccgtcctgatgtcattgacggcaacccagctcttgacccgcacacaagcaatgatgcagcaggttgatatccgctggagaagccaacttgcgatactgttggaaaatatcgaagcgttgaaggcggataacagcgcgtgggaagaaacgccagcaggtaaagccatcgcttatcagcttcgtgattatcgcggtgcatatctgttttctaaactcattagtgaagcgttcctgccggggcatggtttcccggttggcgtcgtcaatttcaattatctgacggcagatgagctggaaaaacgtcgcgcaataaaagctactcaggctgaccctaatgaagggggagaaagcttttctcgtcgtattgaaaaattgcccagccgtgatctacctacagcattacgcgagtatgcgcctggcgcagatgtggtattgggcggaaaagtatatcgttcctcgggcattatgcttggcaaggtacttgccagcgggcaggagctgtcaggcgatcatcatattccgtggttctggcattgccgtaaatgtggtgcgggggcaaccagtactacccgtcctgtcgaatgtagtcactgcaaagcggatatacagcaacttgatgtgaagcgttatttacagcctgttggttttgcgacagatattcgttatcaggcacataatgatgtatccatgcctgcacaacttccctggaaagatccacgtgttcttgtaccgtcttcggtgtgggtttctttacccgatgctgggctaggacgttaccgttttagccatagtggggaattgttccacttcagtgaaggggaatttgggcacggctacgcaatttgcctctcatgtggtcgggcagaatctcaaactcaaccccagcgtacccctgaaaatctaaagaacccagagagggaaaatacgcattacctgttgcgagggggcagtaacgatcgtcaggggagcaataaattgtgccacggtcatgtgcataaagatctgtggttgggatatagcagtcgtacagatatggttgagctgcaactcaatgatgataatggcctgttgatccgtgatgaggttgccgcgcgttcccttgcggtcgctttgcgtgaagggttagcgcataaattgggtatcgaaaatactgagctgggcgtgacgacgcagcaagcgcgcgatatcaatggctataccggatattccatcttcatttacgacaataatgcgggtggtgcaggttatgcagtgcaattgatcgaccattgggctgatgtctttaattacgccagaaaattgctcgattgcagttgcgataaattctgtcaccactgcttgctcagctacgacagtcagcattatgtcaacagattagatcgtcaccatgcattaaccctgcttaccaatgtacggttgcagcgccttaacctcgcgccagaatatcagtacttcggcgatggtagccgggttgaaactaaccctctgagtttacgtattgcgcaatgcctgaacagcgagatttatgactcctgctcgctggttcttgcggggccgcaggaacagtgggactttgcccaatggccattatttaaagagttgctccagtttgcctcctccggtgggaatgttgagttgctggtggccacgccgctggcaaacttaactgatagctccagacatcagctttccgcgttggcggcgatgccgggaggtcgcttacaagtgaaatccattgccactgcgcagctcatgcaaggaaaggggcgctggcttgcgcaggtgactcgcgaagggcaaagccaacagtgggccgcagacgacagcgctaccgttgcacctggtgaattatggggacaaagtgcgtcttcaccagtagtgacacttaaaggaacgtccggaaaaaccttctcgggtcagaccttaagtgcagaagatttactgcccgccttacccaccggggcggtgcgcatcaatctctgtgaacaactggacgggccgctggaaggttttggttcgcgtttctggtcgttagtcacgcaacagcacgctggctggaagcaggcatttacccgccacaaagagataacgcatgttgagtacagcgatcgttatcttaatagcccattcacggcgcgtttgttaggtgaaatcttaaccgagctggttgaacagggaatggcggaacgcgccagcctcactgtttgcgtcaaaaaattggattacaactctcgccaacacgacgctctctataacgcgtggcttaatgaggaagatcgtcagcaggttgtgaccactttacttgaagaaggatatctggggcctgcgtggccgggagcaattagctggttaacgggggataaccagagtacggagcatggacgagaactgacagtcaccttcagcgatggcagtcagcattatgtcctgctcgacatggggcttagctactggcgctgtattgaagataccttctttgattttgccctgcgagtaccgcagcaagttgaacggctggcaaacacgcgagcgcgagctgttgccccgggtaatgaccttaggagttatattatcgctggataa

SEQ ID NO: 28457 - DNA, 2937 bp, Escherichia coli
atgattgaaaatgagagcggttatttgattacctatttcagaaggatatatcaggcgcttcgtgggcaatcatctcaatatcctgccgctaaaattgcacaagaattaggcgatacgattcctgtcacaatgcaaaacgaactggtctatgaaatagccggtgaattctgcgagactctctgccgattacttagtgagcatcctcctcatagcagtgatcccgtttctgcattacgtaagctctctccagactggcatcttcaacttccactcgttctccccgaagcgaatgctgcagagattgtaaggcgattactttctcaatcttctgaaatacgcagtgcaagtagtcttcaggttgaaagaatctgggtcgatgttgatgacagttggtattgcgatgcccggttccgattcccggccacaatgcgtacagaacagttaacctctttgtttgaatgccatattcagccggagcagacccgactcatcatttcaggaaaatggaaaaatggcggggcaaggttggcaatgctaagccgttatgagcagcaagattggcgggtcgagttattacctattgcgatgcaaaaactctctggtgcagatgcaatggccgaaatctcattgtcgcttcatgaaggtccaattctgttaggtcacacaattccaaaaggcggttatgaacttactgaagaacttccctgggtttttgaagcgatgaatgagagtgaatcgcagctaaaacttgttggtatggggtctgtgagttccaggctaaatgctctgtttatttcgctaccgaaaaatagccatttagatattagtggagaaggtgagtttgatatcccaaggttgctgaaaaacagtgaacgcagcttaactaaaataagtggagtatttagcgttgttttacatgatggtgctgtttgtacaattcgcacccagcaactttatgattctgcgattgaatattatattaaatcgacagaagttgaactggttaaatcggattatcctgtccatcgagcctggccgaagatcggttggaaaaaggatctgcaatatggcattgtaccggagaaagaacttttttggcgttccattcgttcaggtaataatgcctggtattctgtcgcatcagaaatgccaaaaggacagatagaagtccggcgaatagttaatgatgaggttttatttagcggtaaagttgtagttttaccagcagacttcgatattaatattatacctgagagtgctcagcaaggcattattatgctttctggtataacggatactagaattgataaatattcaaacaatgaaaaagtaacacttaagtccgattattcacaaaacgagtgtgctatttattataattcatcgctgatgctggaaaaaaccgttgatttacgggtctcctggaaagatggttctaatcttaaactattattacctaagccggttagcggtggccgatttgtaactaatgatggttctgttcattttgatggtgtggcatctatagcacatttgcatggaatagatgctgagttattaaccatatcatgtgctggaagaggatatcttaatatcgagttattggatgaaaatccagtagctgaaaaattccgctatttacatgccgaccttcctcttttatcaggacgcaatgacaaattacaacaaatttcactttatgagaactataatttgctaaatgctatgctggcatgtgcatggaacagcaatagtacattatgtgttgatttttactctgacagatttggaaaggataaagcaacactcaatattaaacgctacgatggtagttttattgaacacgatcaagggttactggttgatataaaaaattctgttgtttttcctgcaaatagaatagacgaactggttgttgatgctatttctcttaagaatcctggcttacacatatcattgttaaaaaaagatgagtttgcttatgatctttcagctctgaatgttcaggatagtccatggttaattgtgggaaaacttgatggtacagctcgcattgcaccagtaattaaatggatgctacctgtattgcagacaaatgatttattactaaatgctctatgcgaagcagacccagaacagcgcaaaaaaaattttaatgagctaatttttgaaatagataacaacccattgcaaaattattgctgtttattaacagagtatattaagaaatacaaaatgaataatggcttatccttgctggatctggacttgttcagaggtatttcgagtaattaccgcgtggttgttcaattgttaatatcatcatgtctttctggtgatagcgatacgatttatgatatacaggaagaattacccttttcatggggatggattcccgtttcaatctggaaagatgttttccaaaaatgttggacttatctggagaaacagattaacgataaaacattagcattacatatattgcaaccctttattgcttttatgaaccatcgtgcacatatcgatcgtcggctggctccgattgcgaatatgttacttacatatagtgagagcctaccaaccggttgtgatgtattgccaactgttagtcgtgagcagtttaatgaagctaaacagatgctattaaggaaccccgacagctttgggcgtatcagtatcttccctaaagaactttggtctagtgctattactccagagttaaaatctgtttttaataagctttggattgaagataaatatcactcacggcttgaaaaacgttttaatttgatgttagtcgcagcgctgttaacccaaaaagataataacctgatacatcaactgtctgcgctttttgaatttcactatcagcaagccccacagcaattaggggtaatctatcaatattattttgaacaagcaggagtatgtcattga

SEQ ID NO: 28458 - DNA, 6345 bp, Escherichia coli
atgactacacgctatttttcgtcacttattgaacaatcgttgtctcgttcaactgaagcaacgctcagtatcatgggcgttacaaacccgcagttgcgtgaacatctcgcgcaacaaatgggggctgattgtgggaaaccgggctcattccttgcttctccggtattccagcaaatgtttggatggaaggagtcaaatcacacgatgcgcagcctgacggaaggcaacgcattgttgagcaaagcagtggttgattcactggataatcagagtaatggccggtaccgatttggtgctgactggaagccttttacacaccagttagccagttggaaagctttgctggaaaagaaacattcagtggtggtaaccagtggtacgggttcaggtaaaacggaatgttttatggttccggtgctggaagatctttaccgggaactgcatgaaaatggcaacaatccgttggtcggtgtccgagccctttttctctatccattgaacgccttgattaattcacagcgcgagcgtctggatgcctggacgcgtggttttggtactggaatccgctactgcttgtataacggaaatacagaagagctccacgcaaaaatgaaaacagtgcaggataatagaccaaatgaagtcttatcccgtgaaaagatgcgtctggagccagccccgattctggtgaccaacggcacgatgctggaatatatgatggttcgccaggtcgacgccccgattatccagcaatccaaagcacaaaaatcactacgctggattgtactggatgaagcgcatacctatgtcgggtcgcaggccgctgaactggcactccagctgcgtcgtgtgatgacagcgtttggcgtgacgccagatgatgtgcgctttgtagcgacctctgcgaccattgccggcagcgacgccgaaaagcagctgaaaaaatttctctctgaattatccggtatcccgcaggagcgcatcgatgttctggacggaagtcgggtgattcctgaactggaaccatccaaaaacgtttctgttccgttagacgaaatagagcaaatacctgatctggatctaaaagataaaaatgataataaaattaaagggataagtcctgagcgcttttatgcgctcacgcactcccccgaagcacgttacatacgcgagatgttggtcaaacatcccaatccaatgaagctggatgagatgacagagcggttaaacatactgacaaaacagcatcacagccagcatgaagtactgcgttggatcgacgtctgttcagggacccaacctaatgcaaaggatcccgcatttcttaaagtcagggcgcatatcttccagcgtaatacccagggaatatgggcttgtgtggataaagattgcaggttaaagcacggtacaccgctcgaaaaaggctggccctttggctatgtatatgtgaaccagcgacaaaattgcgattgtggaagccctgtttacgaagtggcgttctgtaatgattgtaatgaacctcatcttctggcgcgggacaaaaagggcaaactagtccagtgggaaaataaaggtggcgatgaattctctttgcaggatgaagtacctgttgaacatgacgctacagcggaaaaagtcgaaaaagagaacagtttccagcctccgttgattattgccgcaggagagaccagcgaggccggttataccctacaacgcctcgaccgccagacgcgccgtattggcgttattaacaatgacagcattccgctgattattaatgatgttgaacaggtttgtagtgccagtggctgtggctacagaggcatgagtgggaaacagcccttccggcgtgcactattaggtgggccattttacgttactaatatcgtgcccaccgttctagagtattgtcaggactttaccagtgatgaaggcaaagagggcgtcggaccagattcgttgccaggacgaggtcgtcgactcatcacctttacagacagtcgacaagggacagcccgaatggcggtgcgtatgcagcaagaagcagaacgcagtcgcttacgcggaagcgtagtcgaaattctcagctggcatcaaaggacgcaaacgtctacagcgccgaatgccaatgccgatctggaaaaattagcgaccagggcgaagcaagcccgtgagcaggcagaagaatatcgaagctggggaatgccagaccaggcgaaattgtcacaagcgcaggctgaacagcttgaacaggcttatcagtttgcaatcggcggaaaagcagcaaccaccctagtatcccgcacctggactgaaatggttaacgagcttaaagataaagccgatatccgtggcccggttctgaaatataactactatttgaagcctgaagtgtttaatgaaaacggcgggcctctaaagctttctgaaatgttgttgttccgggaattcatgcgtcgccctaaacggactaacagcctggaaacacaggggctggttcaggttggttacctgggactggagaaaatacataagctccctatgcactggcaggaaagggaattaacgctggatgactggcgcgattttctcaaggttacgttggatcattacgttcgcgagagcaacttcacacagctggatgatgagctgaaaaactggattggtagccgtttttcatcaaaattcgtccgtaacccggaatcaaaagatcctgaagataatcagaatagacgctggcctcaaattcgtaatggcaacgtatcccatcgtttagcgaagttactgatgctgggggctggattcaaaaccgtcaatacggcgactattgatattatcaatacatggctgaaagaagcatgggcccaacttaccggaccgcttgcagtactgaaacccgatggcaaccgtttttatttaccgaaagagcatatgactttttctttaatcacggatgcctggatttgcccggtaaccaataaaatcctggatacggcttttaaaggcttaaccccttatctgcctacccatatttcgttcgagcatcttacccaggcgcaatatgacacttttgtcgcgcagaaagtcaccatgccggaaatctggaagctggatcgttcacaggaagactacgcagagggtctggcaaaagcacgcgactgggtcagcaatgatccgctgatcgcacaattgcggtcagaaaacgtctggacagacatcaacgatcgtgtcgtggaaggcggtttctactatcgcactgccgagcactctgcccagcagtcgtcagaacgcctgcaaagctatgaaaagatgttcaagaacgggcaactaaatgttctcaactgttccaccaccatggaaatgggggttgatatcgggggcattacagcggtggtaatgaacaatgtaccgccacatcctgccaactatttacagcgcgccgggcgagccgggcgtagtaaagagtcgcgtgcgatctcttacaccctatgcaaaggtaacccacacgaccaacaggtttttgccaacccgctctggccgtttgaaaccatgatcccggcacccatggtcgcgatgaactccgcccgactggtacaacgtcacgtcaatgcattattactgtccgactttttatgtaacgttattggcgaaaccgataaagagaaaaccagcctcgatagcctctggtttttcggtgaagatgacgggcagtcaaaatgcgaacgctttaaaatctggctggaacgcccggttcttgatatcgacacggcgctggaacggctggtgaaaggtacggcgttgcatggtgcaagagctgaacatctgcgggataaaacaatcagcgcgatcaccttcctgcaacagcggtggctctccgtttatcgcgatctcgtgacccaggagcgtgagtcgcagccacaaacgccttatcgtaagcgcatagagctggagaagaaacgacactgtggagagtatctgctgcgcgatctggctgccagaactttcctgccgggatacggcttcccgacagatgtagtgacgtttgataacttcacaatggaagattatatccgcgaaaaattgcaaaaaagtcgtgataaaaaggaccgtgaagataacgtctcccgttataaaggattaccttcccgtaacctcggtgttgccattcgtgaatatgcaccgggagcagagatcattcttgatggccgtgtcttccgctctgccggtgtctcactgcactggcacaatattaatgctgataccaatgaagcccagcgtctggattgtgcctggcgctgtcacaaatgcgggaccattggctatgaagaggggatgagcagttccgggatgctcttttgctccaatagcgcctgcggcgaaaaaataatcatggataatcgccgtcaggtgttgcagcctgccgggtttgtcaccgatgcacacgctccggtaacgaacaatattgaaaccatgaaattcgtcccggttgtccccgcctgggtctttgttaaagcagagcccgtaccgttgcctaacccgctaatgggttatatggcttctggggctgatgggcatgttttccagcaaagtctgggggaaggtggacacggttatgcattgtgtctgagctgtggccgtgcggagtcgatgctgaatgaaaatgatgctccgaaaagtatggaagctcactatccaccgcgtccgggtaaagcggaccgcgacagccagaatcatcgtctgatttgcccaggttcgacggcactcatgaagaacgtcaccctgggcgcactggcgcgcaccgatgtctttgaaatggttctgcgcaaaccgcaaaaaggcgagtatctgccagataacacagaagaggggcggattgtcgctatgactctggcggttgctctgcgtcaggcgctagcgggcgttctgggtatctccggcgcagaactcggctattctgtacgcccggtcagactggaggatgggcaatcggtattagccgttcagctttatgatgtgatcagcggtggtgcaggttttgcctccagcgcaccggtacacattgaagctattttgcagggaatggtgaaacagttaggttgccgccattgtgatactgcatgtagtgaatgcctgcttgattcccagactcgccacgatcacgatttgctggatcgcaaagcggcgctggcctggcttggcgatgacttcacgtattacatcggtttaccggatgaagagacattctcgctgccggatgcccgctactgccctggcgctattggcgatacgattcgccgggcgattaacgaaggcgctgaaaagctcaccctgtggatgaccggcgcgcccaatgagtgggatttatacgcccgtcagttccgcgcggcggttcagagctatcggctaaaagacaacgtcgaggtcgatcttgttatacctgcgggagtggatgacccggatctgttgtatgaactatcgcaatttactgcgctgggtgtgcggctgtgccatgttgaacaggatctgcaattgccgatcgttgcccaggttacctttgccgatcgcgtgatgacgctggcttctcgcagccagcaggcaacgattccggggccggagtggcacctgaatgacgaactggtggtgcgtagtctcggttataaaacggtagaactgaacgagtttattctgccggctaaagccgccaacgctgtcgagcgggtcaaagacattcagatccacaaacagttgaatggaccactttcgcagtttggacaacgcttctgggacgtgctgtttaacgaccatgaagaagcacagtcactgatgaataacacgcgaattaccggcgttcactataccgatcgctatctgcaaaacccggttgcgctggcgttgttgggatcaattctgagaccgctaaaaacaaagctgaccgatggcgctgaagtggcgctggatacgctgtttaaagataaagatcgccccggtaaccggcctttccatgactggatgagcatagcggattttcaggatttcgctgatcagtggtttgctgctgcgctgggcaggccgatagaactaacggtgttcgactcgccgcgcgatatccctcaccatcgtaaactgacggtgacttttgaggatggtcaggttttgaagatccgcttcgatcaggggatgggctactggcgtatcaactttgcatcgcaatggcattactttgacttccgcgatgacgtttctttccagttagtcaaaatggctcaggcctgcaatgaaggaaatgtggccaacagcgaagagagctgggcaacggatgtgctggtggaggtgagcgcctcctga

SEQ ID NO: 28459 - DNA, 3291 bp, Escherichia coli
ttgggtcaatcagaatacatttcatgggtaaaatgtacttcctggctaagtaactttgtgaatcttagagggttgagacaaccggatggccgtcctctttatgaatatcatgcaaccaatgatgaatataaccaattaacgcagctactccgtgcagtcggtcaatcacaatctaatatatgtaataaggactttgctgcctgttttgttcttttttgctctgagtggtaccgcagggattatgaacggcaatgcggatggacgtgggaccctatatataaaaaaatagggatttcatttaccgccacagagcttggtaccatcgtaccgaaagggatggacgattactggctgcgcccaattcgattttatgaatctgaacgacgcaattttctcggaacattattcagtgaaggtggtttacctttccggttactcaaagaatcagacagtcgctttctggctgttttctccaggatccttggacaatatgagcaagcaaagcagtcaggtttttctgccctttcgctggcaagagccgtcatagaaaaatcagcgctgccaactgtttttagcgaagatacttctgtagaacttatcagtcatatggctgataacctcaattccttagtacttactcacaacctaataaatcacaaagaaccagtacaacagcttgataaggttcaccctacctggcgaagcgagtttccaataccgttagatgatgaaacaggaacgcattttttgaatggactgctatgcgcagcctctgtagaggctaagcctcgactacaaaaaaataagagtacgcgttgccaattctattggtcagaaaagcatccagatgagcttagggcgatagtatctctccctgacgaagtttcctttcctgtaacaagcgagccgtcaactacgcgctttgaacttgccatttgtgaagatggtgaggaagtctctggccttgggccagcttatgcttccctggaaaacagacaggcaacagttcgattacgtaaaagcgaagtgagatttgtcaggcaaaatccatcggcaggtttgtcgttagtggctcgtgctggagggatgattgttgggagcattaaacttgatgacagtgaaattgccattggtgaggtgccgttaaccttcatcgttgatgcagatcaatggctgttacagggacaggcctcctgtagtgtgcaaagcagcgatgttctgattgtgctccctcgggacaatagtactgttgctggttttgatggccaatcgagtgcagtaaacgtattaggacttaaagcgctgcctgttaagggatgtcaggacgttacagttacagcaaatgaaacttatcggattcgcaccggaagagaacaaatcagcatcggaagatttgctctaaatggaaagcgtgcaagctgggtttgtcatccagatgagacatttattggtgtaccaaaagtcatttctacactaccagatattcaaagcattgatgtaacgcgttacctgagcggaatttcaattgagcaatgtcatatacaagagatgctgggggctcaatatctttctatccgtaatagtaataatgaaacgctcttgcgtcgcaaaatcggtatcttgcctgctgatttcagtattgagataaaaggtggaatgcacgcaaatgaaggcactatcgtaatcaccacacagcatccttgtgtagcaaaacttaaagataaaacattggaggctacacgtaagcgtactgaggggcgaacagagatacaacttaaagcggaaggggtacctccggcatttattacattacaagttctgcctaatttggcggctgaccccatcgacattgagttaccttttcccgctaaaggctgtctcgctcttgatgtaaacggacgtcctctggataaaaacattacgctgcatgatctgctgggttccagagcgtttctgttctccagaaatggtgagccgacaaaatatacattgcagttgtatttgcgctccgttagtggattacaggcatggcatgaatggtgttatacggcgttgagcgatcgtcctgttgaattgaatctctatagtctgcgcgaacatattgagaacctgatttcacttgaggcaggtattgatcaggttgttgagatgcgtattacgggggcaggtgtggtcatggcctggcaaattcgtcgctataaatacagcctgcgctatgattatgaaaaagaactattactcagccagtcagtgaaccatcgtgctgggcagattccttcccccgttatcatgctgttaagtgaacccgagaggaaatccattcccttagcatctagaatgagcgagggagtgcctgtcggtgaatatgagttgagctcaatcgttaacaaaaatggaccgtggttggttgtccctaaaccgggtgaagagatggcttttcgtccctacttcattcgtggcgaatcttcgttaccggtagaagaaagcaacatccgctcattgcagaaagcgacccagctttttaatccacaggcagaagttaataccatcacacgggttctcggacagatggctaacgatcctgcccattccggctggcaatttatgcgtagcctgtacgatcaattcgggtatttaccactggcaacctttgaagtatggcgtgcactggtgcagcatccgcaggcattggcaatgtcgctcttcaaatttgaaatgtcagcagagtacctgagtcgtattgagaatgagttccctattttatgggagtttttccccatctttgagatcaaagctgcatctgagcgtttcaaattgttcctgagccaaaaaggtgcaccggaggaaacccaaaaattactggttactaatatgtttcaacggctggggctcgtgttcccgacatatgccgatgaaattgagaaatggttaagtaacggatatctccctccgtctattcctgaatcttgtgtccacgggtggtatcaggagctcttacgtgagcacagtgaggctcgctggcctgaatatggctgtaagcgtctgtatgaatggatgatgtcacaaaaaaatccagtgattggtattaatcctgatgcagattaccgctattccgtggcctggttacccgtcttcgccgcagcggtggcaagcggaaatgcttcttttgaatctgtatttgaccgtaaacccggtgccgtatttttcctgaggcaagtcagggatttcgattcccgctggtttaaggccatcttcctgtgcagcctgttgcgttatgttgctaaaaaataa

SEQ ID NO: 28460 - DNA, 6315 bp, Escherichia coli
atggacgttcagcaactgcattatgcgccacttctaaatcagcttcatcagcgtgcggtgaggtcggtggtaagtcagttggcattgcggagcaagtcgttgactcattatctggaatcacaatattttcagcctcccggtcaggaggggtcactgcttgcagacccggtattcgaaagtacattcggctggatgcctgcggatgaaacaatggaggatttgcgggacaagctgatctccagcccgctggttgatgcattgagcaaagcgccagtgccatttcgtcatcaacttactgcgtggcgaacgattctggaagacaaaaaatccttgttagtgagcagcggtacgggatccgggaaaacagaatgctttatggtaccggttctggaagatcttattcgtcagcaaaaatcgacccgccagtcactaacagggacacaagctattttcttgtatccgttaaatgcattaattaacagccaacaggagcggcttcgcgaatggacgcgcggatttaaggggaaaatacgcttcgcgctatataatggcgaaacccggcataccaaatacgaaattcaggaagatcagttgaaagtacctgaacaagctttgagtcgggaagccatttatgaagcaccaccttccatcatggtgacgaataccaccatgctggaatatatgctgattcgtcgtaaagatgccccaatcatcgaaaagtctcaggggatgttaaagtatatcgtcctggatgaagcccatagttatattggttctcaggctgctgagttagcgctgcttttacgtcgtgttatgcaggctttcaatgttggacccggcacagataaacctgtgcagattatcgcgacctctgccactattggtgaagactctcctgaaggtaataaggagcttgctaaatttgtcgctgatctcgcgggcgttacagaacgtgatgtcaaagtggttcgcggttatcgacaaataccgcgggtatcggagtcgctgattcgtcatgaataccccacatctttaacttctcttaaatccctgagccctcaggatctttaccaacagctttgtcattaccgtgtggcccagcaattgcgtcaggcgttaactcatcccggacggcaggcagtacgtttgagtgagttgctcaatgttgccagaagaacctggccagatattaatcaccgtgagctactgcaactcctcgatctaatggcaagatcgcgagaaggtgaactggcttttacgccattacgtatgcatgggtttatcagaacactggcgggtctatgggcatgttcaaacaaacaatgctcacataaagcacatgaattaaatcagagtgactggccatttggtcaggtatggtttgagcagcgccaatattgtgactgtggagcgccggtatttgaagttttacgttgctccgggtgtggttcagcttatttgtctgccaaagaggagatgcgcggtgatggaacgaactggttggtagcgcaaccagccgctgccgaagtggatgagtttgctcttgatgtagatgtttattctgaagatgaagacaacgacgaattagacaataactctcaatttgatcgtctgattgcgagcgatggtgaaaaatatatcatttcactggaagaaacgacggcggggaaaattgatagtgaagcgcaaaagcactatgaaataaacctgttaagaccggaatctcgaggtgagggacgcaataactcctttgcttgtgtttgctgtggtgacactcaacggaaaaataatcctttattccgtccgcttcggctcggcgcgcccttttttttaaatgaaattattcctactctgctggagttttctccattaccgcaaacaagagaagagcagttaggaccgtttaatggtcgacgcttgctcacctttacggattcgcgtcagggtaccgctcgcatttcagcccgcttacagcaggatgccgataaagcgacgttgcgagctctttgttaccaggagctggcaaatattacagagccttcagcaaaactcagcccggcacactgtgcactgttagagaaagttattagccagttttctgtcctccctttaaaaaattccatcgacgcgctgaaaaaagcgatggctgcgaatgaggagcttagcccgacggacattcaggcacttaaaattattgagccgatggtgagttccttaagcacggagcatgctgaagcgatgcaaatacttcaggctaactctggcaatcagcagaagaaaaccatgtcatggcaaacgctgtctgaacagctggttggcagtgtggaccttgccgatagaatgagaggcagttttaaagaattgtctgggcttgatcttactaaacaacagtttgcagatttttgtttatacagcgagtttggtcgccgccctaaaaatgcctggaccctcgaaagtctgggtctggtagccattcactatccattcattgataaagttacaacctgcccgcaggactggaagacattattacccgatcccgataagcaattagcggaatggcgtaatttattgaagattactcttgatttctttatccgtgaaaacagtgccgttttttacgaaaacgagcaataccctcgctggatgggggcacgtttcccggtaaaaatgctccaggggccagataaaaaaaacaaagggcagaaacgtgatcaactttggccacaaatacgcgatcgccattataaccgggtcattaagctattaatcgcagtctttccggcaatacaacctgagcaggctcactggaaatcgttagttaaccacttaatgattgaggtctgggatgcaattcgaccctgcttacgtcagtttgagtcgggttatcagctggatattaaacaacaagctgaattttacagtccaaagcaagtgtggcgttgcccctatactcgacgtgcgttagacgtcacgttgctgggatactctccgtatttgccgggtagcaaagaaattgcacctgaaaaagcagtgttgattgaaatgcctgagcttcctgtacgtcactggcgtttgtctggtggtggagaaatcgcccgagaagaacgtctggagtggctggaaagtaatgcgctgattcaacatgcccgcgaggaaggattatggtctactcgcagcgaccgactggccctgaaagatagctggtatcgtctggaggaacactctgcgcagagaacgcctgagcagaaccagtttaatgaaaaacaatttaagtcaggcaaagttaatgtgctgaactgttccacgaccatggagatgggggtggatattggtggtatgagtttggtggcaatgaacaacgttcctccagcgccggcaaattatttgcaacgtgcaggtcgcgcggggcgtcgtggagagagtgcatctgctgccattacgttatgtaaaaacacggcgcatggaatggaggtattcaaagaccccctctgggcgttcaacactactgccagtgcgccacgggttcgttttgggagcagtagtattgttcaacgacatgttaatgccctggttttaggtatgtttttacgagctgaagttcctgatgcgacaaaactgagttgcaaatggttctttgaaggtgatgagagccagtgtcttcgttttcttcattggttaaatcaccaggccgatgagctggcggataaacttaaacgccttactcagggaaccgtcctgatgtcattgacggcaacccagctcttgacccgcacacaagcaatgatgcagcaggttgatatccgctggagaagccaacttgcgatactgttggaaaatatcgaagcgttgaaggcggataacagcgcgtgggaagaaacgccagcaggtaaagccatcgcttatcagcttcgtgattatcgcggtgcatatctgttttctaaactcattagtgaagcgttcctgccggggcatggtttcccggttggcgtagtcaatttcaattatctgacggcagatgagctggaaaaacgtcgcgcaataaaagccactcaggctgaccctaatgaagggggagaaagcttttctcgtcatattgaaaaattgcccagccgtgatttgcctacagcattacgcgagtatgcgcctggtgcagatgtggtattgggcggaaaagtatatcgttcctcgggcattatgcttggcaaggtgcttgccagcgggcaggagctgtcaggcgatcatcatattccgtggttctggcattgccgtaaatgtggtgcgggggcaaccagtactacccatcctgtcgaatgtagtcactgcaaagcggatatacagcaacttgatgtgaagcgttatttacagcctgttggttttgcgacagatattcgttatcaggcacataatgatgtatccatgcctgcacaacttccctggaaagatccacgtgttcttgtaccgtcttcggtgtgggtttctttacccgatgctgggctaggacgttaccgtttaagccatagtggggaattgttccacttcagtgaaggggaatttgggcacggctacgcaatttgcctctcatgtggtcgggcagaatctcaaactcaaccccagcgtacccctgaaaatctaaagaacccagagctggaaaatacgcattacctgttgcgagggggcagtaacgatcgtcaggggagcaataaattgtgccacggtcatgtgcataaagatctgtggttggggtatagcagtcgtacagatatggttgagctgcaacttaatgatgataatgacctgttgatccgtgatgaggttgccgcgcgttcccttgcggtcgctttgcgtgaagggttagcgcataaattgggtatcgaaaatactgagctgggcgtgacgacgcagcaagcgcgcgatatcaatggctataccggatattccatcttcatatacgacaataatgcgggtggtgcaggttatgcagtgcaattgatcgaccattgggctgatgtctttaattacgccagaaaattgctcgattgcagttgcgataaattttgtcaccactgcttgctcagctacgacagtcagcattatgtcaacagattagatcgtcaccatgcattaaccctgcttaccaatgtacggttgcagcgacttaacctcgcgccagaatatcagtacttcggcgatggtagccgggttgaaactaaccctctgagtttacgtattgcgcaatgcctgaacagggagatttatgactcctgctcgctggttcttgcggggccgcaggaacagtgggactttgcccaatggccattatttaaagagttgctccagtttgcctcctccggtgggaatgttgagttgctggtggccacgccgctggaaaacttaactgatagctccagacatcagctttccgcgttggcggcgatgccgggaggacgcttacaagtgaaatccattgccactgcgcaactcatgcaaggaaaggggcgctggcttgcgcaggtgactcgcgaagggcaaagccaacagtgggccgcagacgacagcgctaccgttgcccctggtgaattatggggacaaagtgcgtcttcaccagtagtgacacttaaaggaacgtccggaaaaaccttctcgggtcagaccttaagtgcagaagatttactgcccgccttacccaccggggcggtgcgcatcaatctctgtgaacaactggacgggccgctggaaggttttggttcgcgtttctggtcgttagtcacgcaacagcacgctggctggaagcaggcatttacccgccacaaagagataacgcatgttgagtacagcgatcgttatcttaatagcccattcacggcgcgtttgttaggtgaaatcttaaccgagctggttgaacagggaatggcggaacgcgccagcctcactgtttgcgtcaaaaaattggattacaactctcgccaacacgacgctctctataacgcgtggcttaatgaggaagatcgtcagcaggttgtgaccactttacttgaagaaggatatctggggcctgcgtggccgggagcaattagctggttaacgggggataaccagagtacggagcatggacgagagctgacagtcaccttcagcgatggcagtcagcattatgtcctgctcgacatggggcttagctactggcgctgtattgaagataccttctttgattttgccctgcgagtaccgcagcaagttgaacggctggcaaacacgcgagcgcgagctgttgccccgggtaatgaccttaggagttatattatcgctggataa

SEQ ID NO: 28461 - DNA, 2937 bp, Escherichia coli
atgattgaaaatgagagcggttatttgattacctatttcagaaggatatatcaggcgcttcgtgggcaatcatctcaatatcctgccgctaaaattgcacaagaattaggcgatacgattcctgtcacaatgcaaaacgaactggtctatgaaatagccggtgaattctgcgagactctctgccgattacttagtgagcatcctcctcatagcagtgatcccgtttctgcattacgtaagctctctccagactggcatcttcaacttccactcgttctccccgaagcgaatgctgcagagattgtaaggcgattactttctcaatcttctgaaatacgcagtgcaagtagtcttcaggttgaaagaatctgggtcgatgttgatgacagttggtattgcgatgcccggttccgattcccggccacaatgcgtacagaacagttaacctctttgtttgaatgccatattcagccggagcagacccgactcatcatttcaggaaaatggaaaaatggcggggcaaggttggcaatgctaagccgttatgagcagcaagattggcgggtcgagttattacctattgcgatgcaaaaactctctggtgcagatgcaatggccgaaatctcattgtcgcttcatgaaggtccaattctgttaggtcacacaattccaaaaggcggttatgaacttactgaagaacttccctgggtttttgaagcgatgaatgagagtgaatcgcagctaaaacttgttggtatggggtctgtgggttccaggctaaatgctctgtttatttcgctaccgaaaaatagccatttagatattagtggagaaggtgagtttgatatcccaaggttgctgaaaaacagtgaacgcagcttaactaaaataagtggagtatttagcgttgttttacatgatggtgctgtttgtacaattcgcacccagcaactttatgattctgcgattgaatattatattaaatcgacagaagttgaactggttaaatcggattatcctgtccatcgagcctggccgaagatcggttggaaaaaggatctgcaatatggcattgtaccggagaaagaacttttttggcgttccattcgttcaggtaataatgcctggtattctgtcgcatcagaaatgccaaaaggacagatagaagtccggcgaatagttaatgatgaggttttatttagcggtaaagttgtagttttaccagcagacttcgatattaatattatacctgagagtgctcagcaaggcattattatgctttctggtataacggatactagaattgataaatattcaaacaatgaaaaagtaacacttaagtccgattattcacaaaacgagtgtgctatttattataattcatcgctgatgctggaaaataccgttgatttacgggtctcctggaaagatggttctaatcttaaactattattacctaagccggttagcggtggccgatttgtaactaatgatggttctgttcattttgatggtgtggcatctatagcacatttgcatggaatagatgctgagttattaaccatatcatgtgctggaagaggatatcttaatatcgagttattggatgaaaatccagtagctgaaaaattccgctatttacatgccgaccttcctcttttatcaggactcaatgacaaattacaacaaatttcactttatgagaactataatttgctaaatgctatgctggcatgtgcatggaacagcaatagtacattatgtgttgatttttactctgacagatttggaaaggataaagcaacactcaatattaaacgctacgatggtagttttattgaacacgatcaagggttactggttgatataaaaaattctgttgtttttcctgcaaatagaatagacgaactggttgttgatgctatttctcttaagaatcctggcttacacatatcattgttaaaaaaagatgagtttgcttatgatctttcagctctgaatgttcaggatagtccatggttaattgtgggaaaacttgatggtacagctcgcattgcaccagtaattaaatggatgctacctgtattgcagacaaatgatttattactaaatgctctatgcgaagcagacccagaacagcgcaaaaaaaattttaatgagctaatttttgaaatagataacaacccattgcaaaattattgctgtttattaacagagtatattaaggaatacaaaatgaataatggcttatccttgctggatctggacttgttcagatgtatttcgagtaattaccgcgtggttgttcaattgttaatatcatcatgtctttctggtgatagcgatacgatttatgatatacaggaagaattacccttttcatggggatggattcccgtttcaatctggaaagatgttttccaaaaatgttggacttatctggagaaacagattaacgataaaacattagcattacatatattgcaaccctttattgcttttatgaaccatcgtgcacatatcgatcgtcggctggctccgattgcgaatatgttacttacatatagtgagagcctaccaaccggttgtgatgtattgccaactgttagtcgtgagcagtttaatgaagctaaacagatgctattaaggaaccccgacagctttgggcgtatcagtatcttccctaaagaactttggtctagtgctattactccagagttaaaatctgtttttaataagctttggattgaagataaatatcactcacggcttgaaaaacgttttaatttgatgttagtcgcagcgctgttaacccaaaaagataataacctgatacatcaactgtctgcgctttttgaatttcactatcagcaagccccacagcaattaggggtaatctatcaatattattttgaacaagcaggagtatgtcattga

SEQ ID NO: 28462 - DNA, 6345 bp, Escherichia coli; identical to SEQ ID NO: 28446

SEQ ID NO: 28463 - DNA, 3339 bp, Escherichia coli
atgttgtggggttttgtttttgtatcttttatctctaaggagcttgctttgggtcaatcagaatacatttcatgggtaaaatgtacttcctggctaagtaactttgtgaatcttagagggttgagacaaccggatggacgtcctctttatgaatatcatgcaaccaatgctgaatataaccaattaacgcagctactctgtgctgttggtcaatcacaatctaatatatgtaatagagactttgctgcctgttttgttcttttttgctctgagtggtaccgcagggattatgaacggcaatgcggatggacgtgggaccctatatataaaaaaatagggatttcattcaccgccacagagcttggtactatcgtaccgaaagggatggaagattactggctgcgcccaattcgattttatgaatctgaacgacgtaattttctcggaacattattcagtgaaggtggtttacctttccggctactcaaagaatcagacagtcgctttctggctgttttctccaggatccttggacaatatgagcaagcaaagcagtcaggtttttctgccctttcgctggcaagagctgtcatagaaaaatcagcgctgccaactgtttttagcgaagatacctctgtagaacttatcagtcatatggctgataacctcaattccttagtacttactcacaacctaacaaatcacaaagaaccagtacaacagcttgataaggttcaccctacctggcgaagcgagtttccaataccgttagatgatgaaacaggaacgcattttttgaatggactgctatgcgcagcctctgtagaggctaagcctcgactacaaaaaaataagagtacgcgttgccaattctattggtcagaaaagcatccagatgagcttagggtgatagtatctcttcctgacgaagtttcctttcctgtaactagcgagccgtcaactacgcgctttgaacttgccatttatgaagatggtgaggaagtctctggccttgggccagcctatgcttccctggaaaacagacaggcaacagttcgattacgtaaaagcgaagtgagatttgtcaggcaaaatccatctgcaggtttgtcgttagtggctcgtgctggagggatgattgttgggagcattaaacttgatgacagtgaaattgccattggtgaggtgccgttaaccttcatcgttgatgcagatcaatggctgttacagggacaggcctcctgcagtgtgcgaagcagcgatgttctgattgtgctccctcgggacaatagcactgttgctggttttgatggccaatcgagtgcagtaaacgtattaggacttaaagcgctacctgttaagggatgtcaggacgttacagttacagcaaatgaaacttatcggattcgcaccggaagagaacaaatcagcatcggaaggtttgctctaaatggaaagcgtgcaagctgggtttgtcatccagatgagacatttattggtgtaccaaaagtcatttctacactaccagatattcaaagcattgatgtaacgcgttacctgagcggaatttcaattgagcaatgtcatatacaagagatgctaggggctcaatatctttctatccgtaatagtaataatgaaacgctcttgcgtcgcaaaatcggtatcttgcctgctgatttcagtattgagataaaaggtggaatgcacgcaaatgaaggcactatcgtaatcaccacacagcatccttgtgtagcaacacttaaagataaaacattggaggctacacgtaagcgtactgaggggcgaacagagatacaactcaaagcggaaggggtacctccggcatttattacattacaagttctgcctaatttggcggctgataccatcgacattgagttacctttcccagctaaaggctgccttgctcttgatgtaaacggacgtcctctggataaaaacattacgctgcatgatctgctgggttccagagcattcctgttctccagaaatggtgagccgacaaaatatacattgcagttgcatttgcgctccattagtggattacaggcatggcacgaatggagttatacggcattgagcgagcgtcctgttgaattgaatctctatagtctacgtgaacacattgaaaatctgatttcacttgaggcaggtattgatcaggttgttgagatgcgtattacgggggcgggtgtggtcatggcctggcaaattcgtcgctataaatacagcctgcgctatgattatgaaaaagaactattactcagccagtcagtgaaccatcgtgctggacagattccttcccccgttatcatgctgttaagtgaacccgagaggaaatccattcccttagcatcaagaatgagcgagggagtgcctgtcggtgaatatgagttgagctcaatcgttaacaaaaacggaccatggttggttgttcctaaaccgggtgaagagatggcttttcgcccctgcttcattcgtggcgaatcttcgttaccggtagaagaaagcaacatccgctcattgcagaaagcgacccagctttttaatccacaggcagaagttaataccatcacacgggttctcggacagatggctaacgatcctgcccattccggctggcaatttatgcgtagcctgtacgatcaatttggttatttaccgctggcaacctttgaagtatggcgtgcactagtgcagcatccgcaggcattggcgatgtcgctcttcaaattcgaaatgtcagcagagtatctgagtcgtattgagaatgagttccctattttatgggagtttttccccatctttgagatcaaagctgcatctgagcgtttcaaattgttcctgagccaaaaaggtgcaccggaggaaacccagaaattactggttaccaatatgtttcaacggctggggctcgtgttcccgacatatgccgatgaaattgagaaatggttaagtaatggatatctccccccgtctattcctgaatcttgtgtccacgggtggtatcaggagctcttacgtgagcacagtgaagctcgctggcctgaatacggctgcaagcgtctgtataaatggatgatgtcacaaaaaaatccagtgattggtattaatcctgacgcaaatcaccgctattccgtggcctggttacccgtcttcgccgcagcggtggcaagcggaaatgcttcttttgaatctgtatttgaccgtaaacccggtgccgtatttttcctgaggcaagtcagggatttcgattcccgctggtttaaggccatcttccagttcagcctgttgcgttatgttgctaaaaaataa

SEQ ID NO: 28464 - DNA, 6315 bp, Escherichia coli
atggacgttcagcaactgcattatgcgccacttctaaatcagcttcatcagcgtgcggtgaggtcggtggtaagtcagttggcattgcggagcaagtcgttgactcattatctggaatcacaatattttcagcctcccggtcaggaggggtcactgcttgcagacccggtattcgaaagtacattcggctggatgcctgcggatgaaacaatggaggatttgcgggacaagctgatctccagcccgctggttgatgcattgagcaaagcgccagtgccatttcgtcatcaacttactgcgtggcgaacgattctggaagacaaaaaatccttgttagtgagcagcggtacgggatccgggaaaacagaatgctttatggtaccggttctggaagatcttattcgtcagcaaaaatcgacccgccagtcactaacagggacacaagctattttcttgtatccgttaaatgcattaattaacagccaacaggagcggcttcgcgaatggacgcgcggatttaaggggaaaatacgcttcgcgctatataatggcgaaacccggcataccaaatacgaaattcaggaagatcagttgaaagtacctgaacaagctttgagtcgggaagccatttatgaagcaccaccttccatcatggtgacgaataccaccatgctggaatatatgctgattcgtcgtaaagatgccccaatcatcgaaaagtctcaggggatgttaaagtatatcgtcctggatgaagcccatagttatattggttctcaggctgctgagttagcgctgcttttacgtcgtgttatgcaggctttcaatgttggacccggcacagataaacctgtgcagattatcgcgacctctgccactattggtgaagactctcctgaaggtaataaggagcttgctaaatttgtcgctgatctcgcgggcgttacagaacgtgatgtcaaagtggttcgcggttatcgacaaataccgcgggtatcggagtcgctgattcgtcatgaataccccacatctttaacttctcttaaatccctgagccctcaggatctttaccaacagctttgtcattaccgtgtggcccagcaattgcgtcaggcgttaactcatcccggacggcaggcagtacgtttgagtgagttgctcaatgttgccagaagaacctggccagatattaatcaccgtgagctactgcaactcctcgatctaatggcaagatcgcgagaaggtgaactggcttttacgccattacgtatgcatgggtttatcagaacactggcgggtctatgggcatgttcaaacaaacaatgctcacataaagcacatgaattaaatcagagtgactggccatttggtcaggtatggtttgagcagcgccaatattgtgactgtggagcgccggtatttgaagttttacgttgctccgggtgtggttcagcttatttgtctgccaaagaggagatgcgcggtgatggaacgaactggttggtagcgcaaccagccgctgccgaagtggatgagtttgctcttgatgtagatgtttattctgaagatgaagacaacgacgaattagacaataactctcaatttgatcgtctgattgcgagcgatggtgaaaaatatatcatttcactggaagaaacgacggcggggaaaattgatagtgaagcgcaaaagcactatgaaataaacctgttaagaccggaatctcgaggtgagggacgcaataactcctttgcttgtgtttgctgtggtgacactcaacggaaaaataatcctttattccgtccgcttcggctcggcgcgcccttttttttaaatgaaattattcctactctgctggagttttctccattaccgcaaacaagagaagagcagttaggaccgtttaatggtcgacgcttgctcacctttacggattcgcgtcagggtaccgctcgcatttcagcccgcttacagcaggatgccgataaagcgacgttgcgagctctttgttaccaggagctggcaaatattacagagccttcagcaaaactcagcccggcacactgtgcactgttagagaaagttattagccagttttctgtcctccctttaaaaaattccatcgacgcgctgaaaaaagcgatggctgcgaatgaggagcttagcccgacggacattcaggcacttaaaattattgagccgatggtgagttccttaagcacggagcatgctgaagcgatgcaaatacttcaggctaactctggcaatcagcagaagaaaaccatgtcatggcaaacgctgtctgaacagctggttggcagtgtggaccttgccgatagaatgagaggcagttttaaagaattgtctgggcttgatcttactaaacaacagtttgcagatttttgtttatacagcgagtttggtcgccgccctaaaaatgcctggaccctcgaaagtctgggtctggtagccattcactatccattcattgataaagttacaacctgcccgcaggactggaagacattattacccgatcccgataagcaattagcggaatggcgtaatttattgaagattactcttgatttctttatccgtgaaaacagtgccgttttttacgaaaacgagcaataccctcgctggatgggggcacgtttcccggtaaaaatgctccaggggccagataaaaaaaacaaagggcagaaacgtgatcaactttggccacaaatacgcgatcgccattataaccgggtcattaagctattaatcgcagtctttccggcaatacaacctgagcaggctcactggaaatcgttagttaaccacttaatgattgaggtctgggatgcaattcgaccctgcttacgtcagtttgagtcgggttatcagctggatattaaacaacaagctgaattttacagtccaaagcaagtgtggcgttgcccctatactcgacgtgcgttagacgtcacgttgctgggatactctccgtatttgccgggtagcaaagaaattgcacctgaaaaagcagtgttgattgaaatgcctgagcttcctgtacgtcactggcgtttgtctggtggtggagaaatcgcccgagaagaacgtctggagtggctggaaagtaatgcgctgattcaacatgcccgcgaggaaggattatggtctactcgcagcgaccgactggccctgaaagatagctggtatcgtctggaggaacactctgcgcagagaacgcctgagcagaaccagtttaatgaaaaacaatttaagtcaggcaaagttaatgtgctgaactgttccacgaccatggagatgggggtggatattggtggtatgagtttggtggcaatgaacaacgttcctccagcgccggcaaattatttgcaacgtgcaggtcgcgcggggcgtcgtggagagagtgcatctgctgccattacgttatgtaaaaacacggcgcatggaatggaggtattcaaagaccccctctgggcgttcaacactactgccagtgcgccacgggttcgttttgggagcagtagtattgttcaacgacatgttaatgccctggttttaggtctgtttttacgagctgaagttcctgatgcgacaaaactgagttgcaaatggttctttgaaggtgatgagagccagtgtcttcgttttctccattggttaaatcaccaggccgatcagctggcggataaacttaaacgccttactcagggaaccgtactgatgtcattgacggcaacccagctcttgacccgcacacaagcaatgatgcagcaggttgatatccgctggagaagccaacttgcgatactgttggaaaatatcgaagcgttgaaggcggataacagcgcgtgggaagaaacaccagcaggtaaagccatcgcttatcagcttcgtgattatcgcggtgcatatctgttttctaaactcattagtgaagcgttcctgccggggcatggtttcccggttggcgtagtcaatttcaattatctgacggcagatgagctggaaaaacgtcgcgcaataaaagccactcaggctgaccctaatgaagggggagaaagcttttctcgtcgtattgaaaaattgcccagccgtgatttgcctacagcattacgcgagtatgcgcctggtgcagatgtggtattgggcggaaaagtatatcgttcctcgggcattatgcttggcaaggtgcttgccagcgggcaggagctgtcaggcgatcatcatattccgtggttctggcattgccgtaaatgtggtgcgggggcaaccagtactacccatcctgtcgaatgtagtcactgcaaagcggatatacagcaacttgatgtgaagcgttatttacagcctgttggttttgcgacagatattcgttatcaggcacataatgatgtatccatgcctgcacaacttccctggaaagatccacgtgttcttgtaccgtcttcggtgtgggtttctttacccgatgctgggctaggacgttaccgttttagccatagtggggaattgttccacttcagtgaaggggaatttgggcacggctacgcaatttgcctctcatgtggtcgggcagaatctcaaactcaaccccagcgtacccctgaaaatctaaagaacccagagagggaaaatacgcattacctgttgcgagggggcagtaacgatcgtcaggggagcaataaattgtgccacggtcatgtgcataaagatctgtggttgggatatagcagtcgtacagatatggttgagctgcaactcaatgatgataatggcctgttgatccgtgatgaggttgccgcgcgttcccttgcggtcgctttgcgtgaagggttagcgcataaattgggtatcgaaaatactgagctgggcgtgacgacgcagcaagcgcgcgatatcaatggctataccggatattccatcttcatttacgacaataatgcgggtggtgcaggttatgcagtgcaattgatcgaccattgggctgatgtctttaattacgccagaaaattgctcgattgcagttgcgataaattctgtcaccactgcttgctcagctacgacagtcagcattatgtcaacagattagatcgtcaccatgcattaaccctgcttaccaatgtacggttgcagcgacttaacctcgcgccagaatatcagtacttcggcgatggtagccgggttgaaactaaccctctgagtttacgtattgcgcaatgcctgaacagcgagatttatgactcctgctcgctggttcttgcggggccgcaggaacagtgggactttgcccaatggccattatttaaagagttgctccagtttgcctcctccggtgggaatgttgagttgctggtggccacgccgctggcaaacttaactgatagctccagacatcagctttccgcgttggcggcgatgccgggaggtcgcttacaagtgaaatccattgccactgcgcagctcatgcaaggaaaggggcgctggcttgcgcaggtgactcgcgaagggcaaagccaacagtgggccgcagacgacagcgctaccgttgcacctggtgaattatggggacaaagtgcgtcttcaccagtagtgacacttaaaggaacgtccggaaaaaccttctcgggtcagaccttaagtgcagaagatttactgcccgccttacccaccggggcggtgcgcatcaatctctgtgaacaactggacgggccgctggaaggttttggttcgcgtttctggtcgttagtcacgcaacagcacgctggctggaagcaggcatttacccgccacaaagagataacgcatgttgagtacagcgatcgttatcttaatagcccattcacggcgcgtttgttaggtgaaatcttaaccgagctggttgaacagggaatggcggaacgcgccagcctcactgtttgcgtcaaaaaattggattacaactctcgccaacacgacgctctctataacgcgtggcttaatgaggaagatcgtcagcaggttgtgaccactttacttgaagaaggatatctggggcctgcgtggccgggagcaattagctggttaacgggggataaccagagtacggagcatggacgagaactgacagtcaccttcagcgatggcagtcagcattatgtcctgctcgacatggggcttagctactggcgctgtattgaagataccttctttgattttgccctgcgagtaccgcagcaagttgaacggctggcaaacacgcgagcgcgagctgttgccccgggtaatgaccttaggagttatattatcgctggataa

SEQ ID NO: 28465 - DNA, 2937 bp, Escherichia coli; identical to SEQ ID NO: 28445

SEQ ID NO: 28466 - DNA, 6315 bp, Escherichia coli; identical to SEQ ID NO: 28464

SEQ ID NO: 28467 - DNA, 2937 bp, Escherichia coli; identical to SEQ ID NO: 28445

SEQ ID NO: 28468 - DNA, 6315 bp, Escherichia coli; identical to SEQ ID NO: 28464

SEQ ID NO: 28469 - DNA, 2937 bp, Escherichia coli; identical to SEQ ID NO: 28445

SEQ ID NO: 28470 - DNA, 6315 bp, Escherichia coli; identical to SEQ ID NO: 28444

SEQ ID NO: 28471 - DNA, 2937 bp, Escherichia coli; identical to SEQ ID NO: 28445

SEQ ID NO: 28472 - DNA, 6315 bp, Escherichia coli
atggacgttcagcaactgcattatgcgccacttctaaatcagcttcatcagcgtgcggtgaggtcggtggtaagtcagttggcattgcggagcaagtcgttgactcattatctggaatcacaatattttcagcctcccggtcaggaggggtcactgcttgcagacccggtattcgaaagtacattcggctggatgcctgcggatgaaacaatggaggatttgcgggacaagctgatctccagcccgctggttgatgcattgagcaaagcgccagtgccatttcgtcatcaacttactgcgtggcgaacgattctggaagacaaaaaatccttgttagtgagcagcggtacgggatccgggaaaacagaatgctttatggtaccggttctggaagatcttattcgtcagcaaaaatcgacccgccagtcactaacagggacacaagctattttcttgtatccgttaaatgcattaattaacagccaacaggagcggcttcgcgaatggacgcgcggatttaaggggaaaatacgcttcgcgctatataatggcgaaacccggcataccaaatacgaaattcaggaagatcagttgaaagtacctgaacaagctttgagtcgggaagccatttatgaagcaccaccttccatcatggtgacgaataccaccatgctggaatatatgctgattcgtcgtaaagatgccccaatcatcgaaaagtctcaggggatgttaaagtatatcgtcctggatgaagcccatagttatattggttctcaggctgctgagttagcgctgcttttacgtcgtgttatgcaggctttcaatgttggacccggcacagataaacctgtgcagattatcgcgacctctgccactattggtgaagactctcctgaaggtaataaggagcttgctaaatttgtcgctgatctcgcgggcgttacagaacgtgatgtcaaagtggttcgcggttatcgacaaataccgcgggtatcggagtcgctgattcgtcatgaataccccacatctttaacttctcttaaatccctgagccctcaggatctttaccaacagctttgtcattaccgtgtggcccagcaattgcgtcaggcgttaactcatcccggacggcaggcagtacgtttgagtgagttgctcaatgttgccagaagaacctggccagatattaatcaccgtgagctactgcaactcctcgatctaatggcaagatcgcgagaaggtgaactggcttttacgccattacgtatgcatgggtttatcagaacactggcgggtctatgggcatgttcaaacaaacaatgctcacataaagcacatgaattaaatcagagtgactggccatttggtcaggtatggtttgagcagcgccaatattgtgactgtggagcgccggtatttgaagttttacgttgctccgggtgtggttcagcttatttgtctgccaaagaggagatgcgcggtgatggaacgaactggttggtagcgcaaccagccgctgccgaagtggatgagtttgctcttgatgtagatgtttattctgaagatgaagacaacgacgaattagacaataactctcaatttgatcgtctgattgcgagcgatggtgaaaaatatatcatttcactggaagaaacgacggcggggaaaattgatagtgaagcgcaaaagcactatgaaataaacctgttaagaccggaatctcgaggtgagggacgcaataactcctttgcttgtgtttgctgtggtgacactcaacggaaaaataatcctttattccgtccgcttcggctcggcgcgcccttttttttaaatgaaattattcctactctgctggagttttctccattaccgcaaacaagagaagagcagttaggaccgtttaatggtcgacgcttgctcacctttacggattcgcgtcagggtaccgctcgcatttcagcccgcttacagcaggatgccgataaagcgacgttgcgagctctttgttaccaggaactggcaaatattacagagccttcagcaaaactcagcccggcacactgtgcactgttagagaaagttattagccagttttctgtcctccctttaaaaaattccatcgacgcgctgaaaaaagcgatggctgcgaatgaggagcttagcccgacggacattcaggcacttaaaattattgagccgatggtgagttccttaagcacggagcatgctgaagcgatgcaaatacttcaggctaactctggcaatcagcagaagaaaaccatgtcatggcaaacgctgtctgaacagctggttggcagtgtggaccttgccgatagaatgagaggcagttttaaagaattgtctgggcttgatcttactaaacaacagtttgcagatttttgtttatacagcgagtttggtcgccgccctaaaaatgcctggaccctcgaaagtctgggtctggtagccattcactatccattcattgataaagttacaacctgcccgcaggactggaagacattattacccgatcccgataagcaattagcggaatggcgtaatttattgaagattactcttgatttctttatccgtgaaaacagtgccgttttttacgaaaacgagcaataccctcgctggatgggggcacgtttcccggtaaaaatgctccaggggccagataaaaaaaacaaagggcagaaacgtgatcaactttggccacaaatacgcgatcgccattataaccgggtcattaagctattaatcgcagtctttccggcaatacaacctgagcaggctcactggaaatcgttagttaaccacttaatgattgaggtctgggatgcaattcgaccctgcttacgtcagtttgagtcgggttatcagctggatattaaacaacaagctgaattttacagtccaaagcaagtgtggcgttgcccctatactcgacgtgcgttagacgtcacgttgctgggatactctccgtatttgccgggtagcaaagaaattgcacctgaaaaagcagtgttgattgaaatgcctgagcttcctgtacgtcactggcgtttgtctggtggtggagaaatcgcccgagaagaacgtctggagtggctggaaagtaatgcgctgattcaacatgcccgcgaggaaggattatggtctactcgcagcgaccgactggccctgaaagatagctggtatcgtctggaggaacactctgcgcagagaacgcctgagcagaaccagtttaatgaaaaacaatttaagtcaggcaaagttaatgtgctgaactgttccacgaccatggagatgggggtggatattggtggtatgagtttggtggcaatgaacaacgttcctccagcgccggcaaattatttgcaacgtgcaggtcgcgcggggcgtcgtggagagagtgcatctgctgccattacgttatgtaaaaacacggcgcatggaatggaggtattcaaagaccccctctgggcgttcaacactactgccagtgcgccacgggttcgttttgggagcagtagcattgttcaacgacatgttaatgcccaggttttaggtctgtttttacgagctgaagttcctgatgcgacaaaactgagttgcaaatggttctttgaaggtgatgagagccagtgtcttcgttttcttcattggttaaatcaccaggccgatgagctggcggataaacttaaacgccttactcagggaaccgtcctgatgtcattgacggcaacccagctcttgacccgcacacaagcaatgatgcagcaggttgatatccgctggagaagccaacttgcgatactgttggaaaatatcgaagcgttgaaggcggataacagcgcgtgggaagaaacgccagcaggtaaagccatcgcttatcagcttcgtgattatcgcggtgcatatctgttttctaaactcattagtgaagcgttcctgccggggcatggtttcccggttggcgtagtcaatttcaattatctgacggcagatgagctggaaaaacgtcgcgcaataaaagccactcaggctgaccctaatgaagggggagaaagcttttctcgtcgtattgaaaaattgcccagccgtgatttgcctacagcattacgcgagtatgcgcctggtgcagatgtggtattgggcggaaaagtatatcgttcctcgggcattatgcttggcaaggtgcttgccagcgggcaggagctgtcaggcgatcatcatattccgtggttctggcattgccgtaaatgtggtgcgggggcaaccagtactacccatcctgtcgaatgtagtcactgcaaagcggatatacagcaacttgatgtgaagcgttatttacagcctgttggttttgcgacagatattcgttatcaggcacataatgatgtatccatgcctgcacaacttccctggaaagatccacgtgttcttgtaccgtcttcggtgtgggtttctttacccgatgctgggctaggacgttaccgttttagccatagtggggaattgttccacttcagtgaaggggaatttgggcacggctacgcaatttgcctctcatgtggtcgggcagaatctcaaactcaaccccagcgtacccctgaaaatctaaagaacccagagcgggaaaatacgcattacctgttgcgagggggcagtaacgatcgtcaggggagcaataaattgtgccacggtcatgtgcataaagatctgtggttggggtatagcagtcgtacagatatggttgagctgcaacttaatgatgataatggcctgttgatccgtgatgaggttgccgcgcgttcccttgcggtcgctttgcgtgaagggttagcgcataaattgggtatcgaaaatactgagctgggcgtgacgacgcagcaagcgcgcgatatcaatggctataccggatattccatcttcatatacgacaataatgcgggtggtgcaggttatgcagtgcaattgatcgaccattgggctgatgtctttaattacgccagaaaattgctcgattgcagttgcgataaattttgtcaccactgcttgctcagctacgacagtcagcattatgtcaacagattagatcgtcaccatgcattaaccctgcttaccaatgtacggttgcagcgacttaacctcgcgccagaatatcagtacttcggcgatggtagccgggttgaaactaaccctctgagtttacgtattgcgcaatgcctgaacagcgagatttatgactcctgctcgctggttcttgcggggccgcaggaacagtgggactttgcccaatggccattatttaaagagttgctccagtttgcctcctccggtgggaatgttgagttgctggtggccacgccgctggaaaacttaactgatagctccagacatcagctttccgcgttggcggcgatgccgggaggacgcttacaagtgaaatccattgccactgcgcaactcatgcaaggaaaggggcgctggcttgcgcaggtgactcgcaaagggcaaagccaacagtgggccgcagacgacagcgctaccgttgcccctggtgaattatggggacaaagtgcgtcttcaccagtagtgacacttaaaggaacgtccggaaaaaccttctcgggtcagaccttaagtgcagaagatttactgcccgccttacccaccggggcggtgcgcatcaatctctgtgaacaactggacgggccgctggaaggttttggttcgcgtttctggtcgttagtcacgcaacagcacgctggctggaagcaggcatttacccgccacaaagagataacgcatgttgagtacagcgatcgttatcttaatagcccattcacggcgcgtttgttaggtgaaatcttaaccgagctggttgaacagggaatggcggaacgcgccagcctcactgtttgcgtcaaaaaattggattacaactctcgccaacacgacgctctctataacgcgtggcttaatgaggaagatcgtcagcaggttgtgaccactttacttgaagaaggatatctggggcctgcgtggccgggagcaattagctggttaacgggggataaccagagtacggagcatggacgagaactgacagtcaccttcagcgatggcagtcagcattatgtcctgctcgacatggggcttagctactggcgctgtattgaagataccttctttgattttgccctgcgagtaccgcagcaagttgaacggctggcaaacacgcgagcgcgagctgttgccccgggtaatgaccttaggagttatattatcgctggataa

SEQ ID NO: 28473 - DNA, 2937 bp, Escherichia coli
atgattgaaaatgagagcggttatttgattacctatttcagaaggatatatcaggcgcttcgtgggcaatcatctcaatatcctgccgctaaaattgcacaagaattaggcgatacgattcctgtcacaatgcaaaacgaactggtctatgaaatagccggtgaattctgcgagactctctgccgattacttagtgagcatcctcctcatagcagtgatcccgtttctgcattacgtaagctctctccagactggcatcttcaacttccactcgttctccccgaagcgaatgctgcagagattgtaaggcgattactttctcaatcttctgaaatacgcagtgcaagtagtcttcaggttgaaagaatctgggtcgatgttgatgacagttggtattgcgatgcccggttccgattcccggccacaatgcgtacagaacagttaacctctttgtttgaatgccatattcagccggagcagacccgactcatcatttcaggaaaatggaaaaatggcggggcaaggttggcaatgctaagccgttatgagcagcaagattggcgggtcgagttattacctattgcgatgcaaaaactctctggtgcagatgcaatggccgaaatctcattgtcgcttcatgaaggtccaattctgttaggtcacacaattccaaaaggcggttatgaacttactgaagaacttccctgggtttttgaagcgatgaatgagagtgaatcgcagctaaaacttgttggtatggggtctgtgagttccaggctaaatgctctgtttatttcgctaccgaaaaatagccatttagatattagtggagaaggtgagtttgatatcccaaggttgctgaaaaacagtgaacgcagcttaactaaaataagtggagtatttagcgttgttttacatgatggtgctgtttgtacaattcgcacccagcaactttatgattctgcgattgaatattatattaaatcgacagaagttgaactggttaaatcggattatcctgtccatcgagcctggccgaagatcggttggaaaaaggatctgcaatatggcattgtaccggagaaagaacttttttggcgttccattcgttcaggtaataatgcctggtattctgtcgcatcagaaatgccaaaaggacagatagaagtccggcgaatagttaatgatgaggttttatttagcggtaaagttgtagttttaccagcagacttcgatattaatattatacctgagagtgctcagcaaggcattattatgctttctggtataacggatactagaattgataaatattcaaacaatgaaaaagtaacacttaagtccgattattcacaaaacgagtgtgctatttattataattcatcgctgatgctggaaaataccgttgatttacgggtctcctggaaagatggttctaatcttaaactattattacctaagccggttagcggtggccgatttgtaactaatgatggttctgttcattttgatggtgtggcatctatagcacatttgcatggaatagatgctgagttattaaccatatcatgtgctggaagaggatatcttaatatcgagttattggatgaaaatccagtagctgaaaaattccgctatttacatgccgaccttcctcttttatcaggacgcaatgacaaattacaacaaatttcactttatgagaactataatttgctaaatgctatgctggcatgtgcatggaacagcaatagtacattatgtgttgatttttactctgacagatttggaaaggataaagcaacactcaatattaaacgctacgatggtagttttattgaacacgatcaagggttactggttgatataaaaatttctgttgtttttcctgcaaatagaatagacgaactggttgttgatgctatttctcttaagaatcctggcttacacatatcattgttaaaaaaagatgagtttgcttatgatctttcagctctgaatgttcaggatagtccatggttaattgtgggaaaacttgatggtacagctcgcattgcaccagtaattaaatggatgctacctgtattgcagacaaatgatttattactaaatgctctatgcgaagcagacccagaacagcgcaaaaaaaattttaatgagctaatttttgaaatagataacaacccattgcaaaattattgctgtttattaacagagtatattaagaaatacaaaatgaataatggcttatccttgctggatctggacttgttcagaggtatttcgagtaattaccgcgtggttgttcaattgttaatatcatcatgtctttctggtgatagcgatacgatttatgatatacaggaagaattacccttttcatggggatggattcccgtttcaatctggaaagatgttttccaaaaatgttggacttatctggagaaacagattaacgataaaacattagcattacatatattgcaaccctttattgcttttatgaaccatcgtgcacatatcgatcgtcggctggctccgattgcgaatatgttacttacatatagtgagagcctaccaaccggttgtgatgtattgccaactgttagtcgtgagcagtttaatgaagctaaacagatgctattaaggaaccccgacagctttgggcgtatcagtatcttccctaaagaactttggtctagtgctattactccagagttaaaatctgtttttaataagctttggattgaagataaatatcactcacggcttgaaaaacgttttaatttgatgttagtcgcagcgctgttaacccaaaaagataataacctgatacatcaactgtctgcgctttttgaatttcactatcagcaagccccacagcaattaggggtaatctatcaatattattttgaacaagcaggagtatgtcattga

SEQ ID NO: 28474 - DNA, 6315 bp, Escherichia coli; identical to SEQ ID NO: 28444

SEQ ID NO: 28475 - DNA, 2937 bp, Escherichia coli; identical to SEQ ID NO: 28445

SEQ ID NO: 28476 - DNA, 6345 bp, Escherichia coli
atgactacacgctatttttcgtcacttattgaacaatcgttgtctcgttcaactgaagcaacgctcagtatcatgggcgttacaaacccgcagttgcgtgaacatctcgcgcagcaaatgggggctgattgtgggaaaccgggctcattccttgcttctccggtattccagcaaatgtttggctggaaggagtcaaaccacacgatgcgcagtctgacggaaggcaacgcattgttgagcaaagcagtggttgattcactggatgatcagagtaatggccggtaccgatttggtgctgactggaagccttttacacaccagttagccagttggaaagctttgctggaaaagaaacattcagtggtggtaaccagtggtacgggttcaggtaaaacggaatgttttatggtaccggtgctggaagatctttaccgggaactgcatgaaaatggcaacaatccgttggtcggtgtccgagccctttttctctatccattgaacgccttgattaattcacagcgcgagcgtctggatgcctggacgcgtggttttggtactgggatccgctactgcttgtataacggaaatacagaagagctccacgcaaaaatgaaaacagtgcaggataatagaccaaatgaagtcttatcccgtgaaaagatgcgtctggagccagccccgattctggtgaccaacggcacgatgctggaatatatgatggttcgccaggtcgacgccccgattatccagcaatccaaagcacaaaaatcactacgctggattgtactggatgaagcgcatacctatgtcgggtcgcaggccgctgaactggcactccagctgcgtcgtgtgatgacagcgtttggcgtgacgccagatgatgtgcgctttgtagcgacctctgcgaccattgcctgcagcgacgccgaaaagcagctgaaaaaatttctctctgaattatccggtatcccgcaggagcgcatcgatgttctggacggaagtcgggtgattcctgaactggaaccatccaaaaacgtttctgttccgttagacgaaatagagcaaatacctgatctggatctaaaagataaaaatgataataaaattaaagggataagccctgatcgcttttatgcgcttacgcactcccccgaagcgcgttacatacgtgaaatgttggttagccaacccaatccaatgaaactggatgagatgacgcagcggttaaatgcgctgacaaaacagcattacagccagcaggaagtactgcgttggatcgatgtctgttcagggactcaacctaatgcaaaggatcccgcatttcttaaagtcagggcgcatatcttccagcgtaatacccaaggaatatgggcttgtgttgataaagattgcagattaaagcacggtacaccgctcgaaaaaggctggccctttggctatgtgtatgtgaaccagcgacaaaattgtgactgtggaagccctgtatacgaagttgcattctgtaatgattgtaatgagcctcatcttctggcgcaggacaaaaagggcaaacttgtccaatgggaaaataaaggtggcgatgagttctccttgcaggatgaagtacctgttgaacatgacactacagaggaaaaagtcgaaaaagagaacggtttcctgcctccgttgattattgccgcaggagagaccagcgagacaggctataccctacaacgcctcgaccaccagacgcgccgtattggcgttattaacaatgacagcattccgctgattattaatgatgttgaacaggtttgtagcgccagtggctgtggctacagaggcatgagtgggaaacagcccttccggcgtgcactattaggtgggccattttacgttactaatatcgtgcccaccgttcttgagtattgtcaggactttaccagtgatgaaggcaaagagggcgtcggaccagattcgttgccagggcgaggacgtcgactcattacctttacggacagtcgacaaggtacagctcgaatggcggtgcgtatgcagcaagaagcagaacgcagtctcttacgcggaagcgtagtcgaaattctgagctggcatcaacggacgcaaacgtccacggcgccgaatgccaatgccgatctggaaaaattagcggccagggcaaagcaagcccgtgagcaggcagaagaatatcgaagctggggaatgccagaccaggcgaaattgtcacaagcacaggctgaacagcttgaacaggcttatcaggctgcaaccggtggaaaagcagcaactaccctggtatcccgcacctggacagaaatggttaacgagcttaaagataaagccgatatccgtggcccggtactgaaatataaccactatttgcagcctgaagtgtttaataaaaacggcgggccactaaagctttcggaaatgttgttgttccgggaattcatgcgtcgccctaaacggactaacagcctggaaacacaggggctggttcaggttggttaccaggggctggagaaaatacataagagccccttgcactggcaggaaaaaggattaacgctggatgactggcgcgattttctcaaggttacgttggatctttatgttcgcgaaagcaacttcacacagctggatgatgagctgaaaaactggattggtagccgtttttcatcaaaattcgtccgtaacccggaatcaaaagatcctgaagataatcagaacagacgctggcctcaaattcgtaatggcaacgtatcccatcgtttagcgaagttactgatgctgggggctggattcaaaaccgtcaatacggcgactattgatattatcaatacatggctgaaagaagcatgggcccaacttaccggaccacttgcagtactgaaacccgatggcaaccgtttttatttaccgaaagagcatatgactttttctttaatcacggatgcctggatttgcccggtaaccaataaaatcctggatacggcttttaaaggcttaaccccttatctgcccacccatatttcgttcgagcatcttacccaggcgcaatatgacacttttgtcgcgcagaaagtcaccatgccggaaatctggaagctggatcgttcacaggaagactacgcagagggtctggcaaaagcacgagactgggtcaacaatgatccgctgatcgcacaattgcggtcggaaaacgtctggacagacatcaacgatcgtgtagtggaaggcggtttctactatcgcactgccgagcactctgcccagcagtcgtcagaacgcctgcaaagctatgaaaagatgttcaagaacgggcaactaaatgttctcaactgttccaccaccatggaaatgggggttgatattgggggcattactgcggtggtaatgaacaacgttccgccacatccggccaactatttacagcgcgccgggcgagccgggcgtagtaaagaatcacgcgcgatctcttataccctatgcaaaggtaacccacacgaccagcaggtttttgccaacccactctggccatttgaaaccatgatcccggcacccatggtcgcgatgaactccgcccgactggtgcaacgtcacgtcaatgcattattactgtctgactttttatgtaacgttattggcgaaaccgataaagagaaaaccagcctcgatagcctctggtttttcggtgaagatgacgggcagtcaaaatgcgaacgctttaaagtctggctggaacgcccggttcttgatatcgacacggcgctggaacggctggtgaaaggtacggcgttgcatggcgcaagagccgaacatctgcgggataaaacaatcaatgcgatcaccttcctgcaacagcggtggctctccgtttatcgcgatctcgtgacccaggagcgtgagtcgcagccgcaaacgccttatcgtaagcgcatagagctggagaagaaacggcactgtggcgagtatctgctgcgcgatctggctgccagaaccttcctgccgggatacggtttcccgacagatgtagtgacgtttgataacttcacgatggaagattatatccgcgaaaaatcgcagaaaagtcgtgataaaaaggaccgtgaagataacgtctcccgttataaaggattaccttcccgtaacctcggtgttgccattcgtgaatatgcaccgggagcagagatcattcttgatggtcgtgtcttccgctctgccggtgtctcactgcactggcacaacattaatgctgataccaatgaagcccagcgtctggattgcgcctggcgctgtcacaaatgcgggaccattggctatgaagaggggatgagcagttccgggatgctcttttgctccaacagcgcctgcggcgaaaaaataaccatggataatcgccgtcaggtgttgcagcctgccgggtttgtcaccgatgcacacgctccggtaacgaacaatattgaaaccatgaaattcgtcccggttgtccccgcgtgggtctttgttaaagcagagcccgtaccgttgcctaacccgctaatgggttatatggcttctggggctgatgggcatgttttccagcaaagtttgggggaaggtggacacggttatgcattgtgtctgagctgtggccgtgcggagtcgatgctgaatgaaaatgatgcaccgaaaagtatggaagctcactatccaccgcgtccgggtaaagcggaccgcgacagccagaatcatcgtctgatttgccccggttcgacggcactcatgaagaacgtcaccctgggcgcactggcgcgcaccgatgtctttgaaatggttctgcgcaaaccgcaaaacggcgagtatctgccagataacacagaagaggggcggattgtcgctatgactctggcggttgctctgcgtcaggcgctggcaggcgttctgggtatctccgccgcagaactcggctattctgtacgtccggtcagactggaggatgggcaatcggtattagccgttcagctttatgatgtgatcagcggtggtgctggttttgcctccagcgcaccggtacatattgaagctatattgcagggaatggtgaaacagttaggctgccgccattgtgatactgcatgcagtgaatgtctgcttgattcccagactcgccacgatcacgatttgctggatcgcaaagtggcgctggcttggcttggcgatgacttcacgtattacatcggtttaccggatgaagagacattctcgctgccggatgcccgctactgccctggcgctattggcgatacgattcgccgggcgattaacgaaggcgctgaaaagctcaccctgtggatgactggcgcgcccaatgagtgggatttatacgcccgtcagttccgcgcggctattcagagctatcggctaaaagacaacgtcgaggtcgatcttgttattcctgcgggagtggatgacccagacctgttgcatgaactatcgcaatttactgcgctgggtgtgcggttgtgccatgttgagcaggagctgcaattaccgattgttgcccaggtcacctttgccgatcgcgtgatgacgctggcctctcgcagtcagcaggcaacgattccggggccggagtggcacctgaatgacgaactggtggtgcgtagtctcggttatcaaacggtagaactgaacgagtttattctgcccgctaaagccgccaacgctgtcgagcgggtcaaagacattcagatccacaaacagttgaatggaccactttcgcagtttgggcaacgcttctgggacgtgctgtttaacgaccatgaagaagcgcagtcactgatgaaaaacacgcgaattaccggcgttcactataccgatcgctatctgcaaaacccggttgcgctggcgttgttgggatcaattctgaaaccgctaaaaacaaagctgaccgatggcgctgaagtggcgctggatacgctgtttaaagataaagatcgccccggtaaccggcctttccatgactggatgagcatagcggattttcaggatttcgctgatcagtggtttgctgctgcgctgggcaggccgatagaactgacggtgttcgattcgccgcgcgatatccctcaccatcgtaaactgacggtgacttttgaggatggtcaggtattgaagatccgcttcgatcaggggatgggctactggcgcatcaactttgcatcgcaatggcattactttgatttccgcgatgacgtttctttccagttagtcaaaatggctcaggcctgcaaggaagggaatgtggccaacagcgaagagagctgggcaacggatgtgctggtggaggtgatcgcctcctga

SEQ ID NO: 28477 - DNA, 3291 bp, Escherichia coli; identical to SEQ ID NO: 28447

SEQ ID NO: 28478 - DNA, 6315 bp, Escherichia coli; identical to SEQ ID NO: 28444

SEQ ID NO: 28479 - DNA, 2937 bp, Escherichia coli; identical to SEQ ID NO: 28445

SEQ ID NO: 28480 - DNA, 6315 bp, Escherichia coli; identical to SEQ ID NO: 28444

SEQ ID NO: 28481 - DNA, 2937 bp, Escherichia coli; identical to SEQ ID NO: 28445

SEQ ID NO: 28482 - DNA, 6315 bp, Escherichia coli
atggacgttcagcaactgcattatgcgccacttctaaatcagcttcatcagcgtgcggtgaggtcggtggtaagtcagttggcattgcggagcaagtcgttgactcattatctggaatcacaatattttcagcctcccggtcaggaggggtcactgcttgcagacccggtattcgaaagtacattcggctggatgcctgcggatgaaacaatggaggatttgcgggacaagctgatctccagcccgctggttgatgcattgagcaaagcgccagtgccatttcgtcatcaacttactgcgtggcgaacgattctggaagacaaaaaatccttgttagtgagcagcggtacgggatccgggaaaacagaatgctttatggtaccggttctggaagatcttattcgtcagcaaaaatcgacccgccagtcactaacagggacacaagctattttcttgtatccgttaaatgcattaattaacagccaacaggagcggcttcgcgaatggacgcgcggatttaaggggaaaatacgcttcgcgctatataatggcgaaacccggcataccaaatacgaaattcaggaagatcagttgaaagtacctgaacaagctttgagtcgggaagccatttatgaagcaccaccttccatcatggtgacgaataccaccatgctggaatatatgctgattcgtcgtaaagatgccccaatcatcgaaaagtctcaggggatgttaaagtatatcgtcctggatgaagcccatagttatattggttctcaggctgctgagttagcgctgcttttacgtcgtgttatgcaggctttcaatgttggacccggcacagataaacctgtgcagattatcgcgacctctgccactattggtgaagactctcctgaaggtaataaggagcttgctaaatttgtcgctgatctcgcgggcgttacagaacgtgatgtcaaagtggttcgcggttatcgacaaataccgcgggtatcggagtcgctgattcgtcatgaataccccacatctttaacttctcttaaatccctgagccctcaggatctttaccaacagctttgtcattaccgtgtggcccagcaattgcgtcaggcgttaactcatcccggacggcaggcagtacgtttgagtgagttgctcaatgttgccagaagaacctggccagatattaatcaccgtgagctactgcaactcctcgatctaatggcaagatcgcgagaaggtgaactggcttttacgccattacgtatgtatgggtttatcagaacactggcgggtctatgggcatgttcaaacaaacaatgctcacataaagcacatgaattaaatcagagtgactggccatttggtcaggtatggtttgagcagcgccaatattgtgactgtggagcgccggtatttgaagttttacgttgctccgggtgtggttcagcttatttgtctgccaaagaggagatgcgcggtgatggaacgaactggttggtagcgcaaccagccgctgccgaagtggatgagtttgctcttgatgtagatgtttattctgaagatgaagacaacgacgaattagacaataactctcaatttgatcgtctgattgcgagcgatggtgaaaaatatatcatttcactggaagaaacgacggcggggaaaattgatagtgaagcgcaaaagcactatgaaataaacctgttaagaccggaatctcgaggtgagggacgcaataactcctttgcttgtgtttgctgtggtgacactcaacggaaaaataatcctttattccgtccgcttcggctcggcgcgcccttttttttaaatgaaattattcctactctgctggagttttctccattaccgcaaacaagagaagagcagttaggaccgtttaatggtcgacgcttgctcacctttacggattcgcgtcagggtaccgctcgcatttcagcccgcttacagcaggatgccgataaagcgacgttgcgagctctttgttaccaggaactggcaaatattacagagccttcagcaaaactcagcccggcacactgtgcactgttagagaaagttattagccagttttctgtcctccctttaaaaaattccatcgacgcgctgaaaaaagcgatggctgcgaatgaggagcttagcccgacggacattcaggcacttaaaattattgagccgatggtgagttccttaagcacggagcatgctgaagcgatgcaaatacttcaggctaactctggcaatcagcagaagaaaaccatgtcatggcaaacgctgtctgaacagctggttggcagtgtggaccttgccgatagaatgagaggcagttttaaagaattgtctgggcttgatcttactaaacaacagtttgcagatttttgtttatacagcgagtttggtcgccgccctaaaaatgcctggaccctcgaaagtctgggtctggtagccattcactatccattcattgataaagttacaacctgcccgcaggactggaagacattattacccgatcccgataagcaattagcggaatggcgtaatttattgaagattactcttgatttctttatccgtgaaaacagtgccgttttttacgaaaacgagcaataccctcgctggatgggggcacgtttcccggtaaaaatgctccaggggccagataaaaaaaacaaagggcagaaacgtgatcaactttggccacaaatacgcgatcgccattataaccgggtcattaagctattaatcgcagtctttccggcaatacaacctgagcaggctcactggaaatcgttagttaaccacttaatgattgaggtctgggatgcaattcgaccctgcttacgtcagtttgagtcgggttatcagctggatattaaacaacaagctgaattttacagtccaaagcaagtgtggcgttgcccctatactcgacgtgcgttagacgtcacgttgctgggatactctccgtatttgccgggtagcaaagaaattgcacctgaaaaagcagtgttgattgaaatgcctgagcttcctgtacgtcactggcgtttgtctggtggtggagaaatcgcccgagaagaacgtctggagtggctggaaagtaatgcgctgattcaacatgcccgcgaggaaggattatggtctactcgcagcgaccgactggccctgaaagatagctggtatcgtctggaggaacactctgcgcagagaacgcctgagcagaaccagtttaatgaaaaacaatttaagtcaggcaaagttaatgtgctgaactgttccacgaccatggagatgggggtggatattggtggtatgagtttggtggcaatgaacaacgttcctccagcgccggcaaattatttgcaacgtgcaggtcgcgcggggcgtcgtggagagagtgcatctgctgccattacgttatgtaaaaacacggcgcatggaatggaggtattcaaagcccccctctgggcgttcaacactactgccagtgcgccacgggttcgttttgggagcagtagcattgttcaacgacatgttaatgcccaggttttaggtctgtttttacgagctgaagttcctgatgcgacaaaactgagttgcaaatggttctttgaaggtgatgagagccagtgtcttcgttttcttcattggttaaatcaccaggccgatgagctggcggataaacttaaacgccttactcagggaaccgtcctgatgtcattgacggcaacccagctcttgacccgcacacaagcaatgatgcagcaggttgatatccgctggagaagccaacttgcgatactgttggaaaatatcgaagcgttgaaggcggataacagcgcgtgggaagaaacgccagcaggtaaagccatcgcttatcagcttcgtgattatcgcggtgcatatctgttttctaaactcattagtgaagcgttcctgccggggcatggtttcccggttggcgtagtcaatttcaattatctgacggcagatgagctggaaaaacgtcgcgcaataaaagccactcaggctgaccctaatgaagggggagaaagcttttctcgtcgtattgaaaaattgcccagccgtgatttgcctacagcattacgcgagtatgcgcctggtgcagatgtggtattgggcggaaaagtatatcgttcctcgggcattatgcttggcaaggtgcttgccagcgggcaggagctgtcaggcgatcatcatattccgtggttctggcattgccgtaaatgtggtgcgggggcaaccagtactacccatcctgtcgaatgtagtcactgcaaagcggatatacagcaacttgatgtgaagcgttatttacagcctgttggttttgcgacagatattcgttatcaggcacataatgatgtatccatgcctgcacaacttccctggaaagatccacgtgttcttgtaccgtcttcggtgtgggtttctttacccgatgctgggctaggacgttaccgttttagccatagtggggaattgttccacttcagtgaaggggaatttgggcacggctacgcaatttgcctctcatgtggtcgggcagaatctcaaactcaaccccagcgtacccctgaaaatctaaagaacccagagcgggaaaatacgcattacctgttgcgagggggcagtaacgatcgtcaggggagcaataaattgtgccacggtcatgtgcataaagatctgtggttggggtatagcagtcgtacagatatggttgagctgcaacttaatgatgataatggcctgttgatccgtgatgaggttgccgcgcgttcccttgcggtcgctttgcgtgaagggttagcgcataaattgggtatcgaaaatactgagctgggcgtgacgacgcagcaagcgcgcgatatcaatggctataccggatattccatcttcatatacgacaataatgcgggtggtgcaggttatgcagtgcaattgatcgaccattgggctgatgtctttaattacgccagaaaattgctcgattgcagttgcgataaattttgtcaccactgcttgctcagctacgacagtcagcattatgtcaacagattagatcgtcaccatgcattaaccctgcttaccaatgtacggttgcagcgacttaacctcgcgccagaatatcagtacttcggcgatggtagccgggttgaaactaaccctctgagtttacgtattgcgcaatgcctgaacagcgagatttatgactcctgctcgctggttcttgcggggccgcaggaacagtgggactttgcccaatggccattatttaaagagttgctccagtttgcctcctccggtgggaatgttgagttgctggtggccacgccgctggaaaacttaactgatagctccagacatcagctttccgcgttggcggcgatgccgggaggacgcttacaagtgaaatccattgccactgcgcaactcatgcaaggaaaggggcgctggcttgcgcaggtgactcgcaaagggcaaagccaacagtgggccgcagacgacagcgctaccgttgcccctggtgaattatggggacaaagtgcgtcttcaccagtagtgacacttaaaggaacgtccggaaaaaccttctcgggtcagaccttaagtgcagaagatttactgcccgccttacccaccggggcggtgcgcatcaatctctgtgaacaactggacgggccgctggaaggttttggttcgcgtttctggtcgttagtcacgcaacagcacgctggctggaagcaggcatttacccgccacaaagagataacgcatgttgagtacagcgatcgttatcttaatagcccattcacggcgcgtttgttaggtgaaatcttaaccgagctggttgaacagggaatggcggaacgcgccagcctcactgtttgcgtcaaaaaattggattacaactctcgccaacacgacgctctctataacgcgtggcttaatgaggaagatcgtcagcaggttgtgaccactttacttgaagaaggatatctggggcctgcgtggccgggagcaattagctggttaacgggggataaccagagtacggagcatggacgagaactgacagtcaccttcagcgatggcagtcagcattatgtcctgctcgacatggggcttagctactggcgctgtattgaagataccttctttgattttgccctgcgagtaccgcagcaagttgaacggctggcaaacacgcgagcgcgagctgttgccccgggtaatgaccttaggagttatattatcgctggataa

SEQ ID NO: 28483 - DNA, 2937 bp, Escherichia coli; identical to SEQ ID NO: 28445

SEQ ID NO: 28484 - DNA, 6315 bp, Escherichia coli; identical to SEQ ID NO: 28444

SEQ ID NO: 28485 - DNA, 2937 bp, Escherichia coli; identical to SEQ ID NO: 28445

SEQ ID NO: 28486 - DNA, 6345 bp, Escherichia coli
atgactacacgctatttttcgtcacttattgaacaatcgttgtctcgttcaactgaagcaacgctcagtatcatgggcgttaccaacccgcagctgcgtgaacatctcgcgcaacaaatgggggctgattgtgggaaaccgggctcattccttgcttctccggtattccagcaaatgtttggctggaaggagtcaaaccacacgatgcgcagcctgacggaaggcaacgcattgttgagcaaagcagtggttgattcactggatgatcagaataatggccggtaccggtttggtgctgactggaggccttttacgcaccagttagccagttggaaagctttgctggaaaagaaacattcagtggtggtaaccagtggtacgggttcaggtaaaacggaatgttttatggtaccggtgctggaagatctttaccgggaactgcatgaaaatggcaacaatccgttggtcggtgtccgagccctttttctctatccattgaacgccctgattaattcacagcgcgagcgtctggatgcctggacgcgtggttttggtacagggatccgctactgcctttacaacggcaacaccgaaaacctacacgcttcggtaaaaagcgaacaggcaaaaaggccgaatgaggtgctctcgcgcgaaaaaatgcgtgaagaacctgcgccgattctggtgaccaacggcacgatgctggaatatatgatggttcgccaggtcgacgccccgattatccagcaatctaaagcacaaaaatcactacgctggattgtactggatgaagcgcatacctatgtagggtcgcaggccgctgaactggcgctccagctgcgtcgtgtgatgaccgcgtttggcgtgacaccagatgacgtgcgctttgtcgcgacctctgcgaccattgccggcagcgacgctgaaaagcagctgaaaaaatttctctctgaattatccggtatcccgcaggagcgcatcgatgttctggacggaagtcgggtgattcctgaactggaaccatccaaaaacgtttctgttccgttagacgagatagagcaaatacctgatctggatctaagagataaaaatgataataaaattaaagggataagtcctgagcgcttttatgcgcttacgcattcccccgaagcgcgttacatacgtgagatgttggtcaaacagcccaatccgatgaagctggatgagataacagagcggttacacgtgctgacaaaacagcattacagccagcaggaagtactgcgttggatcgatgtctgttcagggactcaacctaatgcaaaggatcccgcatttcttaaagtcagggcgcatatcttccagcgtaatacccagggaatatgggcttgtgttgataaagattgcagattaaagcacggtacaccgctcgacaaaggctggccctttggctatgtgtatgtgaaccagcgacaaaattgtgactgtggaagccctgtatacgaagttgcattctgtaatgattgtaatgagcctcatcttctggcacgggacaaaaagggcaaactagtccagtgggaaaataaaggtggcgatgaattctctttgcaggatgaagtacctgttgaacatgacgctacagaagaaaaagtcgaaaaagagaacagttttcagcctccgttgattattgccgcaggagagaccagcgaggcaggttataccctacaacgcctcgaccgtcagacgcgccgtattggcgttattaacaatgacagcattccgctgattattaatgatattgaacaggtttgtagtgccagtggctgtggctacagaggcatgagtgggaaacagcccttccggcgtgcactattaggtgggccattttacgttactaatatcgtgcccaccgttctagagtattgtcaggactttaccagtgatgaaggcaaagagggcgtcggaccagattcgttgccaggacgaggtcgtcgactcatcacctttacagacagtcgacaagggacagcccgaatggcggtgcgtatgcagcaagaagcagaacgcagtcgcttacgcggaagcgtagtcgaaattctcagctggcatcaaaggacgcaaacgtctacagcgccgaatgccaatgccgatctggaaaaattagcggccagggcgaagcaagcccgtgagcaggcagaagaatatcgaagctggggaatgccagaccaggcgaaattgtcacaagcacaggctgaacagcttgaacaggcttatcaggctgcaaccggtgggaaagccgcgactatcctggtatcccgaacctggacggagatggttaacgagcttaaagagagagccgatatccgcgggccggttctgcaatataaccattatcttaagcctgaagtgtttaatgaaaacggcggcccccttaagctttctgaaatgttgttgttccgggaattcatgcgtcgccctaaacggactaacagcctggaaacacaggggctggttcaggttggttaccaggggctggagaaaatacataagagccccttgcactggcaggaaaaaggattaacgctggatgactggcgcgattttctcaaggttacgttggatcattacgttcgcgagagcaacttcacacagctggatgatgagctgaaaaactggattggtagccgtttttcatcaaaattcgtccgtaacccggaatcaaaagatcctgaagataatcagaacagacgctggcctcaaattcgtaatggcaacgtatcccatcgtttagcgaagttgctgatgctgggggctggattcaaaaccgtcaatgcggcaactattgatattatcaatacatggctgaaagaagcatgggcccaacttaccggaccgcttgcagtactgaaacccgatggcaaccgtttttatttaccgaaagagcatatgactttttctttaatcacggatgcctggatttgcccggtaaccaataaaatcctggatacggcttttaaaggcttaaccccttatctgcctacccatatttcgttcgagcatcttaccctggcgcaatatgacacttttgtcgcgcagaaagtcacaatgccggaaatctggaagctggatcgttcacaggaagactacgcagagggtctggcaaaagcacgcgactgggtcagccatgatccgctgatcgcacaattgcggtcggaaaacgtctggacagacattaacgatcgtgtcgtggaaggcggcttctactatcgtactgccgagcactctgcccagcagtcgtcagaacgtctgcaaagctatgaaaagatgttcaagaatgggcaactaaatgttctcaactgttccaccaccatggaaatgggggttgatatcgggggtattactgcggtggtaatgaacaacgtaccgccacatccggccaactatttacagcgcgccgggcgagccgggcgtagtaaagaatcacgcgcgatctcttacaccctatgtaaaggtaacccacacgaccagcaggtttttgccaacccgctctggccatttgaaaccatgatcccggcacccatggtcgcgatgaactccgcccgactggtgcaacgtcacgtcaatgcattattactgtccgactttttatgtaacgttattggcgaaaccgataaagaaaaaaccagcctcgatagcctctggtttttcggtgaagatgacgggcagtcaaaatgcgaacgctttaaaatctggctggaacgtccggttcttgatatcgacacggcgctggaacggctggtgaaaggtacggcgttgcatggtgcaagagccgaatatctgcgggataaaacaatcaacgcgatcaccttcctgcaacagcggtggctctccgtttatcgcgatctcgtgacacaggagcgtgagtcgcagccgcaaacgccttatcgtaagcgcatagagctggagaagaaacggcactgtggcgagtatctgctgcgcgatctggctgccagaaccttcctgccgggatacggtttcccgacagatgtagtgacgtttgataacttcacgatggaagattatatccgcgaaaaatcgcagaaaagtcgtgataaaaaggaccgtgaagataacgtttcccgttataaaggattaccttcccgtaacctcggtgttgccattcgtgaatatgcaccgggagcagagatcatccttgatggccgtgtcttccgctctgccggtgtctcactgcactggcacaacattaatgctgataccaatgaagcccagcgtctggattgcgcctggcgctgtcacaaatgcgggaccattggctatgaagaggggatgagcagttccgggatgctcttttgctccaatagcgcctgcggcgaaaaaataatcatggataatcgccgtcaggtgctgcagcctgccgggtttgtcaccgatgcacacgctccggtaacgaacaatattgaaaccatgaaattcgtcccggttgtccccgcgtgggtctttgttaaagcagagcccgtaccgttgcctaacccgctaatgggttatatggcttctggggctgatgggcatgttttccagcaaagtttgggggaaggtggacacggttatgcattgtgtctgagctgtggccgtgctgagtcgatgctgaatgaaaatgatgcgccgaaaagtatggaagctcactatccaccgcgtccgggtaaagcggatcgcgacagccagaatcatcgtctgatttgccccggttcgacggcactcatgaagaatgtcaccctgggcgcactggcgcgtaccgatgtctttgaaatggttctgcgcaaaccgcaaaacggcgagtatctgccagataacacagaggaggggcggattgttgccatgactctggcggttgctctgcgtcaggcgctggcgggcgttctgggtatctccgccgcagaactcggctattctgtacgtccggtcagactggaggatgggcaatcggtattagccgtacagctttatgatgtgatcagcggtggtgcaggttttgcctccagcgcaccggtacacattgaagctatattgcagggaatggtgaaacagttaggctgccgccattgtgagactgcatgtagtgaatgcctgcttgattcccagactcgccacgatcacgatttgctggatcgcaaagcggcgctggcctggcttggcgatgacttcacgtattacatcggtttaccggatgaagagacattctcgctgccggatgcccgctactgccctggcgccattggcgatacgattcgccgggcgattaacgaaggcgctgaaaagctcaccctgtggatgaccggcgcgcccaatgagtgggatttatacgcacgtcagttccgcgcggcggttcagaactatcggctaaaagacaacgtcgaggtcgatcttgttattcctacgggagtggatgacccggacctgttgcatgaactatcgcaatttactgcgctgggtgtgcggctgtgccatgttgaacaggatctgcaattaccgatcgttgcccaggtcacctttaccgatcgcgtgatgacgctggcctctcgcagccagcaggcaacgattccggggccggagtggcacctgaatgacgaactggtggtgcgtagtctcggttataaaacggtagaactgaacgagtttattctgccggctaaagccaccaacgctgtcgagcgggtcaaagacattcagatccacaaacagttgaatggaccactgtcgcagtttgggcaacgcttctgggacgtgctgtttaacgaccatgaagaagcgcagtcactgatgaataacacgcgaattaccggcgttcactataccgatcgctatctgcaaaacccggttgcgctggcgttgttgggatcaattctgagaccgctaaaaacaaagctgaccgatggcgctgaagtgacgctggatacgctatttaaagataaagatcgccccggtaaccggcctttccatgactggatgagcatagcggattttcaggatttcgctgatcagtggtttgctgctgcgctgggcaggccggtagaactgacggtgttcgactcgccgcgcgatatccctcaccatcgtaaactgacggtgacttttgaggatggtcaggtattgaagatccgcttcgatcaggggatgggctactggcgcatcaacttttcatcgcaatggcattactttgatttccgcgatgacgtttctttccagttagtcaaaatggctcaggcctgcaaggaagggaatgtcgccaacagcgaagagagttgggcaacggatgtgctggtggaggtgatcgcctcctga

SEQ ID NO: 28487 - DNA, 3291 bp, Escherichia coli
ttgggtcaatcagaatacatttcatgggtaaaatgtacttcctggctaagtaactttgtgaatcttagagggttgagacaaccggatggccgtcctctttatgaatatcatgcaaccaatgatgaatatacccaattaacgcagctactccgtgcagtcggtcaatcacaatctaatatatgtaatagggactttgctgcctgttttgttcttttttgctctgagtggtaccgcagggattatgaacggcaatgcggatggacgtgggaccctatatataaaaaaatagggatttcattcaccgccacagagcttggtactatcgtaccgaaagggatggaagattactggctgcgcccaattcgattttatgaatctgaacgacgcaattttctcggaacattattcagtgaaggtggtttacctttccggctactcaaagaatcagacagtcgctttctggctgttttctccaggatccttggacaatatgagcaagcaaagcagtcaggtttttctgccctttcgctggcaagagctgtcatagaaaaatcagcgctgccaactgtttttagcgaagatacctctgtagaacttatcagtcatatggctgataacctcaattccttagtacttactcacaacctaataaatcacaaagaaccagtacaacagcttgagaaggttcaccctacctggcgaagcgagtttccaataccgttagatgatgaaacaggaacgcattttttgaatggactgctatgcgcagcctctgtagaggctaagcctcgactacaaaaaaataagagtacgcgttgccaattctattggtcagaaaagcatccagatgagcttagggtgatagtatctcttccggacgaagtttcctttcctgtaacaagcgagccgtcaactacgcgctttgaacttgccatttgtgaagatggtgaggaagtctctggccttgggccagcctatgcttctctggaaaacagacaggcaacagttcgattacgtaaaagcgaagtgagatttggcaggcaaaatccatcggcaggtttgtcgttagtggctcgtgctggagggatgattgttgggagcattaaacttgatgacagtgaaattgccattggtgaggtgccgttaaccttcatcgttgatgcagatcaatggctgttacagggacaggcttcttgcagtgtgcgaagcagcgatgttctgattgtgctccctcgggataatagcaatgttgctggttttgatggccaatcgagggcagtaaacgtattaggactaaaagcactacctgtgaagggatgtcaggacgttacagttacagcaaatgaaacttatcggattcgcaccggaagagaacaaatcagcatcggaaggtttgctctaaatggaaagcgtgcaagctgggtttgtcatccagatgaaacatttattggtgtaccaaaagtcatttctacactaccggatattcaaagcattgatgtaacgcgttacctgagcggaatttcaattgagcaatgtcatatacaagagatgctgggggctcaatatctttctatccgtaatagtaagaatgaaacgctcttgcgtcgcaaaatcggtattttgcctgctgatttcagtattgagataaaaggtggaatacacgcaaatgaaggcactatcgtaatcaccacacagcatccttgtgtagcaaaacttaaagataaaacattggaggctacacgtaagcgtactgaggggcgaacagagatacaactcaaagcggaaggggtacctccggcatttattacattacaagttctgcctaatttggcggctgaccccatcgatattgagttaccttttcccgctaaaggctgtctcgctcttgatgtaaacggacgtcctctggataaaaacattacgctgcatgatctgctgggttccagagcgtttctgttctccagaaatggcgagccgacaagatatacattgcagttgcatttgcgctccgttagtggattacaggcatggcacgaatggtgttatacggcgttgagcgatcgtcctgttgaattgaatctctatagtctgcgcgaacatattgagaacctgatttcacttgaggcaggtattgaccaggttgttgagatgcgtattacgggggcgggtgtggtcatggcctggcaaattcgtcgctataaatacagtctgcgctatgattatgaaaaagaactattactcagccagtcagtgaaccatcgtgctggacagattccttcccccgttatcatgctgttaagtgaacccgagaggaaatccatccccttagcatcaagaatgagcgagggagtgcctgtcggtgaatatgagttgagctcaatcgttaacaaaaatggaccgtggttggttgtccctaaaccgggtgaagagatggcttttcgtccctgcttcattcgtggcgaatcttcgttaccggtagaagaaagcaacatccgctcattgcagaaagcgacccagctttttaatccacaggcagaagttaataccatcacactggttctcggacagatggctaacgatcctgcccattccggctggcaatttatgcgtagcctgtacgatcaatttggttatttaccactggcaacctttgaagtatggcgtgcactggtgcagcatccgcaggcattggcaatgtcgctcttcaaatttgaaatgtcagcagagtacctgagtcgtattgagaatgagttccctattctatgggagtttttccccatctttgagatcaaagcggcatctgagcgtttcaaattgttcctgagccaaaaaggtgcaccggaggaaacccagaaattactggttactaatatgtttcaacggctggggctcgtgttcccgacatatgccgatgaaattgagaaatggttaagtaacggacatctccccccgtctattcctgagtcttttgtccacgtgtggtatcaggagcttttacgtgagcatagtgaagctcaatggccagagtacggcagcaagcggctgcatagctggatggcatcacaaaaaaatccagtgattggtattaatcctgacgcaaatcaccgctattccgtggccttgttacccgtcttcgctgcagctgtggcaagcggaaatgcttcttttgaatctgtatttgaccgtaaaaccggtgccgtatttttcctgaggcaagtcagggatttcgattcccgctggtttaaggccatcttccagtgcagcctgttgcgttatgttgctaaaaaataa

SEQ ID NO: 28488 - DNA, 6315 bp, Escherichia coli; identical to SEQ ID NO: 28464

SEQ ID NO: 28489 - DNA, 2937 bp, Escherichia coli
atgattgaaaatgagagcggttatttgattacctatttcagaaggatatatcaggcgcttcgtgggcaatcatctcaatatcctgccgctaaaattgcacaagaattaggcgatacgattcctgtcacaatgcaaaacgaactggtctatgaaatagccggtgaattctgcgagactctctgccgattacttagtgagcatcctcctcatagcagtgatcccgtttctgcattacgtaagctctctccagactggcatcttcaacttccactcgttctccccgaagcgaatgctgcagagattgtaaggcgattactttctcaatcttctgaaatacgcagtgcaagtagtcttcaggttgaaagaatctgggtcgatgttgatgacagttggtattgcgatgcccggttccgattcccggccacaatgcgtacagaacagttaacctctttgtttgaatgccatattcagccggagcagacccgactcatcatttcaggaaaatggaaaaatggcggggcaaggttggcaatgctaagccgttatgagcagcaagattggcgggtcgagttattacctattgcgatgcaaaaactctctggtgcagatgcaatggccgaaatctcattgtcgcttcatgaaggtccaattctgttaggtcacacaattccaaaaggcggttatgaacttactgaagaacttccctgggtttttgaagcgatgaatgagagtgaatcgcagctaaaacttgttggtatggggtctgtgagttccaggctaaatgctctgtttatttcgctaccgaaaaatagccatttagatattagtggagaaggtgagtttgatatcccaaggttgctgaaaaacagtgaacgcagcttaactaaaataagtggagtatttagcgttgttttacatgatggtgctgtttgtacaattcgcacccagcaactttatgattctgcgattgaatattatattaaatcgacagaagttgaactggttaaatcggattatcctgtccatcgagcctggccgaagatcggttggaaaaaggatctgcaatatggcattgtaccggagaaagaacttttttggcgttccattcgttcaggtaataatgcctggtattctgtcgcatcagaaatgccaaaaggacagatagaagtccggcgaatagttaatgatgaggttttatttagcggtaaagttgtagttttaccagcagacttcgatattaatattatacctgagagtgctcagcaaggcattattatgctttctggtataacggatactagaattgataaatattcaaacaatgaaaaagtaacacttaagtccgattattcacaaaacgagtgtgctatttattataattcatcgctgatgctggaaaataccgttgatttacgggtctcctggaaagatggttctaatcttaaactattattacctaagccggttagcggtggccgatttgtaactaatgatggttctgttcattttgatggtgtggcatctatagcacatttgcatggaatagatgctgagttattaaccatatcatgtgctggaagaggatatcttaatatcgagttattggatgaaaatccagtagctgaaaaatttcgctatttacatgccgaccttcctcttttatcaggacgcaatgacaaattacaacaaatttcactttatgagaactataatttgctaaatgctatgctggcatgtgcatggaacagcaatagtacattatgtgttgatttttactctgacagatttggaaaggataaagcaacactcaatattaaacgctacgatggtagttttattgaacacgatcaagggttactggttgatataaaaaattctgttgtttttcctgcaaatagaatagacgaactggttgttgatgctatttctcttaagaatcctggcttacacatatcattgttaaaaaaagatgagtttgcttatgatctttcagctctgaatgttcaggatagtccatggttaattgtgggaaaacttgatggtacagctcgcattgcaccagtaattaaatggatgctacctgtattgcagacaaatgatttattactaaatgctctatgcgaagcagacccagaacagcgcaaaaaaaattttaatgagctaatttttgaaatagataacaacccattgcaaaattattgctgtttattaacagagtatattaagaaatacaaaatgaataatggcttatccttgctggatctggacttgttcagaggtatttcgagtaattaccgcgtggttgttcaattgttaatatcatcatgtctttctggtgatagcgatacgatttatgatatacaggaagaattacccttttcatggggatggattcccgtttcaatctggaaagatgttttccaaaaatgttggacttatctggagaaacagattaacgataaaacattagcattacatatattgcaaccctttattgcttttatgaaccatcgtgcacatatcgatcgtcggctggctccgattgcgaatatgttacttacatatagtgagagcctaccaaccggttgtgatgtattgccaactgttagtcgtgagcagtttaatgaagctaaacagatgctattaaggaaccccgacagctttgggcgtatcagtatcttccctaaagaactttggtctagtgctattactccagagttaaaatctgtttttaataagctttggattgaagataaatatcactcacggcttgaaaaacgttttaatttgatgttagtcgcagcgctgttaacccaaaaagataataacctgatacatcaactgtctgcgctttttgaatttcactatcagcaagccccacagcaattaggggtaatctatcaatattattttgaacaagcaggagtatgtcattga

SEQ ID NO: 28490 - DNA, 6315 bp, Escherichia coli; identical to SEQ ID NO: 28464

SEQ ID NO: 28491 - DNA, 2937 bp, Escherichia coli; identical to SEQ ID NO: 28445

SEQ ID NO: 28492 - DNA, 6315 bp, Escherichia coli; identical to SEQ ID NO: 28464

SEQ ID NO: 28493 - DNA, 2937 bp, Escherichia coli; identical to SEQ ID NO: 28445

SEQ ID NO: 28494 - DNA, 6315 bp, Escherichia coli
atggacgttcagcaactgcattatgcgccacttctaaatcagcttcatcagcgtgcggtgaggtcggtggtaagtcagttggcattgcggagcaagtcgttgactcattatctggaatcacaatattttcagcctcccggtcaggaggggtcactgcttgcagacccggtattcgaaagtacattcggctggatgcctgcggatgaaacaatggaggatttgcgggacaagctgatctccagcccgctggttgatgcattgagcaaagcgccagtgccatttcgtcatcaacttactgcgtggcgaacgattctggaagacaaaaaatccttgttagtgagcagcggtacgggatccgggaaaacagaatgctttatggtaccggttctggaagatcttattcgtcagcaaaaatcgacccgccagtcactaacagggacacaagctattttcttgtatccgttaaatgcattaattaacagccaacaggagcggcttcgcgaatggacgcgcggatttaaggggaaaatacgcttcgcgctatataatggcgaaacccggcataccaaatacgaaattcaggaagatcagttgaaagtacctgaacaagctttgagtcgggaagccatttatgaagcaccaccttccatcatggtgacgaataccaccatgctggaatatatgctgattcgtcgtaaagatgccccaatcatcgaaaagtctcaggggatgttaaagtatatcgtcctggatgaagcccatagttatattggttctcaggctgctgagttagcgctgcttttacgtcgtgttatgcaggctttcaatgttggacccggcacagataaacctgtgcagattatcgcgacctctgccactattggtgaagactctcctgaaggtaataaggagcttgctaaatttgtcgctgatctcgcgggcgttacagaacgtgatgtcaaagtggttcgcggttatcgacaaataccgcgggtatcggagtcgctgattcgtcatgaataccccacatctttaacttctcttaaatccctgagccctcaggatctttaccaacagctttgtcattaccgtgtggcccagcaattgcgtcaggcgttaactcatcccggacggcaggcagtacgtttgagtgagttgctcaatgttgccagaagaacctggccagatattaatcaccgtgagctactgcaactcctcgatctaatggcaagatcgcgagaaggtgaactggcttttacgccattacgtatgcatgggtttatcagaacactggcgggtctatgggcatgttcaaacaaacaatgctcacataaagcacatgaattaaatcagagtgactggccatttggtcaggtatggtttgagcagcgccaatattgtgactgtggagcgccggtatttgaagttttacgttgctccgggtgtggttcagcttatttgtctgccaaagaggagatgcgcggtgatggaacgaactggttggtagcgcaaccagccgctgccgaagtggatgagtttgctcttgatgtagatgtttattctgaagatgaagacaacgacgaattagacaataactctcaatttgatcgtctgattgcgagcgatggtgaaaaatatatcatttcactggaagaaacgacggcggggaaaattgatagtgaagcgcaaaagcactatgaaataaacctgttaagaccggaatctcgaggtgagggacgcaataactcctttgcttgtgtttgctgtggtgacactcaacggaaaaataatcctttattccgtccgcttcggctcggcgcgcccttttttttaaatgaaattattcctactctgctggagttttctccattaccgcaaacaagagaagagcagttaggaccgtttaatggtcgacgcttgctcacctttacggattcgcgtcagggtaccgctcgcatttcagcccgcttacagcaggatgccgataaagcgacgttgcgagctctttgttaccaggagctggcaaatattacagagccttcagcaaaactcagcccggcacactgtgcactgttagagaaagttattagccagttttctgtcctccctttaaaaaattccatcgacgcgctgaaaaaagcgatggctgcgaatgaggagcttagcccgacggacattcaggcacttaaaattattgagccgatggtgagttccttaagcacggagcatgctgaagcgatgcaaatacttcaggctaactctggcaatcagcagaagaaaaccatgtcatggcaaacgctgtctgaacagctggttggcagtgtggaccttgccgatagaatgagaggcagttttaaagaattgtctgggcttgatcttactaaacaacagtttgcagatttttgtttatacagcgagtttggtcgccgccctaaaaatgcctggaccctcgaaagtctgggtctggtagccattcactatccattcattgataaagttacaacctgcccgcaggactggaagacattattacccgatcccgataagcaattagcggaatggcgtaatttattgaagattactcttgatttctttatccgtgaaaacagtgccgttttttacgaaaacgagcaataccctcgctggatgggggcacgtttcccggtaaaaatgctccaggggccagataaaaaaaacaaagggcagaaacgtgatcaactttggccacaaatacgcgatcgccattataaccgggtcattaagctattaatcgcagtctttccggcaatacaacctgagcaggctcactggaaatcgttagttaaccacttaatgattgaggtctgggatgcaattcgaccctgcttacgtcagtttgagtcgggttatcagctggatattaaacaacaagctgaattttacagtccaaagcaagtgtggcgttgcccctatactcgacgtgcgttagacgtcacgttgctgggatactctccgtatttgccgggtagcaaagaaattgcacctgaaaaagcagtgttgattgaaatgcctgagcttcctgtacgtcactggcgtttgtctggtggtggagaaatcgcccgagaagaacgtctggagtggctggaaagtaatgcgctgattcaacatgcccgcgaggaaggattatggtctactcgcagcgaccgactggccctgaaagatagctggtatcgtctggaggaacactctgcgcagagaacgcctgagcagaaccagtttaatgaaaaacaatttaagtcaggcaaagttaatgtgctgaactgttccacgaccatggagatgggggtggatattggtggtatgagtttggtggcaatgaacaacgttcctccagcgccggcaaattatttgcaacgtgcaggtcgcgcggggcgtcgtggagagagtgcatctgctgccattacgttatgtaaaaacacggcgcatggaatggaggtattcaaagaccccctctgggcgttcaacactactgccagtgcgccacgggttcgttttgggagcagtagtattgttcaacgacatgttaatgccctggttttaggtctgtttttacgagctgaagttcctgatgcgacaaaactgagttgcaaatggttctttgaaggtgatgagagccagtgtcttcgttttctccattggttaaatcaccaggccgatcagctggcggataaacttaaacgccttactcagggaaccgtactgatgtcattgacggcaacccagctcttgacccgcacacaagcaatgatgcagcaggttgatatccgctggagaagccaacttgcgatactgttggaaaatatcgaagcgttgaaggcggataacagcgcgtgggaagaaacaccagcaggtaaagccatcgcttatcagcttcgtgattatcgcggtgcatatctgttttctaaactcattagtgaagcgttcctgccggggcatggtttcccggttggcgtagtcaatttcaattatctgacggcagatgagctggaaaaacgtcgcgcaataaaagccactcaggctgaccctaatgaagggggagaaagcttttctcgtcgtattgaaaaattgcccagccgtgatttgcctacagcattacgcgagtatgcgcctggtgcagatgtggtattgggcggaaaagtatatcgttcctcgggcattatgcttggcaaggtgcttgccagcgggcaggagctgtcaggcgatcatcatattccgtggttctggcattgccgtaaatgtggtgcgggggcaaccagtactacccatcctgtcgaatgtagtcactgcaaagcggatatacagcaacttgatgtgaagcgttatttacagcctgttggttttgcgacagatattcgttatcaggcacataatgatgtatccatgcctgcacaacttccctggaaagatccacgtgttcttgtaccgtcttcggtgtgggtttctttacccgatgctgggctaggacgttaccgttttagccatagtggggaattgttccacttcagtgaaggggaatttgggcacggctacgcaatttgcctctcatatggtcgggcagaatctcaaactcaaccccagcgtacccctgaaaatctaaagaacccagagagggaaaatacgcattacctgttgcgagggggcagtaacgatcgtcaggggagcaataaattgtgccacggtcatgtgcataaagatctgtggttgggatatagcagtcgtacagatatggttgagctgcaactcaatgatgataatggcctgttgatccgtgatgaggttgccgcgcgttcccttgcggtcgctttgcgtgaagggttagcgcataaattgggtatcgaaaatactgagctgggcgtgacgacgcagcaagcgcgcgatatcaatggctataccggatattccatcttcatttacgacaataatgcgggtggtgcaggttatgcagtgcaattgatcgaccattgggctgatgtctttaattacgccagaaaattgctcgattgcagttgcgataaattctgtcaccactgcttgctcagctacgacagtcagcattatgtcaacagattagatcgtcaccatgcattaaccctgcttaccaatgtacggttgcagcgacttaacctcgcgccagaatatcagtacttcggcgatggtagccgggttgaaactaaccctctgagtttacgtattgcgcaatgcctgaacagcgagatttatgactcctgctcgctggttcttgcggggccgcaggaacagtgggactttgcccaatggccattatttaaagagttgctccagtttgcctcctccggtgggaatgttgagttgctggtggccacgccgctggcaaacttaactgatagctccagacatcagctttccgcgttggcggcgatgccgggaggtcgcttacaagtgaaatccattgccactgcgcagctcatgcaaggaaaggggcgctggcttgcgcaggtgactcgcgaagggcaaagccaacagtgggccgcagacgacagcgctaccgttgcacctggtgaattatggggacaaagtgcgtcttcaccagtagtgacacttaaaggaacgtccggaaaaaccttctcgggtcagaccttaagtgcagaagatttactgcccgccttacccaccggggcggtgcgcatcaatctctgtgaacaactggacgggccgctggaaggttttggttcgcgtttctggtcgttagtcacgcaacagcacgctggctggaagcaggcatttacccgccacaaagagataacgcatgttgagtacagcgatcgttatcttaatagcccattcacggcgcgtttgttaggtgaaatcttaaccgagctggttgaacagggaatggcggaacgcgccagcctcactgtttgcgtcaaaaaattggattacaactctcgccaacacgacgctctctataacgcgtggcttaatgaggaagatcgtcagcaggttgtgaccactttacttgaagaaggatatctggggcctgcgtggccgggagcaattagctggttaacgggggataaccagagtacggagcatggacgagaactgacagtcaccttcagcgatggcagtcagcattatgtcctgctcgacatggggcttagctactggcgctgtattgaagataccttctttgattttgccctgcgagtaccgcagcaagttgaacggctggcaaacacgcgagcgcgagctgttgccccgggtaatgaccttaggagttatattatcgctggataa

SEQ ID NO: 28495 - DNA, 2937 bp, Escherichia coli; identical to SEQ ID NO: 28445

SEQ ID NO: 28496 - DNA, 6315 bp, Escherichia coli; identical to SEQ ID NO: 28464

SEQ ID NO: 28497 - DNA, 2937 bp, Escherichia coli; identical to SEQ ID NO: 28489

SEQ ID NO: 28498 - DNA, 6315 bp, Escherichia coli; identical to SEQ ID NO: 28464

SEQ ID NO: 28499 - DNA, 2937 bp, Escherichia coli; identical to SEQ ID NO: 28445

SEQ ID NO: 28500 - DNA, 6315 bp, Escherichia coli; identical to SEQ ID NO: 28464

SEQ ID NO: 28501 - DNA, 2937 bp, Escherichia coli
atgattgaaaatgagagcggttatttgattacctatttcagaaggatatatcaggcgcttcgtgggcaatcatctcaatatcctgccgctaaaattgcacaagaattaggcgatacgattcctgtcacaatgcaaaacgaactggtctatgaaatagccggtgaattctgcgagactctctgccgattacttagtgagcatcctcctcatagcagtgatcccgtttctgcattacgtaagctctctccagactggcatcttcaacttccactcgttctccccgaagcgaatgctgcagagattgtaaggcgattactttctcaatcttctgaaatacgcagtgcaagtagtcttcaggttgaaagaatctgggtcgatgttgatgacagttggtattgcgatgcccggttccgattcccggccacaatgcgtacagaacagttaacctctttgtttgaatgccatattcagccggagcagacccgactcatcatttcaggaaaatggaaaaatggcggggcaaggttggcaatgctaagccgttatgagcagcaagattggcgggtcgagttattacctattgcgatgcaaaaactctctggtgcagatgcaatggccgaaatctcattgtcgcttcatgaaggtccaattctgttaggtcacacaattccaaaaggcggttatgaacttactgaagaacttccctgggtttttgaagcgatgaatgagagtgaatcgcagctaaaacttgttggtatggggtctgtgagttccaggctaaatgctctgtttatttcgctaccgaaaaatagccatttagatattagtggagaaggtgagtttgatatcccaaggttgctgaaaaacagtgaacgcagcttaactaaaataagtggagtatttagcgttgttttacatgatggtgctgtttgtacaattcgcacccagcaactttatgattctgcgattgaatattatattaaatcgacagaagttgaactggttaaatcggattatcctgtccatcgagcctggccgaagatcggttggaaaaaggatctgcaatatggcattgtaccggagaaagaacttttttggcgttccattcgttcaggtaataatgcctggtattctgtcgcatcagaaatgccaaaaggacagatagaagtccggcgaatagttaatgatgaggttttatttagcggtaaagttgtagttttaccagcagacttcgatattaatattatacctgagagtgctcagcaaggcattattatgctttctggtataacggatactagaattgataaatattcaaacaatgaaaaagtaacacttaagtccgattattcacaaaacgagtgtgctatttattataattcatcgctgatgctggaaaataccgttgatttacgggtctcctggaaagatggttctaatcttaaactattattacctaagccggttagcggtggccgatttgtaactaatgatggttctgttcattttgatggtgtggcatctatagcacatttgcatggaatagatgctgagttattaaccatatcatgtgctggaagaggatatcttaatatcgagttattggatgaaaatccagtagctgaaaaattccgctatttacatgccgaccttcctcttttatcaggacgcaatgacaaattacaacaaatttcactttatgagaactataatttgctaaatgctatgctggcatgtgcatggaacagcaatagtacattatgtgttgatttttactctgacagatttggaaaggataaagcaacactcaatattaaacgctacgatggtagttttattgaacacgatcaagggttactggttgatataaaaaattctgttgtttttcctgcaaatagaatagacgaactggttgttgatgctatttctcttaagaatcctggctcacacatatcattgttaaaaaaagatgagtttgcttatgatctttcagctctgaatgttcaggatagtccatggttaattgtgggaaaacttgatggtacagctcgcattgcaccagtaattaaatggatgctacctgtattgcagacaaatgatttattactaaatgctctatgcgaagcagacccagaacagcgcaaaaaaaattttaatgagctaatttttgaaatagataacaacccattgcaaaattattgctgtttattaacagagtatattaagaaatacaaaatgaataatggcttatccttgctggatctggacttgttcagaggtatttcgagtaattaccgcgtggttgttcaattgttaatatcatcatgtctttctggtgatagcgatacgatttatgatatacaggaagaattacccttttcatggggatggattcccgtttcaatctggaaagatgttttccaaaaatgttggacttatctggagaaacagattaacgataaaacattagcattacatatattgcaaccctttattgcttttatgaaccatcgtgcacatatcgatcgtcggctggctccgattgcgaatatgttacttacatatagtgagagcctaccaaccggttgtgatgtattgccaactgttagtcgtgagcagtttaatgaagctaaacagatgctattaaggaaccccgacagctttgggcgtatcagtatcttccctaaagaactttggtctagtgctattactccagagttaaaatctgtttttaataagctttggattgaagataaatatcactcacggcttgaaaaacgttttaatttgatgttagtcgcagcgctgttaacccaaaaagataataacctgatacatcaactgtctgcgctttttgaatttcactatcagcaagccccacagcaattaggggtaatctatcaatattattttgaacaagcaggagtatgtcattga

SEQ ID NO: 28502 - DNA, 6315 bp, Escherichia coli; identical to SEQ ID NO: 28464

SEQ ID NO: 28503 - DNA, 2937 bp, Escherichia coli; identical to SEQ ID NO: 28445

SEQ ID NO: 28504 - DNA, 6315 bp, Escherichia coli; identical to SEQ ID NO: 28464

SEQ ID NO: 28505 - DNA, 2937 bp, Escherichia coli; identical to SEQ ID NO: 28445

SEQ ID NO: 28506 - DNA, 6315 bp, Escherichia coli; identical to SEQ ID NO: 28464

SEQ ID NO: 28507 - DNA, 2937 bp, Escherichia coli; identical to SEQ ID NO: 28445

SEQ ID NO: 28508 - DNA, 6315 bp, Escherichia coli; identical to SEQ ID NO: 28464

SEQ ID NO: 28509 - DNA, 2937 bp, Escherichia coli; identical to SEQ ID NO: 28445

SEQ ID NO: 28510 - DNA, 6315 bp, Escherichia coli; identical to SEQ ID NO: 28464

SEQ ID NO: 28511 - DNA, 2937 bp, Escherichia coli; identical to SEQ ID NO: 28445

SEQ ID NO: 28512 - DNA, 6315 bp, Escherichia coli; identical to SEQ ID NO: 28464

SEQ ID NO: 28513 - DNA, 2937 bp, Escherichia coli; identical to SEQ ID NO: 28445

SEQ ID NO: 28514 - DNA, 6315 bp, Escherichia coli; identical to SEQ ID NO: 28464

SEQ ID NO: 28515 - DNA, 2937 bp, Escherichia coli; identical to SEQ ID NO: 28445

SEQ ID NO: 28516 - DNA, 6315 bp, Escherichia coli; identical to SEQ ID NO: 28464

SEQ ID NO: 28517 - DNA, 2937 bp, Escherichia coli; identical to SEQ ID NO: 28445

SEQ ID NO: 28518 - DNA, 6315 bp, Escherichia coli; identical to SEQ ID NO: 28464

SEQ ID NO: 28519 - DNA, 2937 bp, Escherichia coli; identical to SEQ ID NO: 28445

SEQ ID NO: 28520 - DNA, 6315 bp, Escherichia coli; identical to SEQ ID NO: 28464

SEQ ID NO: 28521 - DNA, 2937 bp, Escherichia coli; identical to SEQ ID NO: 28445

SEQ ID NO: 28522 - DNA, 6315 bp, Escherichia coli; identical to SEQ ID NO: 28464

SEQ ID NO: 28523 - DNA, 2937 bp, Escherichia coli; identical to SEQ ID NO: 28445

SEQ ID NO: 28524 - DNA, 6351 bp, Escherichia coli
atgactacacgctatttttcgtcacttattgaacaatcgttgtctcgttcaactgaagcaacgctcagtatcatgggcgttacaaacccgcagttgcgtgaacatctcgcgcaacaaatgggggctgattgtgggaaaccgggctcattccttgcttctccggtattccagcaaatgtttggatggaaggagtcaaatcacacgatgcgcagcctgacggaaggcaacgcattgttgagcaaagcagtggttgattcactggataatcagagtaatggccggtaccgatttggtgctgactggaagccttttacacaccagttagccagttggaaagctttgctggaaaagaaacattcagtggtggtaaccagtggtacgggttcaggtaaaacggaatgttttatggttccggtgctggaagatctttaccgggaactgcatgaaaatggcaacaatccgttggtcggtgtccgagccctttttctctatccattgaacgccttgattaattcacagcgcgagcgtctggatgcctggacgcgtggttttggtactggaatccgctactgcttgtataacggaaatacagaagagctccacgcaaaaatgaaaacagtgcaggataatagaccaaatgaagtcttatcccgtgaaaagatgcgtctggagccagccccgattctggtgaccaacggcacgatgctggaatatatgatggttcgccaggtcgacgccccgattatccagcaatccaaagcacaaaaatcactacgctggattgtactggatgaagcgcatacctatgtcgggtcgcaggccgctgaactggcactccagctgcgtcgtgtgatgacagcgtttggcgtgacgccagatgatgtgcgctttgtagcgacctctgcgaccattgccggcagcgacgccgaaaagcagctgaaaaaatttctctctgaattatccggtatcccgcaggagcgcatcgatgttctggacggaagtcgggtgattcctgaactggaaccatccaaaaacgtttctgttccgttagacgaaatagagcaaatacctgatctggatctaaaagataaaaatgataataaaattaaagggataagtcctgagcgcttttatgcgctcacgcactcccccgaagcacgttacatacgcgagatgttggtcaaacatcccaatccaatgaagctggatgagatgacagagcggttaaacatactgacaaaacagcatcacagccagcatgaagtactgcgttggatcgacgtctgttcagggacccaacctaatgcaaaggatcccgcatttcttaaagtcagggcgcatatcttccagcgtaatacccagggaatatgggcttgtgtggataaagattgcaggttaaagcacggtacaccgctcgaaaaaggctggccctttggctatgtatatgtgaaccagcgacaaaattgcgattgtggaagccctgtttacgaagtggcgttctgtaatgattgtaatgaacctcatcttctggcgcgggacaaaaagggcaaactagtccagtgggaaaataaaggtggcgatgaattctctttgcaggatgaagtacctgttgaacatgacgctacagcggaaaaagtcgaaaaagagaacagtttccagcctccgttgattattgccgcaggagagaccagcgaggccggttataccctacaacgcctcgaccgccagacgcgccgtattggcgttattaacaatgacagcattccgctgattattaatgatgttgaacaggtttgtagtgccagtggctgtggctgtggctacagaggcatgagtgggaaacagcccttccggcgtgcactattaggtgggccattttacgttactaatatcgtgcccaccgttctagagtattgtcaggactttaccagtgatgaaggcaaagagggcgtcggaccagattcgttgccaggacgaggtcgtcgactcatcacctttacagacagtcgacaagggacagcccgaatggcggtgcgtatgcagcaagaagcagaacgcagtcgcttacgcggaagcgtagtcgaaattctcagctggcatcaaaggacgcaaacgtctacagcgccgaatgccaatgccgatctggaaaaattagcgaccagggcgaagcaagcccgtgagcaggcagaagaatatcgaagctggggaatgccagaccaggcgaaattgtcacaagcgcaggctgaacagcttgaacaggcttatcagtttgcaatcggcggaaaagcagcaaccaccctagtatcccgcacctggactgaaatggttaacgagcttaaagataaagccgatatccgtggcccggttctgaaatataactactatttgaagcctgaagtgtttaatgaaaacggcgggcctctaaagctttctgaaatgttgttgttccgggaattcatgcgtcgccctaaacggactaacagcctggaaacacaggggctggttcaggttggttacctgggactggagaaaatacataagctccctatgcactggcaggaaagggaattaacgctggatgactggcgcgattttctcaaggttacgttggatcattacgttcgcgagagcaacttcacacagctggatgatgagctgaaaaactggattggtagccgtttttcatcaaaattcgtccgtaacccggaatcaaaagatcctgaagataatcagaatagacgctggcctcaaattcgtaatggcaacgtatcccatcgtttagcgaagttactgatgctgggggctggattcaaaaccgtcaatacggcgactattgatattatcaatacatggctgaaagaagcatgggcccaacttaccggaccgcttgcagtactgaaacccgatggcaaccgtttttatttaccgaaagagcatatgactttttctttaatcacggatgcctggatttgcccggtaaccaataaaatcctggatacggcttttaaaggcttaaccccttatctgcctacccatatttcgttcgagcatcttacccaggcgcaatatgacacttttgtcgcgcagaaagtcaccatgccggaaatctggaagctggatcgttcacaggaagactacgcagagggtctggcaaaagcacgcgactgggtcagcaatgatccgctgatcgcacaattgcggtcagaaaacgtctggacagacatcaacgatcgtgtcgtggaaggcggtttctactatcgcactgccgagcactctgcccagcagtcgtcagaacgcctgcaaagctatgaaaagatgttcaagaacgggcaactaaatgttctcaactgttccaccaccatggaaatgggggttgatatcgggggcattacagcggtggtaatgaacaatgtaccgccacatcctgccaactatttacagcgcgccgggcgagccgggcgtagtaaagagtcgcgtgcgatctcttacaccctatgcaaaggtaacccacacgaccaacaggtttttgccaacccgctctggccgtttgaaaccatgatcccggcacccatggtcgcgatgaactccgcccgactggtacaacgtcacgtcaatgcattattactgtccgactttttatgtaacgttattggcgaaaccgataaagagaaaaccagcctcgatagcctctggtttttcggtgaagatgacgggcagtcaaaatgcgaacgctttaaaatctggctggaacgcccggttcttgatatcgacacggcgctggaacggctggtgaaaggtacggcgttgcatggtgcaagagctgaacatctgcgggataaaacaatcagcgcgatcaccttcctgcaacagcggtggctctccgtttatcgcgatctcgtgacccaggagcgtgagtcgcagccacaaacgccttatcgtaagcgcatagagctggagaagaaacgacactgtggagagtatctgctgcgcgatctggctgccagaactttcctgccgggatacggcttcccgacagatgtagtgacgtttgataacttcacaatggaagattatatccgcgaaaaattgcaaaaaagtcgtgataaaaaggaccgtgaagataacgtctcccgttataaaggattaccttcccgtaacctcggtgttgccattcgtgaatatgcaccgggagcagagatcattcttgatggccgtgtcttccgctctgccggtgtctcactgcactggcacaatattaatgctgataccaatgaagcccagcgtctggattgtgcctggcgctgtcacaaatgcgggaccattggctatgaagaggggatgagcagttccgggatgctcttttgctccaatagcgcctgcggcgaaaaaataatcatggataatcgccgtcaggtgttgcagcctgccgggtttgtcaccgatgcacacgctccggtaacgaacaatattgaaaccatgaaattcgtcccggttgtccccgcctgggtctttgttaaagcagagcccgtaccgttgcctaacccgctaatgggttatatggcttctggggctgatgggcatgttttccagcaaagtctgggggaaggtggacacggttatgcattgtgtctgagctgtggccgtgcggagtcgatgctgaatgaaaatgatgctccgaaaagtatggaagctcactatccaccgcgtccgggtaaagcggaccgcgacagccagaatcatcgtctgatttgcccaggttcgacggcactcatgaagaacgtcaccctgggcgcactggcgcgcaccgatgtctttgaaatggttctgcgcaaaccgcaaaaaggcgagtatctgccagataacacagaagaggggcggattgtcgctatgactctggcggttgctctgcgtcaggcgctagcgggcgttctgggtatctccggcgcagaactcggctattctgtacgcccggtcagactggaggatgggcaatcggtattagccgttcagctttatgatgtgatcagcggtggtgcaggttttgcctccagcgcaccggtacacattgaagctattttgcagggaatggtgaaacagttaggttgccgccattgtgatactgcatgtagtgaatgcctgcttgattcccagactcgccacgatcacgatttgctggatcgcaaagcggcgctggcctggcttggcgatgacttcacgtattacatcggtttaccggatgaagagacattctcgctgccggatgcccgctactgccctggcgctattggcgatacgattcgccgggcgattaacgaaggcgctgaaaagctcaccctgtggatgaccggcgcgcccaatgagtgggatttatacgcccgtcagttccgcgcggcggttcagagctatcggctaaaagacaacgtcgaggtcgatcttgttatacctgcgggagtggatgacccggatctgttgtatgaactatcgcaatttactgcgctgggtgtgcggctgtgccatgttgaacaggatctgcaattgccgatcgttgcccaggttacctttgccgatcgcgtgatgacgctggcttctcgcagccagcaggcaacgattccggggccggagtggcacctgaatgacgaactggtggtgcgtagtctcggttataaaacggtagaactgaacgagtttattctgccggctaaagccgccaacgctgtcgagcgggtcaaagacattcagatccacaaacagttgaatggaccactttcgcagtttggacaacgcttctgggacgtgctgtttaacgaccatgaagaagcacagtcactgatgaataacacgcgaattaccggcgttcactataccgatcgctatctgcaaaacccggttgcgctggcgttgttgggatcaattctgagaccgctaaaaacaaagctgaccgatggcgctgaagtggcgctggatacgctgtttaaagataaagatcgccccggtaaccggcctttccatgactggatgagcatagcggattttcaggatttcgctgatcagtggtttgctgctgcgctgggcaggccgatagaactaacggtgttcgactcgccgcgcgatatccctcaccatcgtaaactgacggtgacttttgaggatggtcaggttttgaagatccgcttcgatcaggggatgggctactggcgtatcaactttgcatcgcaatggcattactttgacttccgcgatgacgtttctttccagttagtcaaaatggctcaggcctgcaatgaaggaaatgtggccaacagcgaagagagctgggcaacggatgtgctggtggaggtgagcgcctcctga

SEQ ID NO: 28525 - DNA, 2544 bp, Escherichia coli
ttgaatggactgctatgcgcagcctctgtagaggctaagcctcgactacaaaaaaataagagtacgcgttgccaattctattggtcagaaaagcatccagatgagcttagggcgatagtatctctccctgacgaagtttcctttcctgtaacaagcgagccgtcaactacgcgctttgaacttgccatttgtgaagatggtgaggaagtctctggccttgggccagcttatgcttccctggaaaacagacaggcaacagttcgattacgtaaaagcgaagtgagatttgtcaggcaaaatccatcggcaggtttgtcgttagtggctcgtgctggagggatgattgttgggagcattaaacttgatgacagtgaaattgccattggtgaggtgccgttaaccttcatcgttgatgcagatcaatggctgttacagggacaggcctcctgtagtgtgcaaagcagcgatgttctgattgtgctccctcgggacaatagtactgttgctggttttgatggccaatcgagtgcagtaaacgtattaggacttaaagcgctgcctgttaagggatgtcaggacgttacagttacagcaaatgaaacttatcggattcgcaccggaagagaacaaatcagcatcggaagatttgctctaaatggaaagcgtgcaagctgggtttgtcatccagatgagacatttattggtgtaccaaaagtcatttctacactaccagatattcaaagcattgatgtaacgcgttacctgagcggaatttcaattgagcaatgtcatatacaagagatgctgggggctcaatatctttctatccgtaatagtaataatgaaacgctcttgcgtcgcaaaatcggtatcttgcctgctgatttcagtattgagataaaaggtggaatgcacgcaaatgaaggcactatcgtaatcaccacacagcatccttgtgtagcaaaacttaaagataaaacattggaggctacacgtaagcgtactgaggggcgaacagagatacaacttaaagcggaaggggtacctccggcatttattacattacaagttctgcctaatttggcggctgaccccatcgacattgagttaccttttcccgctaaaggctgtctcgctcttgatgtaaacggacgtcctctggataaaaacattacgctgcatgatctgctgggttccagagcgtttctgttctccagaaatggtgagccgacaaaatatacattgcagttgtatttgcgctccgttagtggattacaggcatggcatgaatggtgttatacggcgttgagcgatcgtcctgttgaattgaatctctatagtctgcgcgaacatattgagaacctgatttcacttgaggcaggtattgatcaggttgttgagatgcgtattacgggggcaggtgtggtcatggcctggcaaattcgtcgctataaatacagcctgcgctatgattatgaaaaagaactattactcagccagtcagtgaaccatcgtgctgggcagattccttcccccgttatcatgctgttaagtgaacccgagaggaaatccattcccttagcatctagaatgagcgagggagtgcctgtcggtgaatatgagttgagctcaatcgttaacaaaaatggaccgtggttggttgtccctaaaccgggtgaagagatggcttttcgtccctgcttcattcgtggcgaatcttcgttaccggtagaagaaagcaacatccgctcattgcagaaagcgacccagctttttaatccacaggcagaagttaataccatcacacgggttctcggacagatggctaacgatcctgcccattccggctggcaatttatgcgtagcctgtacgatcaattcgggtatttaccactggcaacctttgaagtatggcgtgcactggtgcagcatccgcaggcattggcaatgtcgctcttcaaatttgaaatgtcagcagagtacctgagtcgtattgagaatgagttccctattttatgggagtttttccccatctttgagatcaaagctgcatctgagcgtttcaaattgttcctgagccaaaaaggtgcaccggaggaaacccaaaaattactggttactaatatgtttcaacggctggggctcgtgttcccgacatatgccgatgaaattgagaaatggttaagtaacggatatctccctccgtctattcctgaatcttgtgtccacgggtggtatcaggagctcttacgtgagcacagtgaggctcgctggcctgaatatggctgtaagcgtctgtatgaatggatgatgtcacaaaaaaatccagtgattggtattaatcctgatgcagattaccgctattccgtggcctggttacccgtcttcgccgcagcggtggcaagcggaaatgcttcttttgaatctgtatttgaccgtaaacccggtgccgtatttttcctgaggcaagtcagggatttcgattcccgctggtttaaggccatcttccagtgcagcctgttgcgttatgttgctaaaaaataa

SEQ ID NO: 28526 - DNA, 6315 bp, Escherichia coli; identical to SEQ ID NO: 28464

SEQ ID NO: 28527 - DNA, 2937 bp, Escherichia coli; identical to SEQ ID NO: 28445

SEQ ID NO: 28528 - DNA, 6315 bp, Escherichia coli; identical to SEQ ID NO: 28464

SEQ ID NO: 28529 - DNA, 2937 bp, Escherichia coli; identical to SEQ ID NO: 28489

SEQ ID NO: 28530 - DNA, 6315 bp, Escherichia coli; identical to SEQ ID NO: 28464

SEQ ID NO: 28531 - DNA, 2937 bp, Escherichia coli; identical to SEQ ID NO: 28445

SEQ ID NO: 28532 - DNA, 6315 bp, Escherichia coli; identical to SEQ ID NO: 28464

SEQ ID NO: 28533 - DNA, 2937 bp, Escherichia coli; identical to SEQ ID NO: 28445

SEQ ID NO: 28534 - DNA, 6315 bp, Escherichia coli; identical to SEQ ID NO: 28464

SEQ ID NO: 28535 - DNA, 2937 bp, Escherichia coli; identical to SEQ ID NO: 28445

SEQ ID NO: 28536 - DNA, 6315 bp, Escherichia coli; identical to SEQ ID NO: 28444

SEQ ID NO: 28537 - DNA, 2937 bp, Escherichia coli; identical to SEQ ID NO: 28445

SEQ ID NO: 28538 - DNA, 6315 bp, Escherichia coli; identical to SEQ ID NO: 28472

SEQ ID NO: 28539 - DNA, 2937 bp, Escherichia coli; identical to SEQ ID NO: 28445

SEQ ID NO: 28540 - DNA, 6315 bp, Escherichia coli
atggacgttcagcaactgcattatgcgccacttctaaatcagcttcatcagcgtgcggtgaggtcggtggtaagtcagttggcattgcggagcaagtcgttgactcattatctggaatcacaatattttcagcctcccggtcaggaggggtcactgcttgcagacccggtattcgaaagtacattcggctggatgcctgcggatgaaacaatggaggatttgcgggacaagctgatctccagcccgctggttgatgcattgagcaaagcgccagtgccatttcgtcatcaacttactgcgtggcgaacgattctggaagacaaaaaatccttgttagtgagcagcggtacgggatccgggaaaacagaatgctttatggtaccggttctggaagatcttattcgtcagcaaaaatcgacccgccagtcactaacagggacacaagctattttcttgtatccgttaaatgcattaattaacagccaacaggagcggcttcgcgaatggacgcgcggatttaaggggaaaatacgcttcgcgctatataatggcgaaacccggcataccaaatacgaaattcaggaagatcagttgaaagtacctgaacaagctttgagtcgggaagccatttatgaagaaccaccttccatcatggtgacgaataccaccatgctggaatatatgctgattcgtcgtaaagatgccccaatcatcgaaaagtctcaggggatgttaaagtatatcgtcctggatgaagcccatagttatattggttctcaggctgctgagttagcgctgcttttacgtcgtgttatgcaggctttcaatgttggacccggcacagataaacctgtgcagattatcgcgacctctgccactattggtgaagactctcctgaaggtaataaggagcttgctaaatttgtcgctgatctcgcgggcgttacagaacgtgatgtcaaagtggttcgcggttatcgacaaataccgcgggtatcggagtcgctgattcgtcatgaataccccacatctttaacttctcttaaatccctgagccctcaggatctttaccaacagctttgtcattaccgtgtggcccagcaattgcgtcaggcgttaactcatcccggacggcaggcagtacgtttgagtgagttgctcaatgttgccagaagaacctggccagatattaatcaccgtgagctactgcaactcctcgatctaatggcaagatcgcgagaaggtgaactggcttttacgccattacgtatgcatgggtttatcagaacactggcgggtctatgggcatgttcaaacaaacaatgctcacataaagcacatgaattaaatcagagtgactggccatttggtcaggtatggtttgagcagcgccaatattgtgactgtggagcgccggtatttgaagttttacgttgctccgggtgtggttcagcttatttgtctgccaaagaggagatgcgcggtgatggaacgaactggttggtagcgcaaccagccgctgccgaagtggatgagtttgctcttgatgtagatgtttattctgaagatgaagacaacgacgaattagacaataactctcaatttgatcgtctgattgcgagcgatggtgaaaaatatatcatttcactggaagaaacgacggcggggaaaattgatagtgaagcgcaaaagcactatgaaataaacctgttaagaccggaatctcgaggtgagggacgcaataactcctttgcttgtgtttgctgtggtgacactcaacggaaaaataatcctttattccgtccgcttcggctcggcgcgcccttttttttaaatgaaattattcctactctgctggagttttctccattaccgcaaacaagagaagagcagttaggaccgtttaatggtcgacgcttgctcacctttacggattcgcgtcagggtaccgctcgcatttcagcccgcttacagcaggatgccgataaagcgacgttgcgagctctttgttaccaggagctggcaaatattacagagccttcagcaaaactcagcccggcacactgtgcactgttagagaaagttattagccagttttctgtcctccctttaaaaaattccatcgacgcgctgaaaaaagcgatggctgcgaatgaggagcttagcccgacggacattcaggcacttaaaattattgagccgatggtgagttccttaagcacggagcatgctgaagcgatgcaaatacttcaggctaactctggcaatcagcagaagaaaaccatgtcatggcaaacgctgtctgaacagctggttggcagtgtggaccttgccgatagaatgagaggcagttttaaagaattgtctgggcttgatcttactaaacaacagtttgcagatttttgtttatacagcgagtttggtcgccgccctaaaaatgcctggaccctcgaaagtctgggtctggtagccattcactatccattcattgataaagttacaacctgcccgcaggactggaagacattattacccgatcccgataagcaattagcggaatggcgtaatttattgaagattactcttgatttctttatccgtgaaaacagtgccgttttttacgaaaacgagcaataccctcgctggatgggggcacgtttcccggtaaaaatgctccaggggccagataaaaaaaacaaagggcagaaacgtgatcaactttggccacaaatacgcgatcgccattataaccgggtcattaagctattaatcgcagtctttccggcaatacaacctgagcaggctcactggaaatcgttagttaaccacttaatgattgaggtctgggatgcaattcgaccctgcttacgtcagtttgagtcgggttatcagctggatattaaacaacaagctgaattttacagtccaaagcaagtgtggcgttgcccctatactcgacgtgcgttagacgtcacgttgctgggatactctccgtatttgccgggtagcaaagaaattgcacctgaaaaagcagtgttgattgaaatgcctgagcttcctgtacgtcactggcgtttgtctggtggtggagaaatcgcccgagaagaacgtctggagtggctggaaagtaatgcgctgattcaacatgcccgcgaggaaggattatggtctactcgcagcgaccgactggccctgaaagatagctggtatcgtctggaggaacactctgcgcagagaacgcctgagcagaaccagtttaatgaaaaacaatttaagtcaggcaaagttaatgtgctgaactgttccacgaccatggagatgggggtggatattggtggtatgagtttggtggcaatgaacaacgttcctccagcgccggcaaattatttgcaacgtgcaggtcgcgcggggcgtcgtggagagagtgcatctgctgccattacgttatgtaaaaacacggcgcatggaatggaggtattcaaagaccccctctgggcgttcaacactactgccagtgcgccacgggttcgttttgggagcagtagtattgttcaacgacatgttaatgccctggttttaggtctgtttttacgagctgaagttcctgatgcgacaaaactgagttgcaaatggttctttgaaggtgatgagagccagtgtcttcgttttctccattggttaaatcaccaggccgatcagctggcggataaacttaaacgccttactcagggaaccgtactgatgtcattgacggcaacccagctcttgacccgcacacaagcaatgatgcagcaggttgatatccgctggagaagccaacttgcgatactgttggaaaatatcgaagcgttgaaggcggataacagcgcgtgggaagaaacaccagcaggtaaagccatcgcttatcagcttcgtgattatcgcggtgcatatctgttttctaaactcattagtgaagcgttcctgccggggcatggtttcccggttggcgtagtcaatttcaattatctgacggcagatgagctggaaaaacgtcgcgcaataaaagccactcaggctgaccctaatgaagggggagaaagcttttctcgtcgtattgaaaaattgcccagccgtgatttgcctacagcattacgcgagtatgcgcctggtgcagatgtggtattgggcggaaaagtatatcgttcctcgggcattatgcttggcaaggtgcttgccagcgggcaggagctgtcaggcgatcatcatattccgtggttctggcattgccgtaaatgtggtgcgggggcaaccagtactacccatcctgtcgaatgtagtcactgcaaagcggatatacagcaacttgatgtgaagcgttatttacagcctgttggttttgcgacagatattcgttatcaggcacataatgatgtatccatgcctgcacaacttccctggaaagatccacgtgttcttgtaccgtcttcggtgtgggtttctttacccgatgctgggctaggacgttaccgttttagccatagtggggaattgttccacttcagtgaaggggaatttgggcacggctacgcaatttgcctctcatgtggtcgggcagaatctcaaactcaaccccagcgtacccctgaaaatctaaagaacccagagagggaaaatacgcattacctgttgcgagggggcagtaacgatcgtcaggggagcaataaattgtgccacggtcatgtgcataaagatctgtggttgggatatagcagtcgtacagatatggttgagctgcaactcaatgatgataatggcctgttgatccgtgatgaggttgccgcgcgttcccttgcggtcgctttgcgtgaagggttagcgcataaattgggtatcgaaaatactgagctgggcgtgacgacgcagcaagcgcgcgatatcaatggctataccggatattccatcttcatttacgacaataatgcgggtggtgcaggttatgcagtgcaattgatcgaccattgggctgatgtctttaattacgccagaaaattgctcgattgcagttgcgataaattctgtcaccactgcttgctcagctacgacagtcagcattatgtcaacagattagatcgtcaccatgcattaaccctgcttaccaatgtacggttgcagcgacttaacctcgcgccagaatatcagtacttcggcgatggtagccgggttgaaactaaccctctgagtttacgtattgcgcaatgcctgaacagcgagatttatgactcctgctcgctggttcttgcggggccgcaggaacagtgggactttgcccaatggccattatttaaagagttgctccagtttgcctcctccggtgggaatgttgagttgctggtggccacgccgctggcaaacttaactgatagctccagacatcagctttccgcgttggcggcgatgccgggaggtcgcttacaagtgaaatccattgccactgcgcagctcatgcaaggaaaggggcgctggcttgcgcaggtgactcgcgaagggcaaagccaacagtgggccgcagacgacagcgctaccgttgcacctggtgaattatggggacaaagtgcgtcttcaccagtagtgacacttaaaggaacgtccggaaaaaccttctcgggtcagaccttaagtgcagaagatttactgcccgccttacccaccggggcggtgcgcatcaatctctgtgaacaactggacgggccgctggaaggttttggttcgcgtttctggtcgttagtcacgcaacagcacgctggctggaagcaggcatttacccgccacaaagagataacgcatgttgagtacagcgatcgttatcttaatagcccattcacggcgcgtttgttaggtgaaatcttaaccgagctggttgaacagggaatggcggaacgcgccagcctcactgtttgcgtcaaaaaattggattacaactctcgccaacacgacgctctctataacgcgtggcttaatgaggaagatcgtcagcaggttgtgaccactttacttgaagaaggatatctggggcctgcgtggccgggagcaattagctggttaacgggggataaccagagtacggagcatggacgagaactgacagtcaccttcagcgatggcagtcagcattatgtcctgctcgacatggggcttagctactggcgctgtattgaagataccttctttgattttgccctgcgagtaccgcagcaagttgaacggctggcaaacacgcgagcgcgagctgttgccccgggtaatgaccttaggagttatattatcgctggataa

SEQ ID NO: 28541 - DNA, 2937 bp, Escherichia coli; identical to SEQ ID NO: 28445

SEQ ID NO: 28542 - DNA, 6315 bp, Escherichia coli; identical to SEQ ID NO: 28464

SEQ ID NO: 28543 - DNA, 2937 bp, Escherichia coli; identical to SEQ ID NO: 28445

SEQ ID NO: 28544 - DNA, 6315 bp, Escherichia coli; identical to SEQ ID NO: 28464

SEQ ID NO: 28545 - DNA, 2937 bp, Escherichia coli; identical to SEQ ID NO: 28445

SEQ ID NO: 28546 - DNA, 6315 bp, Escherichia coli; identical to SEQ ID NO: 28464

SEQ ID NO: 28547 - DNA, 2937 bp, Escherichia coli; identical to SEQ ID NO: 28445

SEQ ID NO: 28548 - DNA, 6315 bp, Escherichia coli; identical to SEQ ID NO: 28464

SEQ ID NO: 28549 - DNA, 2937 bp, Escherichia coli; identical to SEQ ID NO: 28445

SEQ ID NO: 28550 - DNA, 6315 bp, Escherichia coli; identical to SEQ ID NO: 28464

SEQ ID NO: 28551 - DNA, 2937 bp, Escherichia coli; identical to SEQ ID NO: 28445

SEQ ID NO: 28552 - DNA, 6315 bp, Escherichia coli; identical to SEQ ID NO: 28464

SEQ ID NO: 28553 - DNA, 2937 bp, Escherichia coli; identical to SEQ ID NO: 28445

SEQ ID NO: 28554 - DNA, 6315 bp, Escherichia coli; identical to SEQ ID NO: 28464

SEQ ID NO: 28555 - DNA, 2937 bp, Escherichia coli; identical to SEQ ID NO: 28445

SEQ ID NO: 28556 - DNA, 6315 bp, Escherichia coli
atggacgttcagcaactgcattatgcgccacttctaaatcagcttcatcagcgtgcggtgaggtcggtggtaagtcagttggcattgcggagcaagtcgttgactcattatctggaatcacaatattttcagcctcccggtcaggaggggtcactgcttgcagacccggtattcgaaagtacattcggctggatgcctgcggatgaaacaatggaggatttgcgggacaagctgatctccagcccgctggttgatgcattgagcaaagcgccagcgccatttcgtcatcaacttactgcgtggcgaacgattctggaagacaaaaaatccttgttagtgagcagcggtacgggatccgggaaaacagaatgctttatggtaccggttctggaagatcttattcgtcagcaaaaatcgacccgccagtcactaacagggacacaagctattttcttgtatccgttaaatgcattaattaacagccaacaggagcggcttcgcgaatggacgcgcggatttaaggggaaaatacgcttcgcgctatataatggcgaaacccggcataccaaatacgaaattcaggaagatcagttgaaagtacctgaacaagctttgagtcgggaagccatttatgaagcaccaccttccatcatggtgacgaataccaccatgctggaatatatgctgattcgtcgtaaagatgccccaatcatcgaaaagtctcaggggatgttaaagtatatcgtcctggatgaagcccatagttatattggttctcaggctgctgagttagcgctgcttttacgtcgtgttatgcaggctttcaatgttggacccggcacagataaacctgtgcagattatcgcgacctctgccactattggtgaagactctcctgaaggtaataaggagcttgctaaatttgtcgctgatctcgcgggcgttacagaacgtgatgtcaaagtggttcgcggttatcgacaaataccgcgggtatcggagtcgctgattcgtcatgaataccccacatctttaacttctcttaaatccctgagccctcaggatctttaccaacagctttgtcattaccgtgtggcccagcaattgcgtcaggcgttaactcatcccggacggcaggcagtacgtttgagtgagttgctcaatgttgccagaagaacctggccagatattaatcaccgtgagctactgcaactcctcgatctaatggcaagatcgcgagaaggtgaactggcttttacgccattacgtatgcatgggtttatcagaacactggcgggtctatgggcatgttcaaacaaacaatgctcacataaagcacatgaattaaatcagagtgactggccatttggtcaggtatggtttgagcagcgccaatattgtgactgtggagcgccggtatttgaagttttacgttgctccgggtgtggttcagcttatttgtctgccaaagaggagatgcgcggtgatggaacgaactggttggtagcgcaaccagccgctgccgaagtggatgagtttgctcttgatgtagatgtttattctgaagatgaagacaacgacgaattagacaataactctcaatttgatcgtctgattgcgagcgatggtgaaaaatatatcatttcactggaagaaacgacggcggggaaaattgatagtgaagcgcaaaagcactatgaaataaacctgttaagaccggaatctcgaggtgagggacgcaataactcctttgcttgtgtttgctgtggtgacactcaacggaaaaataatcctttattccgtccgcttcggctcggcgcgcccttttttttaaatgaaattattcctactctgctggagttttctccattaccgcaaacaagagaagagcagttaggaccgtttaatggtcgacgcttgctcacctttacggattcgcgtcagggtaccgctcgcatttcagcccgcttacagcaggatgccgataaagcgacgttgcgagctctttgttaccaggaactggcaaatattacagagccttcagcaaaactcagcccggcacactgtgcactgttagagaaagttattagccagttttctgtcctccctttaaaaaattccatcgacgcgctgaaaaaagcgatggctgcgaatgaggagcttagcccgacggacattcaggcacttaaaattattgagccgatggtgagttccttaagcacggagcatgctgaagcgatgcaaatacttcaggctaactctggcaatcagcagaagaaaaccatgtcatggcaaacgctgtctgaacagctggttggcagtgtggaccttgccgatagaatgagaggcagttttaaagaattgtctgggcttgatcttactaaacaacagtttgcagatttttgtttatacagcgagtttggtcgccgccctaaaaatgcctggaccctcgaaagtctgggtctggtagccattcactatccattcattgataaagttacaacctgcccgcaggactggaagacattattacccgatcccgataagcaattagcggaatggcgtaatttattgaagattactcttgatttctttatccgtgaaaacagtgccgttttttacgaaaacgagcaataccctcgctggatgggggcacgtttcccggtaaaaatgctccaggggccagataaaaaaaacaaagggcagaaacgtgatcaactttggccacaaatacgcgatcgccattataaccgggtcattaagctattaatcgcagtctttccggcaatacaacctgagcaggctcactggaaatcgttagttaaccacttaatgattgaggtctgggatgcaattcgaccctgcttacgtcagtttgagtcgggttatcagctggatattaaacaacaagctgaattttacagtccaaagcaagtgtggcgttgcccctatactcgacgtgcgttagacgtcacgttgctgggatactctccgtatttgccgggtagcaaagaaattgcacctgaaaaagcagtgttgattgaaatgcctgagcttcctgtacgtcactggcgtttgtctggtggtggagaaatcgcccgagaagaacgtctggagtggctggaaagtaatgcgctgattcaacatgcccgcgaggaaggattatggtctactcgcagcgaccgactggccctgaaagatagctggtatcgtctggaggaacactctgcgcagagaacgcctgagcagaaccagtttaatgaaaaacaatttaagtcaggcaaagttaatgtgctgaactgttccacgaccatggagatgggggtggatattggtggtatgagtttggtggcaatgaacaacgttcctccagcgccggcaaattatttgcaacgtgcaggtcgcgcggggcgtcgtggagagagtgcatctgctgccattacgttatgtaaaaacacggcgcatggaatggaggtattcaaagaccccctctgggcgttcaacactactgccagtgcgccacgggttcgttttgggagcagtagcattgttcaacgacatgttaatgccctggttttaggtctgtttttacgagctgaagttcctgatgcgacaaaactgagttgcaaatggttctttgaaggtgatgagagccagtgtcttcgttttcttcattggttaaatcaccaggccgatgagctggcggataaacttaaacgccttactcagggaaccgtcctgatgtcattgacggcaacccagctcttgacccgcacacaagcaatgatgcagcaggttgatatccgctggagaagccaacttgcgatactgttggaaaatatcgaagcgttgaaggcggataacagcgcgtgggaagaaacgccagcaggtaaagccatcgcttatcagcttcgtgattatcgcggtgcatatctgttttctaaactcattagtgaagcgttcctgccggggcatggtttcccggttggcgtagtcaatttcaattatctgacggcagatgagctggaaaaacgtcgcgcaataaaagctactcaggctgaccctaatgaagggggagaaagcttttctcgtcgtattgaaaaattgcccagccgtgatctacctacagcattacgcgagtatgcgcctggcgcagatgtggtattgggcggaaaagtatatcgttcctcgggcattatgcttggcaaggtacttgccagcgggcaggagctgtcaggcgatcatcatattccgtggttctggcattgccgtaaatgtggtgcgggggcaaccagtactacccgtcctgtcgaatgtagtcactgcaaagcggatatacagcaacttgatgtgaagcgttatttacagcctgttggttttgcgacagatattcgttatcaggcacataatgatgtatctatgcctgcacaacttccctggaaagatccacgtgttcttgtaccgtcttcggtgtgggtttctttacccgatgctgggctaggacgttaccgttttagccatagtggggaattgttccacttcagtgaaggggaatttgggcacggctacgcaatttgcctctcatgtggtcgggcagaatctcaaactcaaccccagcgtacccctgaaaatctaaagaacccagagagggaaaatacgcattacctgttgcgagggggcagtaacgatcgtcaggggagcaataaattgtgccacggtcatgtgcataaagatctgtggttgggatatagcagtcgtacagatatggttgagctgcaactcaatgatgataatggcctgttgatccgtgatgaggttgccgcgcgttcccttgcggtcgctttgcgtgaagggttagcgcataaattgggtatcgaaaatactgagctgggcgtgacgacgcagcaagcgcgcgatatcaatggctataccggatattccatcttcatatacgacaataatgcgggtggtgcaggttatgcagtgcaattgatcgaccattgggctgatgtctttaattacgccagaaaattgctcgattgcagttgcgataaattctgtcaccactgcttgctcagctacgacagtcagcattatgtcaacagattagatcgtcaccatgtattaaccctgcttaccaatgtacggttgcagcgacttaacctcgcgccagaatatcagtacttcggcgatggtagccgggttgaaactaaccctctgagtttacgtattgcgcaatgcctgaacagcgagatttatgactcctgctcgctggttcttgcggggccgcaggaacagtgggactttgcccaatggccattatttaaagagttgctccagtttgcctcctccggtgggaatgttgagttgctggtggccacgccgctggcaaacttaactgatagctccagacatcagctttccgcgttggcggcgatgccgggaggtcgcttacaagtgaaatccattgccactgcgcagctcatgcaaggaaaggggcgctggcttgcgcaggtgactcgcgaagggcaaagccaacagtgggccgcagacgacagcgctaccgttgcacctggtgaattatggggacaaagtgcgtcttcaccagtagtgacacttaaaggaacgtccggaaaaaccttctcgggtcagaccttaagtgcagaagatttactgcccgccttacccaccggggcggtgcgcatcaatctctgtgaacaactggacgggccgctggaaggttttggttcgcgtttctggtcgttagtcacgcaacagcacgctggctggaagcaggcatttacccgccacaaagagataacgcatgttgagtacagcgatcgttatcttaatagcccattcacggcgcgtttgttaggtgaaatcttaactgagctggttgaacagggaatggcggaacgtgccagcctcactgtttgcgtcaaaaaattggattacaattctcgccaacacgacgctctctataacgcgtggcttaatgaggaagatcgtcagcaggttgtgaccactttacttgaagaaggatatctggggccagcgtggccgggagcaattagctggttaacgggggataaccagagtatggagcatggacgagaactgacagtcaccttcagcgatggcagtcagcattatgtcctgctcgacatggggcttagctactggcgctgtattgaagacaccttctttgattttgctctacgagtaccgcagcaagttgaacggctggcaaacacgcgagcgcgagctgttgccccgggtaatgaccttaggagttatgttatcgctggataa

SEQ ID NO: 28557 - DNA, 2937 bp, Escherichia coli
atgattgaaaatgagagcggttatttgattacctatttcagaaggatatatcaggcgcttcgtgggcaatcatctcaatatcctgccgctaaaattgcacaagaattaggcgatacgattcctgtcacaatgcaaaacgaactggtctatgaaatagccggtgaattctgcgagactctctgccgattacttagtgagcatcctcctcatagcagtgatcccgtttctgcattacgtaagctctctccagactggcatcttcaacttccactcgttctccccgaagcgaatgctgcagagattgtaaggcgattactttctcaatcttctgaaatacgcagtgcaagtagtcttcaggttgaaagaatctgggtcgatgttgatgacagttggtattgcgatgcccggttccgattcccggccacaatgcgtacagaacagttaacctctttgtttgaatgccatattcagccggagcagacccgactcatcatttcaggaaaatggaaaaatggcggggcaaggttggcaatgctaagccgttatgagcagcaagattggcgggtcgagttattacctattgcgatgcaaaaactctctggtgcagatgcaatggccgaaatctcattgtcgcttcatgaaggtccaattctgttaggtcacacaattccaaaaggcggttatgaacttactgaagaacttccctgggtttttgaagcgatgaatgagagtgaatcgcagctaaaacttgttggtatggggtctgtgagttccaggctaaatgctctgtttatttcgctaccgaaaaatagccatttagatattagtggagaaggtgagtttgatatcccaaggttgctgaaaaacagtgaacgcagcttaactaaaataagtggagtatttagcgttgttttacatgatggtgctgtttgtacaattcgcacccagcaactttatgattctgcgattgaatattatattaaatcgacagaagttgaactggttaaatcggattatcctgtccatcgagcctggccgaagatcggttggaaaaaggatctgcaatatggcattgtaccggagaaagaacttttttggcgttccattcgttcaggtaataatgcctggtattctgtcgcatcagaaatgccaaaaggacagatagaagtccggcgaatagttaatgatgaggttttatttagcggtaaagttgtagttttaccagcagacttcgatattaatattatacctgagagtgctcagcaaggcattattatgctttctggtataacggatactagaattgataaatattcaaacaatgaaaaagtaacacttaagtccgattattcacaaaacgagtgtgctatttattataattcatcgctgatgctggaaaataccgttgatttacgggtctcctggaaagatggttctaatcttaaactattattacctaagccggttagcggtggccgatttgtaactaatgatggttctgttcattttgatggtgtggcatctatagcacatttgcatggaatagatgctgagttattaaccatatcatgtgctggaagaggatatcttaatatcgagttattggatgaaaatccagtagctgaaaaattccgctatttacatgccgaccttcctcttttatcaggactcaatgacaaattacaacaaatttcactttatgagaactataatttgctaaatgctatgctggcatgtgcatggaacagcaatagtacattatgtgttgatttttactctgacagatttggaaaggataaagcaacactcaatattaaacgctacgatggtagttttattgaacacgatcaagggttactggttgatataaaaaattctgttgtttttcctgcaaatagaatagacgaactggttgttgatgctatttctcttaagaatcctggcttacacatatcattgttaaaaaaagatgagtttgcttatgatctttcagctctgaatgttcaggatagtccatggttaattgtgggaaaacttgatggtacagctcgcattgcaccagtaattaaatggatgctacctgtattgcagacaaatgatttattactaaatgctctatgcgaagcagacccagaacagcgcaaaaaaaattttaatgagctaatttttgaaatagataacaacccattgcaaaattattgctgtttattaacagagtatattaagaaatacaaaatgaataatggcttatccttgctggatctggacttgttcagatgtatttcgagtaattaccgcgtggttgttcaattgttaatatcatcatgtctttctggtgatagcgatacgatttatgatatacaggaagaattacccttttcatggggatggattcccgtttcaatctggaaagatgttttccaaaaatgttggacttatctggagaaacagattaacgataaaacattagcattacatatattgcaaccctttattgcttttatgaaccatcgtgcacatatcgatcgtcggctggctccgattgcgaatatgttacttacatatagtgagagcctaccaaccggttgtgatgtattgccaactgttagtcgtgagcagtttaatgaagctaaacagatgctattaaggaaccccgacagctttgggcgtatcagtatcttccctaaagaactttggtctagtgctattactccagagttaaaatctgtttttaataagctttggattgaagataaatatcactcacggcttgaaaaacgttttaatttgatgttagtcgcagcgctgttaacccaaaaagataataacctgatacatcaactgtctgcgctttttgaatttcactatcagcaagccccacagcaattaggggtaatctatcaatattattttgaacaagcaggagtatgtcattga

SEQ ID NO: 28558 - DNA, 6345 bp, Escherichia coli
atgactacacgctatttttcgtcacttattgaacaatcgttgtctcgttcaactgaagcaacgctcagtatcatgggcgttaccaacccgcagctgcgtgaacatctcgcgcaacaaatgggggctgattgtgggaaaccgggctcattccttgcttctccggtattccagcaaatgtttggatggaaggagtcaaatcacacgatgcgcagcctgacggaaggcaacgcattgttgagcaaagcagtggttgattcactggataatcagagtaatggccggtaccgatttggtgctgactggaagccttttacacaccagttagccagttggaaagctttgctggaaaagaaacattcagtggtggtaaccagtggtacgggttcaggtaaaacggaatgttttatggttccggtgctggaagatctttaccgggaactgcatgaaaatggcaacaatccgttggttggtgtccgagccctttttctctatccattgaacgccttgattaattcacagcgcgagcgtctggatgcctggacgcgtggttttggtactgggattcgctactgcttgtataacggaaatacagaagagctccacgcaaaaatgaaaacagtgcaggataatagaccaaatgaagtcttatcccgtgaaaagatgcgtctggagccagccccgattctggtgaccaacggcacgatgctggaatatatgatggttcgccaggtcgacgccccgattatccagcaatccaaagcacaaaaatcactacgctggattgtactggatgaagcgcatacctatgtcgggtcgcaggccgctgaactggcgctccagctgcgtcgtgtgatgacagcgtttggcgtgacgccagatgatgtgcgctttgtagcgacctctgcgaccattgccggcagcgacgctgaaaagcagctgaaaaaatttctctctgaattatccggtatcccgaaggagcgcatcgatgttctggacggaagtcgggtgattcctgaactggaaccatccaaaaacgtttctcttccgttagacgaaatagagcaaatacccgatctggatctaagagataaaaatgataataaaattaaaggtataagtcctgatcgcttttatgcgcttacgcattcccccgaagcgcgttacatacgtgagatgttggtcaaacagcccaatccgatgaagctggatgagataacagagcggttaaacgtgctgacaaaacagcattacagccagcaggaagtactgcgttggatcgatgtctgttcagggactcaacctaatgcaaaggatcccgcatttcttaaagtcagggcgcatatcttccagcgtaatacccagggaatatgggcttgtgttgataaagattgcagattaaagcacggtacaccgctcgaaaaaggctggccctttggctatgtgtatgtgaaccagcgacaaaattgtgactgtggaagccctgtatacgaagtggcgttctgtaatgattgtaatgagcctcatcttctggcgcaggacaaaaagggcaaacttgtccaatgggaaaataaaggtggcgatgagttctccttgcaggatgaagtacctgttgaacatgacactacagaggaaaaagtcgaaaaagagaacagtttccagcctccgttgattattgccgcaggagagaccagcgagacaggctataccctacaacgcctcgaccgtcagacgcgccgtattggcgttattaataatgacagcattccgctgattattaatgatattgaacaggtttgtagcgccagcggctgtggctaccgaggcatgagcggaaaacaaccctttcggcgtgcattattaggtgggccattttacgttactaacatcgtgcctaccgttcttgagtattgtcaggactttgccagtgatgaaggcaaagagggcgtcggaccagattcgttgccagggcgaggacgtcgactcattacctttacggatagtcgacaagggacagcccggatggcggtgcgtatgcagcaagaagcagaacgtagtcgcttacgcggaagcgtagtcgaaattctgagctggcatcaacgaacgcaaacgcccacggcgccgaacgctaatgccgatctggaaaaattagcgaccagggtaaagcaagcccgtgagcaggcagaagaatatcgaagctggggattgccggatcaagcgaaattatcagaagcgcaggccgagcagcttgaacaggcttaccagtctgcaatcggtggaaaagctgcaattactctggtatcccgaacctggacagaaatggttaacgagcttaaagagagagccgatatccgtggcccggttctgcaatataaccattatcttaagcctgaagtgtttaatgaaaacggcgggcctctaaagctttcggaaatgttgttattccgggaattcatgcgtcgccctaaacggactaacagcctggaaacacaagggctggttcaggttggttacctggggctggagaaaatacataagatccctctgcactggcaggaaaaaggattaacgctggatgactggcgcgattttctcaaagttacgctggatcattacgttcgtgagagcaacttcacacagctggatgatgagctgaaaaactggatcggtagccgtttttcatcaaaattcgtccgtaacccggaatcaaaagatcctgaagataatcagaacagacgctggcctcaaattcgtaatggcaacgtatcccatcgtttagcgaagttactgatgctgggggctggattcaaaaccgtcaatacggcgactattgatattatcaatacatggctgaaagaagcatgggcccaacttaccggaccgcttgcagtactgaaacccgatggcaaccgtttttatttaccgaaagagcatatgactttttcattaatcacggatgcctggatttgcccggtaaccaataaaatcctggatacggcttttaaaggcttaaccccttatctgcctacccatatttcgttcgagcatcttacccaggcgcaatatgacacttttgtcgcgcagaaagtcaccatgccggaaatctggaagctggatcgttcacaggaagactacgcagagggtctggcaaaagcacgcgactgggtcagcaatgatccgctgatcgcacaattgcggtcggaaaacgtctggacagacatcaacgatcgtgtcgtggaaggcggtttctactatcgcactgccgagcactctgcccagcagtcgtcagaacgcctgcaaagctatgaaaagatgttccagatcgggcaactaaatgttctcaactgttccaccaccatggaaatgggggttgatatcgggggcattactgcggtggtaatgaacaacgtaccgccacatccggccaactatttacagcgcgccgggcgagccgggcgtagtaaagaatcacgtgcgatctcttacaccctatgtaaaggtaacccacacgaccagcaggtttttgccaacccgctctggccatttgaaaccatgatcccggcacccatggtcgcgatgaactccccccgactggtgcaacgtcacgtcaatgcattattactgtccgactttttatgtaacgttattggcgaaaccgataaagaaaaaaccagtctcgatagcctctggtttttcggtgaagatgacgggcagtcaaaatgcgaacgctttaaaatctggctggaacgtccggttcttgatatcgacacggcgctggaacggctggtgaaaggtacggcgttgcatggtgcaagagccgaatatctgcgggataaaacaatcaacgcgatcaccttcctgcagcagcggtggctctccgtttatcgcgatctcgtgacacaggagcgtgagtcgcagccgcaaacgccttatcgtaagcgcatagagctggagaagaaacggcactgtggcgagtatctgctgcgcgatctagctgccagaaccttcttgccgggatacggtttcccgacagatgtagtgacgtttgataacttcacaatggaagattatatccgcgaaaaatcgcaaaaaagtcgtgataaaaaggaccgtgaagataacgtctcccgttataaaggattaccttcccgtaacctcggtgttgccattcgtgaatatgcaccgggagcagagatcattcttgatggccgtgtcttccgctctgccggtgtctcactgcactggcacaacattaatgctgataccaatgaagcccagcgtctggattgcgcctggcgctgtcacaaatgcgggaccattggctatgaagaggggatgagcagttccgggatgctcttttgctccaatagcgcctgcggcgaaaaaataatcatggataatcgccgtcaggtgctgcagcctgccgggtttgtcaccgatgcacacgctccggtaacgaacaatattgaaaccatgaaattcgtcccggttgtccccgcgtgggtctttgttaaagcagagcccgtaccgttgcctaacccgcaaatgggttatatggcttctggggctgatgggcatgttttccagcaaagtttgggggaaggtggacacggttatgcattgtgtctgagctgtggccgtgctgagtcgatgctgaatgaaaatgatgcgccgaaaagcatggaagctcactatccaccgcgtccgggtaaagcggatcgcgatagccagaatcatcgtctgatttgccccggttcgacggcactcatgaagaacgtcaccctgggcgcactggcgcgcaccgatgtctttgaaatggttctgcgcaaaccgcaaaacggcgagtatctgccagataacacagaggaggggcggattgttgccatgactctggcggttgctctgcgtcaggcgctggcgggcgttctgggtatctccgccgcagaactcggctattctgtacgtccggtcagactggaggatgggcaatcggtattagccgtacagctttatgatgtgatcagcggtggtgcaggttttgcctccagcgcaccggtacacattgaagctatattgcagggaatggtgaaacagttaggctgccgccattgtgagactgcatgtagtgaatgcctgcttgattcccagactcgccacgatcacgatttgctggatcgcaaagcggcgctggcctggcttggcgatgacttcacgtattacatcggtttaccggatgaagagacattctcgctgccggatgcccgctactgccctggcgccattggcgatacgattcgccgggcgattaacgaaggcgctgaaaagctcaccctgtggatgaccggcgcgcccaatgagtgggatttatacgcacgtcagttccgcgcggcggttcagaactatcggctaaaagacaacgtcgaggtcgatcttgttattcctgcgggagtggatgacccggacctgttgcacgaactatcgcaatttactgcgctgggtgtgcggctatgccatgttgaacaggatttgaaattaccgatcgttgctcaggtcacctttgccgatcgcgtgatgacgctggcctctcgtagccagcaggcaacgattccggggccggagtggcacctgaatgacgaactggtggtacgtagtctcggctataaaacggtagagctgaacgaatttattctgccggctaaagccgccaacgctgtcgagcgggtcaaagacattcagatccacaaacagttgaatggaccactgtcgcagtttgggcaacgcttctgggacgtgctgtttaacgaccatgaagaagcgcagtcactgatgaataacacgcgaattaccggcgttcactataccgatcgctatctgcaaaacccggttgcgctggcgttgttgggatcaattttgagaccgctaaaaacaaagctgaccgatggcgctgaagtgacgctggatacgctatttaaagataaagatcaccccggtaaccggcctttccatgactggatgagcatagcggattttcaggatttcgctgatcagtggtttgctgctgcgctgggcaggccggtagaactgacggtgttcgactcgccgcgcgatatccctcaccatcgtaaactgacggtgacttttgatgatggtcaggtattgaagatccgcttcgatcaggggatgggctactggcgcatcaactttgcatcgcaatggcattactttgatttccgcgatgacgtttctttccagttagtcaaaatggctcaggcctgcaaggaagggaatgtcgccaacagcgaagagagttgggcaacggatgtgctggtggaggtgatcgcctcctga

SEQ ID NO: 28559 - DNA, 2205 bp, Escherichia coli
atgattgttgggagcattaaacttgatgacagtgaaattgccattggtgaggtgccgttaaccttcatcgttgatgcagatcaatggctgttacagggacaggcttcttgcagtgtgcgaagcagcgatgttctgattgtactccctcgggataatagcaatgttgctggttttgatggccaatcgagcgcagtaaacgtattaggactaaaagcactacctgtgaagggatgtcaggacgttacagttacagcaaatgaaacttatcggattcgcaccggaagagaacaaatcagcatcggaaggtttgctctaaatggaaagcgtgcaagctgggtttgtcatccagatgaaacatttattggtgtaccaaaagtcatttctacactaccggatattcaaagcattgatgtaacgcgttacctgagcggaatttcaattgagcaatgtcatatacaagagatgctgggggctcaatatctttctatccgtaatagtaataatgaaacgctcttgcgtcgcaaaatcggtatcttgcctgctgatttcagtattgagataaaaggtggaatgcacgcaaatgaaggcactatcttaatcaccacacagcatccttgtgtagcaaaacttaaagataaaacattggaggctacacgtaagcgtactgaggggcgaacagagatacaacttaaagcggaaggggtacctccggcatttattacattacaagttctgcctaatttggcggctgaccccatcgacattgagttaccttttcccgctaaaggctgtctcgctcttgatgtaaacggacgtcctctggataaaaacattacgctgcatgatctgctgggttccagagcgtttctgttctccagaaatggtgagccgacaaaatatacattgcagttgtatttgcgctccgttagtggattacaggcatggcatgaatggtgttatacggcgttgagcgatcgtcctgttgaattgaatctctatagtctgcgcgaacatattgagaacctgatttcacttgaggcaggtattgatcaggttgttgagatgcgtattacggaggcaggtgtggtcatggcctggcaaattcgtcgctataaatacagcctgcgctatgattatgaaaaagaactattactcagccagtcagtgaaccatcgtgctgggcagattccttcccccgttatcatgctgttaagtgaactcgagaggaaatccatccccttagcatcaagaatgagcgagggagtgcctgtcggtgaatatgagttgagctcaatcgttaacaaaaatgggccatggttggttgttcctaaaccgggtgaggagatggcttttcgcccctgcttcattcgtggcgaatcttcgttaccggtagaagaaagcaacatccgctcattgcagaaagcgacccagctttttaatccacaggcagaagttaataccatcacactggttctcggacagatggctaacgatcctgcccattccggctggcaatttatgcgtagcctgtacgatcaatttggttatttaccgctggcaacctttgaagtatggcgtgcactagtgcagcatccgcaggcattggcgatgtcgctcttcaaatttgaaatgtcagcagagtacctgagtcgtattgagaatgagttccctattctatgggagtttttccccatctttgagatcaaagctgcatctgagcgtttcaaattgttcctgagccaaaaaggtgcaccggaggaaacccagaaattactggttactaatatgtttcaacggctggggctcgtgttcccgacatatgccgatgaaattgagaaatggttaagtaacggatatctccctccgtctattcctgaatcttgtgtccacgggtggtatcaggagcttttacgtgagcacagtgaagctcgctggcctgaatatggctgcaagcgtctgtataaatggatgatgtcacaaaaaaatccagtgattggtattaatcctgacgcaaatcaccgctattccgtggcctggttacccgtcttcgctgcagctgtggcaagcggaaatacttcttttgaagctgtatttgaccgtaaacccggtgccgtatttttcctgaggcaagtcagggacttcgattcccgctggtttaagaccatctttcagtgcagcctgttgcgttatgttgctaaaaaataa

SEQ ID NO: 28560 - DNA, 6345 bp, Escherichia coli
atgactacacgctatttttcgtcacttattgaacaatcgttgtctcgttcaactgaagcaacgctcagtatcatgggcgttaccaacccgcagctgcgtgaacatctcgcgcaacaaatgggggctgattgtgggaaaccgggctcattccttgcttctccggtattccagcaaatgtttggctggaaggagtcaaaccacacgatgcgcagcctgacggaaggcaacgcattgttgagcaaagcagtggttgattcactggatgatcagaataatggccggtaccggtttggtgctgactggaggccttttacgcaccagttagccagttggaaagctttgctggaaaagaaacattcagtggtggtaaccagtggtacgggttcaggtaaaacggaatgttttatggtaccggtgctggaagatctttaccgggaactgcatgaaaatggcaacaatccgttggtcggtgtccgagccctttttctctatccattgaacgccctgattaattcacagcgcgagcgtctggatgcctggacgcgtggttttggtacagggatccgctactgcctttacaacggcaacaccgaaaacctacacgcttcggtaaaaagcgaacaggcaaaaaggccgaatgaggtgctctcgcgcgaaaaaatgcgtgaagaacctgcgccgattctggtgaccaacggcacgatgctggaatatatgatggttcgccaggtcgacgccccgattatccagcaatctaaagcacaaaaatcactacgctggattgtactggatgaagcgcatacctatgtagggtcgcaggccgctgaactggcgctccagctgcgtcgtgtgatgaccgcgtttggcgtgacaccagatgacgtgcgctttgtcgcgacctctgcgaccattgccggcagcgacgctgaaaagcagctgaaaaaatttctctctgaattatccggtatcccgcaggagcgcatcgatgttctggacggaagtcgggtgattcctgaactggaaccatccaaaaacgtttctgttccgttagacgagatagagcaaatacctgatctggatctaagagataaaaatgataataaaattaaagggataagtcctgagcgcttttatgcgcttacgcattcccccgaagcgcgttacatacgtgagatgttggtcaaacagcccaatccgatgaagctggatgagataacagagcggttacacgtgctgacaaaacagcattacagccagcaggaagtactgcgttggatcgatgtctgttcagggactcaacctaatgcaaaggatcccgcatttcttaaagtcagggcgcatatcttccagcgtaatacccagggaatatgggcttgtgttgataaagattgcagattaaagcacggtacaccgctcgacaaaggctggccctttggctatgtgtatgtgaaccagcgacaaaattgtgactgtggaagccctgtatacgaagttgcattctgtaatgattgtaatgagcctcatcttctggcacgggacaaaaagggcaaactagtccagtgggaaaataaaggtggcgatgaattctctttgcaggatgaagtacctgttgaacatgacgctacagaagaaaaagtcgaaaaagagaacagttttcagcctccgttgattattgccgcaggagagaccagcgaggcaggttataccctacaacgcctcgaccgtcagacgcgccgtattggcgttattaacaatgacagcattccgctgattattaatgatattgaacaggtttgtagtgccagtggctgtggctacagaggcatgagtgggaaacagcccttccggcgtgcactattaggtgggccattttacgttactaatatcgtgcccaccgttctagagtattgtcaggactttaccagtgatgaaggcaaagagggcgtcggaccagattcgttgccaggacgaggtcgtcgactcatcacctttacagacagtcgacaagggacagcccgaatggcggtgcgtatgcagcaagaagcagaacgcagtcgcttacgcggaagcgtagtcgaaattctcagctggcatcaaaggacgcaaacgtctacagcgccgaatgccaatgccgatctggaaaaattagcggccagggcgaagcaagcccgtgagcaggcagaagaatatcgaagctggggaatgccagaccaggcgaaattgtcacaagcacaggctgaacagcttgaacaggcttatcaggctgcaaccggtgggaaagctgcgactatcctggtatcccgaacctggacggagatggttaacgagcttaaagagagagccgatatccgcgggccggttctgcaatataaccattatcttaagcctgaagtgtttaatgaaaacggcggcccccttaagctttctgaaatgttgttgttccgggaattcatgcgtcgccctaaacggactaacagcctggaaacacaggggctggttcaggttggttaccaggggctggagaaaatacataagagccccttgcactggcaggaaaaaggattaacgctggatgactggcgcgattttctcaaggttacgttggatcattacgttcgcgagagcaacttcacacagctggatgatgagctgaaaaactggattggtagccgtttttcatcaaaattcgtccgtaacccggaatcaaaagatcctgaagataatcagaacagacgctggcctcaaattcgtaatggcaacgtatcccatcgtttagcgaagttgctgatgctgggggctggattcaaaaccgtcaatgcggcaactattgatattatcaatacatggctgaaagaagcatgggcccaacttaccggaccgcttgcagtactgaaacccgatggcaaccgtttttatttaccgaaagagcatatgactttttctttaatcacggatgcctggatttgcccggtaaccaataaaatcctggatacggcttttaaaggcttaaccccttatctgcctacccatatttcgttcgagcatcttaccctggcgcaatatgacacttttgtcgcgcagaaagtcacaatgccggaaatctggaagctggatcgttcacaggaagactacgcagagggtctggcaaaagcacgcgactgggtcagccatgatccgctgatcgcacaattgcggtcggaaaacgtctggacagacattaacgatcgtgtcgtggaaggcggcttctactatcgtactgccgagcactctgcccagcagtcgtcagaacgtctgcaaagctatgaaaagatgttcaagaatgggcaactaaatgttctcaactgttccaccaccatggaaatgggggttgatatcgggggtattactgcggtggtaatgaacaacgtaccgccacatccggccaactatttacagcgcgccgggcgagccgggcgtagtaaagaatcacgcgcgatctcttacaccctatgtaaaggtaacccacacgaccagcaggtttttgccaacccgctctggccatttgaaaccatgatcccggcacccatggtcgcgatgaactccgcccgactggtgcaacgtcacgtcaatgcattattactgtccgactttttatgtaacgttattggcgaaaccgataaagaaaaaaccagcctcgatagcctctggtttttcggtgaagatgacgggcagtcaaaatgcgaacgctttaaaatctggctggaacgtccggttcttgatatcgacacggcgctggaacggctggtgaaaggtacggcgttgcatggtgcaagagccgaatatctgcgggataaaacaatcaacgcgatcaccttcctgcaacagcggtggctctccgtttatcgcgatctcgtgacacaggagcgtgagtcgcagccgcaaacgccttatcgtaagcgcatagagctggagaagaaacggcactgtggcgagtatctgctgcgcgatctggctgccagaaccttcctgccgggatacggtttcccgacagatgtagtgacgtttgataacttcacgatggaagattatatccgcgaaaaatcgcagaaaagtcgtgataaaaaggaccgtgaagataacgtttcccgttataaaggattaccttcccgtaacctcggtgttgccattcgtgaatatgcaccgggagcagagatcatccttgatggccgtgtcttccgctctgccggtgtctcactgcactggcacaacattaatgctgataccaatgaagcccagcgtctggattgcgcctggcgctgtcacaaatgcgggaccattggctatgaagaggggatgagcagttccgggatgctcttttgctccaatagcgcctgcggcgaaaaaataatcatggataatcgccgtcaggtgctgcagcctgccgggtttgtcaccgatgcacacgctccggtaacgaacaatattgaaaccatgaaattcgtcccggttgtccccgcgtgggtctttgttaaagcagagcccgtaccgttgcctaacccgctaatgggttatatggcttctggggctgatgggcatgttttccagcaaagtttgggggaaggtggacacggttatgcattgtgtctgagctgtggccgtgctgagtcgatgctgaatgaaaatgatgcgccgaaaagtatggaagctcactatccaccgcgtccgggtaaagcggatcgcgacagccagaatcatcgtctgatttgccccggttcgacggcactcatgaagaatgtcaccctgggcgcactggcgcgtaccgatgtctttgaaatggttctgcgcaaaccgcaaaacggcgagtatctgccagataacacagaggaggggcggattgttgccatgactctggcggttgctctgcgtcaggcgctggcgggcgttctgggtatctccgccgcagaactcggctattctgtacgtccggtcagactggaggatgggcaatcggtattagccgtacagctttatgatgtgatcagcggtggtgcaggttttgcctccagcgcaccggtacacattgaagctatattgcagggaatggtgaaacagttaggctgccgccattgtgagactgcatgtagtgaatgcctgcttgattcccagactcgccacgatcacgatttgctggatcgcaaagcggcgctggcctggcttggcgatgacttcacgtattacatcggtttaccggatgaagagacattctcgctgccggatgcccgctactgccctggcgccattggcgatacgattcgccgggcgattaacgaaggcgctgaaaagctcaccctgtggatgaccggcgcgcccaatgagtgggatttatacgcacgtcagttccgcgcggcggttcagaactatcggctaaaagacaacgtcgaggtcgatcttgttattcctacgggagtggatgacccggacctgttgcatgaactatcgcaatttactgcgctgggtgtgcggctgtgccatgttgaacaggatctgcaattaccgatcgttgcccaggtcacctttaccgatcgcgtgatgacgctggcctctcgcagccagcaggcaacgattccggggccggagtggcacctgaatgacgaactggtggtgcgtagtctcggttataaaacggtagaactgaacgagtttattctgccggctaaagccaccaacgctgtcgagcgggtcaaagacattcagatccacaaacagttgaatggaccactgtcgcagtttgggcaacgcttctgggacgtgctgtttaacgaccatgaagaagcgcagtcactgatgaataacacgcgaattaccggcgttcactataccgatcgctatctgcaaaacccggttgcgctggcgttgttgggatcaattctgagaccgctaaaaacaaagctgaccgatggcgctgaagtgacgctggatacgctatttaaagataaagatcgccccggtaaccggcctttccatgactggatgagcatagcggattttcaggatttcgctgatcagtggtttgctgctgcgctgggcaggccggtagaactgacggtgttcgactcgccgcgcgatatccctcaccatcgtaaactgacggtgacttttgaggatggtcaggtattgaagatccgcttcgatcaggggatgggctactggcgcatcaacttttcatcgcaatggcattactttgatttccgcgatgacgtttctttccagttagtcaaaatggctcaggcctgcaaggaagggaatgtcgccaacagcgaagagagttgggcaacggatgtgctggtggaggtgatcgcctcctga

SEQ ID NO: 28561 - DNA, 3291 bp, Escherichia coli
ttgggtcaatcagaatacatttcatgggtaaaatgtacttcctggctaagtaactttgtgaatcttagagggttgagacaaccggatggccgtcctctttatgaatatcatgcaaccaatgatgaatatacccaattaacgcagctactccgtgcagtcggtcaatcacaatctaatatatgtaatagggactttgctgcctgttttgttcttttttgctctgagtggtaccgcagggattatgaacggcaatgcggatggacgtgggaccctatatataaaaaaatagggatttcattcaccgccacagagcttggtactatcgtaccgaaagggatggaagattactggctgcgcccaattcgattttatgaatctgaacgacgcaattttctcggaacattattcagtgaaggtggtttacctttccggctactcaaagaatcagacagtcgctttctggctgttttctccaggatccttggacaatatgagcaagcaaagcagtcaggtttttctgccctttcgctggcaagagctgtcatagaaaaatcagcgctgccaactgtttttagcgaagatacctctgtagaacttatcagtcatatggctgataacctcaattccttagtacttactcacaacctaataaatcacaaagaaccagtacaacagcttgagaaggttcaccctacctggcgaagcgagtttccaataccgttagatgatgaaacaggaacgcattttttgaatggactgctatgcgcagcctctgtagaggctaagcctcgactacaaaaaaataagagtacgcgttgccaattctattggtcagaaaagcatccagatgagcttagggtgatagtatctcttccggacgaagtttcctttcctgtaacaagcgagccgtcaactacgcgctttgaacttgccatttgtgaagatggtgaggaagtctctggccttgggccagcctatgcttctctggaaaacagacaggcaacagttcgattacgtaaaagcgaagtgagatttggcaggcaaaatccatcggcaggtttgtcgttagtggctcgtgctggagggatgattgttgggagcattaaacttgatgacagtgaaattgccattggtgaggtgccgttaaccttcatcgttgatgcagatcaatggctgttacagggacaggcttcttgcagtgtgcgaagcagcgatgttctgattgtgctccctcgggataatagcaatgttgctggttttgatggccaatcgagggcagtaaacgtattaggactaaaagcactacctgtgaagggatgtcaggacgttacagttacagcaaatgaaacttatcggattcgcaccggaagagaacaaatcagcatcggaaggtttgctctaaatggaaagcgtgcaagctgggtttgtcatccagatgaaacatttattggtgtaccaaaagtcatttctacactaccggatattcaaagcattgatgtaacgcgttacctgagcggaatttcaattgagcaatgtcatatacaagagatgctgggggctcaatatctttctatccgtaatagtaagaatgaaacgctcttgcgtcgcaaaatcggtattttgcctgctgatttcagtattgagataaaaggtggaatacacgcaaatgaaggcactatcgtaatcaccacacagcatccttgtgtagcaaaacttaaagataaaacattggaggctacacgtaagcgtactgaggggcgaacagagatacaactcaaagcggaaggggtacctccggcatttattacattacaagttctgcctaatttggcggctgaccccatcgatattgagttaccttttcccgctaaaggctgtctcgctcttgatgtaaacggacgtcctctggataaaaacattacgctgcatgatctgctgggttccagagcgtttctgttctccagaaatggcgagccgacaagatatacattgcagttgcatttgcgctccgttagtggattacaggcatggcacgaatggtgttatacggcgttgagcgatcgtcctgttgaattgaatctctatagtctgcgcgaacatattgagaacctgatttcacttgaggcaggtattgaccaggttgttgagatgcgtattacgggggcgggtgtggtcatggcctggcaaattcgtcgctataaatacagtctgcgctatgattatgaaaaagaactattactcagccagtcagtgaaccatcgtgctggacagattccttcccccgttatcatgctgttaagtgaacccgagaggaaatccatccccttagcatcaagaatgagcgagggagtgcctgtcggtgaatatgagttgagctcaatcgttaacaaaaatggaccgtggttggttgtccctaaaccgggtgaagagatggcttttcgtccctgcttcattcgtggcgaatcttcgttaccggtagaagaaagcaacatccgctcattgcagaaagcgacccagctttttaatccacaggcagaagttaataccatcacactggttctcggacagatggctaacgatcctgcccattccggctggcaatttatgcgtagcctgtacgatcaatttggttatttaccactggcaacctttgaagtatggcgtgcactggtgcagcatccgcaggcattggcaatgtcgctcttcaaatttgaaatgtcagcagagtacctgagtcgtattgagaatgagttccctattctatgggagtttttccccatctttgagatcaaagcggcatctgagcgtttcaaattgttcctgagccaaaaaggtgcaccggaggaaacccagaaattactggttactaatatgtttcaacggctggggctcgtgttcccgacatatgccgatgaaattgagaaatggttaagtaacggacatctccccccgtctattcctgagtcttttgtccacgtgtggtatcaggagcttttacgtgagcatagtgaagctcaatggccagagtacggcagcaagcggctgcatagctggatggcatcacaaaaaaatccagtgattggtattaatcctgacgcaaatcaccgctattccgtggccttgttacccgtcttcgctgcagctgtggcaagcggaaatgcttcttttgaatctgtatttgaccgtaaacccggtgccgtatttttcctgaggcaagtcagggatttcgattcccgctggtttaaggccatcttccagtgcagcctgttgcgttatgttgctaaaaaataa

SEQ ID NO: 28562 - DNA, 6345 bp, Escherichia coli; identical to SEQ ID NO: 28446

SEQ ID NO: 28563 - DNA, 2205 bp, Escherichia coli
atgattgttgggagcattaaacttgatgacagtgaaattgccattggtgaggtgccgttaaccttcatcgttgatgcagatcaatggctgttacagggacaggcctcctgcagtgtgcgaagcagcgatgttctgattgtgctccctcgggacaatagcactgttgctggttttgatggccaatcgagtgcagtaaacgtattaggacttaaagcgctacctgttaagggatgtcaggacgttacagttacagcaaatgaaacttatcggattcgcaccggaagagaacaaatcagcatcggaaggtttgctctaaatggaaagcgtgcaagctgggtttgtcatccagatgagacatttattggtgtaccaaaagtcatttctacactaccagatattcaaagcattgatgtaacgcgttacctgagcggaatttcaattgagcaatgtcatatacaagagatgctaggggctcaatatctttctatccgtaatagtaataatgaaacgctcttgcgtcgcaaaatcggtatcttgcctgctgatttcagtattgagataaaaggtggaatgcacgcaaatgaaggcactatcgtaatcaccacacagcatccttgtgtagcaacacttaaagataaaacattggaggctacacgtaagcgtactgaggggcgaacagagatacaactcaaagcggaaggggtacctccggcatttattacattacaagttctgcctaatttggcggctgataccatcgacattgagttacctttcccagctaaaggctgccttgctcttgatgtaaacggacgtcctctggataaaaacattacgctgcatgatctgctgggttccagagcattcctgttctccagaaatggtgagccgacaaaatatacattgcagttgcatttgcgctccattagtggattacaggcatggcacgaatggagttatacggcattgagcgagcgtcctgttgaattgaatctctatagtctacgtgaacacattgaaaatctgatttcacttgaggcaggtattgatcaggttgttgagatgcgtattacgggggcgggtgtggtcatggcctggcaaattcgtcgctataaatacagcctgcgctatgattatgaaaaagaactattactcagccagtcagtgaaccatcgtgctggacagattccttcccccgttatcatgctgttaagtgaacccgagaggaaatccattcccttagcatcaagaatgagcgagggagtgcctgtcggtgaatatgagttgagctcaatcgttaacaaaaacggaccatggttggttgttcctaaaccgggtgaagagatggcttttcgcccctgcttcattcgtggcgaatcttcgttaccggtagaagaaagcaacatccgctcattgcagaaagcgacccagctttttaatccacaggcagaagttaataccatcacacgggttctcggacagatggctaacgatcctgcccattccggctggcaatttatgcgtagcctgtacgatcaatttggttatttaccgctggcaacctttgaagtatggcgtgcactagtgcagcatccgcaggcattggcgatgtcgctcttcaaattcgaaatgtcagcagagtatctgagtcgtattgagaatgagttccctattttatgggagtttttccccatctttgagatcaaagctgcatctgagcgtttcaaattgttcctgagccaaaaaggtgcaccggaggaaacccagaaattactggttaccaatatgtttcaacggctggggctcgtgttcccgacatatgccgatgaaattgagaaatggttaagtaatggatatctccccccgtctattcctgaatcttgtgtccacgggtggtatcaggagctcttacgtgagcacagtgaagctcgctggcctgaatacggctgcaagcgtctgtataaatggatgatgtcacaaaaaaatccagtgattggtattaatcctgacgcaaatcaccgctattccgtggcctggttacccgtcttcgccgcagcggtggcaagcggaaatgcttcttttgaatctgtatttgaccgtaaacccggtgccgtatttttcctgaggcaagtcagggatttcgattcccgctggtttaaggccatcttccagttcagcctgttgcgttatgttgctaaaaaataa

SEQ ID NO: 28564 - DNA, 6345 bp, Escherichia coli; identical to SEQ ID NO: 28560

SEQ ID NO: 28565 - DNA, 3291 bp, Escherichia coli
ttgggtcaatcagaatacatttcatgggtaaaatgtacttcctggctaagtaactttgtgaatcttagagggttgagacaaccggatggccgtcctctttatgaatatcatgcaaccaatgatgaatatacccaattaacgcagctactccgtgcagtcggtcaatcacaatctaatatatgtaatagggactttgctgtctgttttgttcttttttgctctgagtggtaccgcagggattatgaacggcaatgcggatggacgtgggaccctatatataaaaaaatagggatttcattcaccgccacagagcttggtactatcgtaccgaaagggatggaagattactggctgcgcccaattcgattttatgaatctgaacgacgcaattttctcggaacattattcagtgaaggtggtttacctttccggctactcaaagaatcagacagtcgctttctggctgttttctccaggatccttggacaatatgagcaagcaaagcagtcaggtttttctgccctttcgctggcaagagctgtcatagaaaaatcagcgctgccaactgtttttagcgaagatacctctgtagaacttatcagtcatatggctgataacctcaattccttagtacttactcacaacctaataaatcacaaagaaccagtacaacagcttgagaaggttcaccctacctggcgaagcgagtttccaataccgttagatgatgaaacaggaacgcattttttgaatggactgctatgcgcagcctctgtagaggctaagcctcgactacaaaaaaataagagtacgcgttgccaattctattggtcagaaaagcatccagatgagcttagggtgatagtatctcttccggacgaagtttcctttcctgtaacaagcgagccgtcaactacgcgctttgaacttgccatttgtgaagatggtgaggaagtctctggccttgggccagcctatgcttctctggaaaacagacaggcaacagttcgattacgtaaaagcgaagtgagatttggcaggcaaaatccatcggcaggtttgtcgttagtggctcgtgctggagggatgattgttgggagcattaaacttgatgacagtgaaattgccattggtgaggtgccgttaaccttcatcgttgatgcagatcaatggctgttacagggacaggcttcttgcagtgtgcgaagcagcgatgttctgattgtgctccctcgggataatagcaatgttgctggttttgatggccaatcgagggcagtaaacgtattaggactaaaagcactacctgtgaagggatgtcaggacgttacagttacagcaaatgaaacttatcggattcgcaccggaagagaacaaatcagcatcggaaggtttgctctaaatggaaagcgtgcaagctgggtttgtcatccagatgaaacatttattggtgtaccaaaagtcatttctacactaccggatattcaaagcattgatgtaacgcgttacctgagcggaatttcaattgagcaatgtcatatacaagagatgctgggggctcaatatctttctatccgtaatagtaagaatgaaacgctcttgcgtcgcaaaatcggtattttgcctgctgatttcagtattgagataaaaggtggaatacacgcaaatgaaggcactatcgtaatcaccacacagcatccttgtgtagcaaaacttaaagataaaacattggaggctacacgtaagcgtactgaggggcgaacagagatacaactcaaagcggaaggggtacctccggcatttattacattacaagttctgcctaatttggcggctgaccccatcgatattgagttaccttttcccgctaaaggctgtctcgctcttgatgtaaacggacgtcctctggataaaaacattacgctgcatgatctgctgggttccagagcgtttctgttctccagaaatggcgagccgacaagatatacattgcagttgcatttgcgctccgttagtggattacaggcatggcacgaatggtgttatacggcgttgagcgatcgtcctgttgaattgaatctctatagtctgcgcgaacatattgagaacctgatttcacttgaggcaggtattgaccaggttgttgagatgcgtattacgggggcgggtgtggtcatggcctggcaaattcgtcgctataaatacagtctgcgctatgattatgaaaaagaactattactcagccagtcagtgaaccatcgtgctggacagattccttcccccgttatcatgctgttaagtgaacccgagaggaaatccatccccttagcatcaagaatgagcgagggagtgcctgtcggtgaatatgagttgagctcaatcgttaacaaaaatggaccgtggttggttgtccctaaaccgggtgaagagatggcttttcgtccctgcttcattcgtggcgaatcttcgttaccggtagaagaaagcaacatccgctcattgcagaaagcgacccagctttttaatccacaggcagaagttaataccatcacactggttctcggacagatggctaacgatcctgcccattccggctggcaatttatgcgtagcctgtacgatcaatttggttatttaccactggcaacctttgaagtatggcgtgcactggtgcagcatccgcaggcattggcaatgtcgctcttcaaatttgaaatgtcagcagagtacctgagtcgtattgagaatgagttccctattctatgggagtttttccccatctttgagatcaaagcggcatctgagcgtttcaaattgttcctgagccaaaaaggtgcaccggaggaaacccagaaattactggttactaatatgtttcaacggctggggctcgtgttcccgacatatgccgatgaaattgagaaatggttaagtaacggacatctccccccgtctattcctgagtcttttgtccacgtgtggtatcaggagcttttacgtgagcatagtgaagctcaatggccagagtacggcagcaagcggctgcatagctggatggcatcacaaaaaaatccagtgattggtattaatcctgacgcaaatcaccgctattccgtggccttgttacccgtcttcgctgcagctgtggcaagcggaaatgcttcttttgaatctgtatttgaccgtaaacccggtgccgtatttttcctgaggcaagtcagggatttcgattcccgctggtttaaggccatcttccagtgcagcctgttgcgttatgttgctaaaaaataa

SEQ ID NO: 28566 - DNA, 6345 bp, Escherichia coli; identical to SEQ ID NO: 28560

SEQ ID NO: 28567 - DNA, 2205 bp, Escherichia coli
atgattgttgggagcattaaacttgatgacagtgaaattgccattggtgaggtgccgttaaccttcatcgttgatgcagatcaatggctgttacagggacaggcttcttgcagtgtgcgaagcagcgatgttctgattgtgctccctcgggataatagcaatgttgctggttttgatggccaatcgagggcagtaaacgtattaggactaaaagcactacctgtgaagggatgtcaggacgttacagttacagcaaatgaaacttatcggattcgcaccggaagagaacaaatcagcatcggaaggtttgctctaaatggaaagcgtgcaagctgggtttgtcatccagatgaaacatttattggtgtaccaaaagtcatttctacactaccggatattcaaagcattgatgtaacgcgttacctgagcggaatttcaattgagcaatgtcatatacaagagatgctgggggctcaatatctttctatccgtaatagtaagaatgaaacgctcttgcgtcgcaaaatcggtattttgcctgctgatttcagtattgagataaaaggtggaatacacgcaaatgaaggcactatcgtaatcaccacacagcatccttgtgtagcaaaacttaaagataaaacattggaggctacacgtaagcgtactgaggggcgaacagagatacaactcaaagcggaaggggtacctccggcatttattacattacaagttctgcctaatttggcggctgaccccatcgatattgagttaccttttcccgctaaaggctgtctcgctcttgatgtaaacggacgtcctctggataaaaacattacgctgcatgatctgctgggttccagagcgtttctgttctccagaaatggcgagccgacaagatatacattgcagttgcatttgcgctccgttagtggattacaggcatggcacgaatggtgttatacggcgttgagcgatcgtcctgttgaattgaatctctatagtctgcgcgaacatattgagaacctgatttcacttgaggcaggtattgaccaggttgttgagatgcgtattacgggggcgggtgtggtcatggcctggcaaattcgtcgctataaatacagtctgcgctatgattatgaaaaagaactattactcagccagtcagtgaaccatcgtgctggacagattccttcccccgttatcatgctgttaagtgaacccgagaggaaatccatccccttagcatcaagaatgagcgagggagtgcctgtcggtgaatatgagttgagctcaatcgttaacaaaaatggaccgtggttggttgtccctaaaccgggtgaagagatggcttttcgtccctgcttcattcgtggcgaatcttcgttaccggtagaagaaagcaacatccgctcattgcagaaagcgacccagctttttaatccacaggcagaagttaataccatcacactggttctcggacagatggctaacgatcctgcccattccggctggcaatttatgcgtagcctgtacgatcaatttggttatttaccactggcaacctttgaagtatggcgtgcactggtgcagcatccgcaggcattggcaatgtcgctcttcaaatttgaaatgtcagcagagtacctgagtcgtattgagaatgagttccctattctatgggagtttttccccatctttgagatcaaagcggcatctgagcgtttcaaattgttcctgagccaaaaaggtgcaccggaggaaacccagaaattactggttactaatatgtttcaacggctggggctcgtgttcccgacatatgccgatgaaattgagaaatggttaagtaacggacatctccccccgtctattcctgagtcttttgtccacgtgtggtatcaggagcttttacgtgagcatagtgaagctcaatggccagagtacggcagcaagcggctgcatagctggatggcatcacaaaaaaatccagtgattggtattaatcctgacgcaaatcaccgctattccgtggccttgttacccgtcttcgctgcagctgtggcaagcggaaatgcttcttttgaatctgtatttgaccgtaaacccggtgccgtatttttcctgaggcaagtcagggatttcgattcccgctggtttaaggccatcttccagtgcagcctgttgcgttatgttgctaaaaaataa

SEQ ID NO: 28568 - DNA, 6345 bp, Escherichia coli; identical to SEQ ID NO: 28560

SEQ ID NO: 28569 - DNA, 3291 bp, Escherichia coli; identical to SEQ ID NO: 28561

SEQ ID NO: 28570 - DNA, 6315 bp, Escherichia coli
atggacgttcagcaactgcattatgcgccacttctaaatcagcttcatcagcgcgcggtgaggtcggtggtaagtcagttggcattgcggagcaagtcgttgactcattatctggaatcacaatatttccagcctcccggtcaggaggggtcactgcttgcagacccggtattcgaaagcacgttcggctggatgcctgcggatgaaacaatggaggatttgcgggacaagctaatttccagcccgctggttgatgcattgagcaaagcgccggtgccatttcgtcatcaacttacggcgtggcgaacgattctggaagacaaaaaatccttgttagtgagcagcggtacgggatccgggaaaacagaatgctttatggtaccggttctagaagatcttattcgtcagcaaaaatcgacccgtcagtcactaacagggacacaagctattttcttgtatccgttaaatgcattaattaacagccaacaggagcggcttcgtgaatggacgcgcggatttaaggggaaaatacgcttcgcgctatataatggcgaaacccggcataccaaatacgaagttcaggaagatcagttgaaagtacctgaacaagctttgagtcgggaagccatttacgaagcaccaccttccatcatggtgacgaataccaccatgctggaatatatgctgattcgtcgtaaagatgccccaatcatcgaaaagtctcaggggatattaaagtatatcgtcctggatgaagcccatagttatattggttctcaggctgctgagttagcgctgcttttacgtcgtgttatgcaggctttcaatgttggacctggcacagataaacctgtgcagattatcgcgacctctgccactattggtgaagactctcctgaaggtaataaggagcttgctaaatttgtcgctgatcttgcgggcgttacagaacgtgatgtcaaagtggttcgcggctatcgacaaataccgcgggtatcggagtcgctgattcgtcatgaatatcccacatctttaacttctcttaaatctttgagccctcaggatctttaccaacagctttgtcattaccgtgtagcccagcaattgcgtcaggcgttaactcatcccggacggcaggcagtacgtttgagtgagttgctcaatgttgccagaagaacctggccagatattaatcaccgtgagttactgcaactcctcgacctaatggcgagatcgcgagaaggtgaactggcttttacgccattacgtatgcatgggtttatcagaacactggcgggtctatgggcatgttcaaacaaacaatgcttacataaagcgcatgaattaaatcagagtgactggccatttggtcaggtatggtttgagcagcgccaatattgtgactgtggtgcgccggtatttgaagttttacgttgctccgggtgtggttcagcttatttgtctgccaaagaggaggtgcgcggtgatggaacgaactggttggtagcgcaacccgccgctgccgaagtggatgaatttgctcttgatgtagatgtttattctgaagatgaagacaacgacgaattagacaataactctcaatttgatcgtctgattgcgatcgatggtgaaaaatatatcatttcactggaagaaacgacggcggggaaaattgatagtgaagcgcaaaagcactatgaaataaacctgttaagaccggaatctcgaggtgagggacgtaataattcctttgcttgtgtttgctgtggtgacacccaacgaaaaaataatcctttattccgtccgcttcgacttggcgcgcccttttttttaaatgaaattattcctactctgctggagttttcaccattaccgcagacaagagaagagcagttaggaccgtttaatggtcgacgtctgctcacctttacggattcacgtcagggcactgcccgcatttctgcccgcttacagcaggatgccgataaagcgacgttgcgagctctttgttaccaggagttggccaatattaatgagccatcagcaaagctcagcccggcacactgcgcattgttagagagttttattacccagttttctatccttcctttaaaaaactctattgacgcgctgaaaaaagcgatggttgctaatgaagagcttagcccggcggacattcaggcacttaaaattatcgagccgatggtgagttccttaagcccggatcatgctgaagcgatgcaaatactccaggctaactctggcaatcagcagaagaaaaccatgtcatggcaaacactgtctgaacagctggttggcagtgtggaccttgccgatagaatgagaggcagttttaaagaattgtctgggcttgatcttactaaacaacagtttgcagatttttgtttatacagtgagtttggtcgccgccctaaaaatgcctggaccctcgaaagtatgggtctggtagccattcactatccatttattgataaagttacaacctgcccgcaggactggaagacattattacccgatcccgataagcaattagcggaatggcgtaatttattgaagattactcttgatttctttatacgtgaaaacagtgccgttttttacgaaaacgagcaataccctcgctggatgggggctcgtttcccggtaaaaatgctccagggtccagataaaaaaaacaaagggcagaaacgtgatcaactttggccacaaatacgcgatcgccattataaccgggtcattaagctattaattgcagtctttccggcaatacaacctgagcaggctcactggaaatcgttagttaaccacttaatgattgaggtctgggatgcaattcgaccctgcttacgtcagtttgagtcgggttatcagctggatattaaacaacaagctgaattttacagtccaaagcaagtgtggcgttgcccctatactcgacgtgcgttagacgtcacgttactgggatactctccgtatttgccgggtagcaaagaaattgcacctgaaaaagcagtgttgattgaaatgcctgagcttcctgtacgtcactggcgtttgtctggtggtggagaaatcgcccgagaagaacgtctggagtggctggaaagtaatgcgctgattcaacatgcccgcgaggaaggattatggtctactcgcagcgaccgactggccctgaaagatagctggtatcgtctggaggaacactctgcgcagagaacgcctgagcagaaccaatttaatgaaaaacaatttaagtcaggcaaagttaatgtgctgaactgctccacgaccatggagatgggggtggacattggtggtatgagtttggtggcaatgaacaacgttcctccagctccggcaaattatttgcagcgtgcaggccgcgcgggtcgacgtggagagagtgcatctgctgccattacgttatgtaaaaacacggcgcatggaatggaggtattcaaagaccccctctgggcgttcaacactactgccagtgcgccacgggttcgttttgggagcagcagtattgttcaacgacatgttaatgccctggttttaggtctgtttttacgagctgaagttcctgatgcgacaaaactgagttgcaaatggttctttgaaggtgatgagagccagtgtcttcgttttctccattggttaaataaccaggccgatcagctggcggataaacttaaacgccttactcagggaaccgtcctgatgtcattgacggcaacccagctcttgacccgcacacaagcaatgatgcagcaggttgatatccgctggagaagccaacttgcgatactgttggaaaatatcgaagcgttgaaggcggataacagcgcgtgggaagaaacgccagcaggtaaagccatcgcttatcagcttcgtgattatcgcggtgcatatctgttttctaaactcattagtgaagcgttcctgccggggcatggtttcccggttggcgtcgtcaatttcaattatctgacggcagatgagctggaaaaacgtcgcgcaataaaagctactcaggctgaccctaatgaagggggagaaagcttttctcgtcgtattgaaaaattgcccagccgtgatttgcctacagcattacgcgagtatgctccaggtgcagatgtggtattgggcggaaaagtatatcgttcctcgggcattatgcttggcaaggtacttgccagcgggcaggagctgtcaggcgatcatcatattccgtggttctggcattgtcgtaaatgtggtgcgggggcaaccagtactacccgtcctgtcgaatgtagtcactgcaaagcggatatacagcaacttgatgtgaagcgttatttacagcctgttggttttgcgacagatatccgttatcaggcgcataatgatgtatccatgcctgcacaacctccctggaaagatccacgtgttcttgtaccgtcttcggtgtgggtttctttacccgatgctgggctaggacgttaccgttttagccatagtggggaattgttccacttcagtgaaggggaatttgggcacggctacgcaatttgcctctcatgtggtcgggcagaatctcaaaatcaaccccagcgtacccctgaaaatcttaagaacccagagagggaaaatacgcattacctgttgcgagggggcagtaacgatcgtctgggtagcaataaattgtgccacggtcacgtgcataaagatctttggttggggtatagcagtcgtacagatatggttgagctgcaactcaatgatgataatggcctgttgatccgtgatgaggttgccgcgcgttcccttgcggtcgctttgcgtgaagggttagcgcataaattgggtatcgaaaatactgagctgggcgtgacgacgcagcaagcgcgcgatatcaatggctataccggatattccatcttcatttacgacaataatgcgggtggtgcaggttatgcagtgcaattgatcgaccattgggctgatgtctttaattacgccagaaaattgctcgattgcagttgcgataaattctgtcaccactgcttgctcagctacgacagtcagcattatgtcaacagattagatcgtcaccatgcattaaccctgcttaccaatgtacggttgcagcgacttaacctcgcgccagaatatcagtacttcggcgatggtagccgggttgaaactaaccctctgagtttacgtattgcgcaatgcctgaacagcgagatttatgactcctgctcgctggttcttgcggggccgcaggaacagtgggactttgcccaatggccattatttaaagagttgctccagtttgcctcctccggtgggaatgttgagttgctggtggccacgccgctggcaaacttaactgatagctccagacatcagctttccgcgttggcggcgatgccgggaggtcgcttacaagtgaaatccattgccactgcgcagctcatgcaaggaaaggggcgctggcttgcgcaggtgactcgcgaagggcaaagccaacagtgggccgcagacgacagcgctaccgttgcacctggtgaattatggggacaaagtgcgtcttcaccagtagtgacacttaaaggaacgtccggaaaaaccttctcgggtcagaccttaagtgcagaagatttactgcccgccttacccaccggggcggtgcgcatcaatctctgtgaacaactggacgggccgctggaaggttttggttcgcgtttctggtcgttagtcacgcaacagcacgctggctggaagcaggcatttacccgccacaaagagataacgcatgttgagtacagcgatcgttatcttaatagcccattcacggcgcgtttgttaggtgaaatcttaaccgagctggttgaacagggaatggcggaacgcgccagcctcactgtttgcgtcaaaaaattggattacaactctcgccaacacgacgctctctataacgcgtggcttaatgaggaagatcgtcagcaggttgtgaccactttacttgaagaaggatatctggggcctgcgtggccgggagcaattagctggttaacgggggataaccagagtacggagcatggacgagaactgacagtcaccttcagcgatggcagtcagcattatgtcctgctcgacatggggcttagctactggcgctgtattgaagacaccttctttgattttgctctgcgagtaccgcagcaagttgaacggctggcaaacacgcgagcgcgagctgttgcctcgggtaatgaccttaggagttatgttatcgctggataa

SEQ ID NO: 28571 - DNA, 2937 bp, Escherichia coli
atgattgaaaatgagagcggttatttgattacctatttcagaaggatatatcaggcgcttcgtgggcaagcatctcaatatcctgccgctaaaattgcacaagaattaggcgatacgattcctgtcacaatgcaaaacgaactggtctatgaaatagccggtgaattctgcgagactctctgccgattacttagtgagcatccacctcaaagcagtgatcccgtttctgcattacgtaagctctctccagactggcatcttcaacttccactcgttctccccgaagcgaatgctgcagagattgtaaggcgattactttctcaatcttctgaaatacgcagtgcaagtagtcttcaggttgaaagaatctgggtcgatgttgatgacagttggtattgtgatgcccggttccgattcccggccacaatgcgtacagaacagttaacctctttgtttgaatgcaatattcagccggagcagacccgactcatcatttcaggaaaatggagaaatggcggggcaaggttggcaatgctaagccgttatgagcagcaagattggcgggtcgagttattacctattgcgatgcaaaagctctctggtgcagatgcaatggccgaaatctcgttgtcgcttcatgaaggtccaattctgttaggccacacaattccaaaaggcggttatgaacttactgaagaactcccctgggtttttgaagcgatgaatgagagtgaatcgcagctaaaacttgtcggtatggggtctgtgagttccaggctaaatgctctgtttatttcgctaccgaaaaatagccatttagatattagtggagaaggtgagtttgatatcccaaggttgctgaaaaacagtgaacgcagcttaactaaaataagtggagtatttagcgttgttttacatgatggtgcagtttgtacaattcgcacccagcaactttatgattctgcgattgaatattatattaaatcgacagaagttgaactggttaaatcggattatcctgtccatcgagcctggccgaagatcggttggaaaaaggatctgcaatatggcattgtaccggagaaagaacttttttggcgttccattcgttcaggtaacaatgcctggcattctgtcgcatcagaaatgccaaaaggacagatagaagtcagacgaatagttaatgatgaggttttatttagcggtaaagttgtagttttaccagcagacttcgatattaatattatacctgagagtgttcagcaaggcatcataatgctttctggtataacggatactagaattgacaaatattcaaacaatgaaaaagtaacacttaagtccgattattcacaaaacgagtgtgctatttattataattcatcggagatgctggaaaataccgttgatttacgggtctcctggaaagatggttctaatcttaaactattattacctaagccggttagcggtggccgatttgtaactcatgatggttctgttcattttgatggtgtggcatctatagcgcatttgcatggaatagatgctgagttgttaaccatatcttgtgctggaagaggatatcttaatatcgagttgttggatgaaaatccagtagctgaaaaattccgttatttacatgccgaccttcctcttttatcaggatgcaatgacaaattaaaacaaatttcactttatgagaactataatttgctaaatgctatgctggcatgtgcatggaacagcaatagtacattatgtgttgatttttactctgacagatttggaaaggataaagcaacactcagtattaaacgctacgatggtagttttattgaacacgatcaagggttactggttgatataaaaaattctgttgtttttcctgcaaatagaatagacgagttggttgttgatgctatttctcttaaggatcctggcttacacatatcgttgctaaaaaaagatgaatttgcttatgatctttcagctctgaatgttcaggatagcccatggttaattgtggggaaacttgatggtacagctcgcattgcaccagtaattaaatgggggctacctgtattacagacaaatgatttattacttaatgctctatgcgaagcggattccgaacagcgaaaaaaatattttaatgagctaatttttgaaatagataacaatcctttgcaaaattattgctgtttattaacggagtatattaagaaatacaaaatgaataatggcttatccttgctggatctggatttgttcagaggtatttcgagtaattaccgcgtggttgttcagttgttaatatcatcatgtctttctggtgatagcgatacgatttatgatatacaggacgaattacccttttcatggggatggattcccgtttcaatctggaaagatgtttttcaaaagtgttgggcttatctggaaaaacagattaacgataaaacattagcattacatatattgcaaccctttattgcttttatgaaccatcgtgcacatatcgatcgtcggctggctcccattgcgaatatgttacttacatatagcgaactcctaccagccggttgtaatgtcttgccaactgttagtcgtgagcagtttaatgaagctaaacagatgctattaaggaaccccgacagctttgggcgtatcagtatcttccctaaagaactttggtctagtgctattactccagagttaaaatctgtttttaataagctttggattgaagataaatatcactcacggcttgaaaaacgttttaatttgatgttagtcgcagcgctgttaacccaaaaagataataacttgatatatcaactgtctgcgctttttgaattccactatcagcaagccccgcagcaattaggggtaatctatcaatattattttgaacaagcaggagtatgtcattga

SEQ ID NO: 28572 - DNA, 6315 bp, Escherichia coli
atggacgttcagcaactgcattatgcgccacttctaaatcagcttcatcagcgcgcggtgaggtcggtggtaagtcagttggcattgcggagcaagtcgttgactcattatctggaatcacaatatttccagcctcccggtcaggaggggtcactgcttgcagacccggtattcgaaagcacgttcggctggatgcctgcggatgaaacaatggaggatttgcgggacaagctaatttccagcccgctggttgatgcattgagcaaagcgccggtgccatttcgtcatcaacttacggcgtggcgaacgattctggaagacaaaaaatccttgttagtgagcagcggtacgggatccgggaaaacagaatgctttatggtaccggttctggaagatcttattcgtcagcaaaaatcgacccgtcagtcactaacagggacacaagctattttcttgtatccgttaaatgcattaattaacagccaacaggagcggcttcgcgaatggacgcgcggatttaaggggaaaatacgcttcgcgctatataatggcgaaacccggcataccaaatacgaagttcaggaagatcagttgaaagtacctgaacaagctttgagtcgggaagccatttacgaagcaccaccttccatcatggtgacgaataccaccatgctggaatatatgctgattcgtcgtaaagatgccccaatcatcgaaaagtctcaggggatgttaaagtatatcgtcctggatgaagcccatagttatattggttctcaggctgctgagttagcgctgcttttacgtcgtgttatgcaggctttcaatgttggaccgggcacagataaacctgtgcagattatcgcgacctctgccactattggtgaagactctcctgaaggtaataaggagcttgctaaatttgtcgctgatctcgcgggcgttacagaacgtgatgtcaaagtggttcgcggctatcgacaaataccgcgggtatcggagtcgctgattcgtcatgaatatcccacatctttaacttctcttaaatctttgagccctcaggatctttaccaacagctttgtcattaccgtgtggcccagcaattgcgtcaggcgttaactcatcccggacggcaggcagtacgtttgagtgagttgctcaatgttgccagaagaacctggccagatattaatcaccgtgagttactgcaactcctcgacctaatggcgagatcgcgagaaggtgaactggcttttacgccattacgtatgcatgggtttatcagaacactggcgggtctatgggcatgttcaaacaaacaatgctcacataaagcgcatgaattaaatcagagtgactggccatttggtcaggtatggtttgagcagcgccaatattgtgactgtggtgcgccggtatttgaagttttacgttgctccgggtgtggttcagcttatttgtctgccaaagaggaggtgcgcggtgatggaacgaactggttggtagcgcaacccgccgctgccgaagtggatgaatttgctcttgatgtagatgtttattctgaagatgaagacaacgacgaattagacaataactctcaatttgatcgtctgattgcgatcgatggtgaaaaatatatcatttctctggaagaaacgacggcggggaaaattgatagtgaagcgcaaaagcactatgaaataaacctgttaagaccggaatctcgaggtgagggacgtaataattcctttgcttgtgtttgctgtggtgacacccaacgaaaaaataatcctttattccgtccgcttcgacttggcgcgcccttttttttaaatgaaattattcctactctgctggagttttcaccattaccgcagacaagagaagagcagttaggaccgtttaatggtcgacgtctgctcacctttacggattcacgtcagggcactgcccgcatttctgcccgcttacagcaggatgccgataaagcgacgttgcgagctctttgttaccaggagttggccaatattaatgagccatcagcaaagctcagcccggcacactgcgcattgttagagagttttattacccagttttctatccttcctttaaaaaactctattgacgcgctgaaaaaagcgatggttgctaatgaagagcttagcccggcggacattcaggcacttaaaattatcgagccgatggtgagttccttaagcccggatcatgctgaagcgatgcaaatactccaggctaactctggcaatcagcagaagaaaaccatgtcatggcaaacactgtctgaacagctggttggcagtgtggaccttgccgatagaatgagaggcagttttaaagaattgtctgggcttgatcttactaaacaacagtttgcagatttttgtttatacagtgagtttggtcgccgccctaaaaatgcctggaccctcgaaagtctgggtctggtagccattcactatccatttattgataaagttacaacctgcccgcaggactggaagacattattacccgatcccgataagcaattagcggaatggcgtaatttattgaagattactcttgatttctttatacgtgaaaacagtgccgttttttacgaaaacgagcaataccctcgctggatgggggctcgtttcccggtaaaaatgctccagggtccagataaaaaaaacaaagggcagaaacgtgatcaactttggccacaaatacgcgatcgccattataaccgggtcattaagctattaattgcagtctttccggcaatacaacctgagcaggctcactggaaatcgttagttaaccacttaatgattgaggtctgggatgcaattcgaccctgcttacgtcagtttgagtcgggttatcagctggatattaaacaacaagctgaattttacagtccaaagcaagtgtggcgttgcccctatactcgacgtgcgttagacgtcacgttactgggatactctccgtatttgccgggtagcaaagaaattgcacctgaaaaagcagtgttgattgaaatgcctgagcttcctgtacgtcactggcgtttgtctggtggtggagaaatcgcccgagaagaacgtctggagtggctggaaagtaatgcgctgattcaacatgcccgcgaggaaggattatggtctactcgcagcgaccgactggccctgaaagatagctggtatcgtctggaggaacactctgcgcagagaacgcctgagcagaaccagtttaatgaaaaacaatttaagtcaggcaaagttaatgtgctgaactgctccacgaccatggagatgggggtggacattggtggtatgagtttggtggcaatgaacaacgttcctccagctccggcaaattatttgcagcgtgcaggccgcgcgggtcgacgtggagagagtgcatctgctgccattacgttatgtaaaaacacggcgcatggaatggaggtattcaaagaccccctctgggcgttcaacactactgccagtgcgccacgggttcgttttgggagcagcagtattgttcaacgacatgttaatgccctggttttaggtctgtttttacgagctgaagttcctgatgcgacaaaactgagttgcaaatggttctttgaaggtgatgagagccagtgtcttcgttttctccattggttaaataaccaggccgatcagctggcggataaacttaaacgccttactcagggaaccgtcctgatgtcattgacggcaacccagctcttgacccgcacacaagcaatgatgcagcaggttgatatccgctggagaagccaacttgcgatactgttggaaaatatcgaagcgttgaaggcggataacagcgcgtgggaagaaacgccagcaggtaaagccatcgcttatcagcttcgtgattatcgcggtgcatatctgttttctaaactcattagtgaagcgttcctgccggggcatggtttcccggttggcgtcgtcaatttcaattatctgacggcagatgagctggaaaaacgtcgcgcaataaaagccactcaggctgaccctaatgaagggggagaaagcttttctcgtcgtattgaaaaattgcccagccgtgatttgcctacagcattacgcgagtatgctccaggtgcagatgtggtattgggcggaaaagtatatcgttcctcgggcattatgcttggcaaggtacttgccagcgggcaggagctgtcaggcgatcatcatattccgtggttctggcattgtcgtaaatgtggtgcgggggcaaccagtactacccgtcctgtcgaatgtagtcactgcaaagcggatatacagcaacttgatgtgaagcgttatttacagcctgttggttttgcgacagatatccgttatcaggcgcataatgatgtatccatgcctgcacaacttccctggaaagatccacgtgttcttgtaccgtcttcggtgtgggtttctttacccgatgctgggctaggacgttaccgttttagccatagtggggaattgttccacttcagtgaaggggaatttgggcacggctacgcaatttgcctctcatgtggtcgggcagaatctcaaaatcaaccccagcgtacccctgaaaatcttaagaacccagagagggaaaatacgcattacctgttgcgagggggcagtaacgatcgtcaggggagcaataaattgtgccacggtcatgtgcataaagatctgtggttggggtatagcagtcgtacagatatggttgagctgcaactcaatgatgataatggcctgttgatccgtgatgaggttgccgcgcgatcccttgcggtcgctttgcgtgaagggttagcgcataaattgggtatcgaaaatactgagctgggcgtgacgacgcagcaagcgcgcgatatcaatggctataccggatattccatcttcatttacgacaataatgcgggtggtgcaggttatgcagtgcaattgatcgaccattgggctgatgtctttaattacgccagaaaattgctcgattgcagttgcgataaattctgtcaccactgcttgctcagctacgacagtcagcattatgtcaacagattagatcgtcaccatgcattaaccctgcttaccaatgtacggttgcagcgacttaacctcgcgccagaatatcagtacttcggcgatggtagccgggttgaaactaacccgctgagtttacgtattgcgcaatgcctgaacagcgagatttatgactcctgctcgctggttcttgcggggccgcaggaacagtgggattttgcccaatggccattatttaaagagttgctccagtttgcctcctccggtgggcatgttgagttgctggtggccacgccgttggcaaacttaactgatagctccagacatcagctttccgcgttggcggcgatgccgggaggacgcttacaagtgaaatccattgccactgcgcaactcatgcaaggaaagggacgctggcttgcgcaggtgactcgcgaagggcaaagccaacagtgggccgcagacgacagcgctaccgttgcacctggtgaattatggggacaaagtgcgtcttcaccagtagtgacacttaaaggaacgtccggaaaaaccttcttgggtcagatcttaagtgcagaagatttactgcccgccttacccaccggggcggtgcgcatcaatctctgcgaacaactggacgggccgctggaaggttttggttcgcgtttctggtcgttagtcacgcaacagcacgctggctggaagcaggcatttacccgccacaaagagataacgcatgttgagtacagcgatcgttatcttaatagcccattcacggcgcgtttgttaggtgaaatcttaactgagctggttgaacagggaatggcggaacgcgccagcctcactgtttgcgtcaaaaaattggattacaactctcgccaacacgacgctctctataacgcgtggcttaatgaggaagatcgtcagcaggttgtgaccactttacttgaagaaggatatctggggccagcgtggctgggagcaattagctggttaacgggggataaccagagtacggagcatggacgagaactgacagtcaccttcagcgatggcagtcagcattatgtcctgctcgacatggggcttagctactggcgctgtattgaagacaccttctttgattttgctctacgagtaccgcagcaagttgaacggctggcaaacacgcgagcgcgagctgttgccccgggtaatgaccttaggagttatattatcgctggataa

SEQ ID NO: 28573 - DNA, 2937 bp, Escherichia coli
atgattgaaaatgagagcggttatttgattacctatttcagaaggatatatcaggcgcttcgtgggcaagcatctcaatatcctgccgctaaaattgcacaagaattaggcgatacgattcctgtcacaatgcaaaacgaactggtctatgaaatagccggtgaattctgcgagactctctgccgattacttagtgagcatccacctcaaagcagtgatcccgtttctgcattacgtaagctctctccagactggcaccttcaacttccactcgttctccccgaagcgaatgctgcagagattgtaaggcgattactttctcaatcttctgaaatacgcagtgcaagtagtcttcaggttgaaagaatctgggtcgatgttgatgacagttggtattgtgatgcccggttccgattcccggccacaatgcgtacagaacagttaacctctttgtttgaatgcaatattcagccggagcagacccgactcatcatttcaggaaaatggagaaatggcggggcaaggttggcaatgctaagccgttatgagcagcaagattggcgggtcgagttattacctattgcgatgcaaaagctctctggtgcagatgcaatggccgaaatctcgttgtcgcttcatgaaggtccaattctgttaggccacacaattccaaaaggcggttatgaacttactgaagaactcccctgggtttttgaagcgatgaatgagagtgaatcgcagctaaaacttgtcggtatggggtctgtgagttccaggctaaatgctctgtttatttcgctaccgaaaaatagccatttagatattagtggagaaggtgagtttgatatcccaaggttgctgaaaaacagtgaacgcagcttaactaaaataagtggagtatttagcgttgttttacatgatggtgcagtttgtacaattcgcacccagcaactttatgattctgcgattgaatattatattaaatcgacagaagttgaactggttaaatcggattatcctgtccatcgagcctggccgaagatcggttggaaaaaggatctgcaatatggcattgtaccggagaaagaacttttttggcgttccattcgttcaggtaacaatgcctggtattctgtcgcatcaaaaatgccaaaaggacagatagaagtcagacgaatagttaatgatgaggttttatttagcggtaaagttgtagttttaccagctgacttcgatattaatattatacctgagagtgctcagcaaggcatcataatgctttctggtataacggatactagaattgacaaatattcaaacaatgaaaaagtaacacttaagtccgattattcacaaaacgagtgtgctatttattataattcatcggagatgctggaaaataccgttgatttacgggtctcctggaaagatggttctaatcttaaactattattacctaagccggttagcggtggccgatttgtaactcatgatggttctgttcattttgatggtgtggcatctatagcgcatttgcatggaatagatgctgagttgttaaccatatcttgtgctggaagaggatatcttaatatcgagttgttggatgaaaatccagtagctgaaaaattccgttatttacatgccgaccttcctcttttatcaggatgcaatgacaaattaaaacaaatttcactttatgagaactataatttgctaaatgctatgctggcatgtgcatggagcagcaatagtacattatgtgttgatttttactctgacagatttggaaaggataaagcaacactcagtattaaacgctacgatggtagttttattgaacacgatcaagggttactggttgatataaaaaattctgttgtttttcctgcaaatagaatagacgagctggttgttgatgctatttctcttaaggatcctggcttacacatatcgttgctaaaaaaagatgaatttgcttatgatctttcagctctgaatgttcaggatagcccatggttaattgtggggaaacttgatggtacagctcgcattgcaccagtaattaaatgggggctacctgtattacagacaaatgatttattacttaatgctctatgcgaagcggattccgaacagcgaaaaaaatattttaatgagctaatttttgaaatagataacaatcctttgcaaaattattgctgtttattaacggagtatattaagaaatacaaaatgaataatggcttatccttgctggatctggatttgttcagaggtatttcgagtaattaccgcgtagttgttcagttgttaatatcatcatgtctttctggtgatagcgatacgatttatgatatacaggaagaattacccttttcatggggatggattcccgtttcaatctggaaagatgtttttcaaaagtgttgggcttatctggaaaaacagattaacgataaaacattagcattacatatattgcaaccctttattgcttttatgaaccatcgtgcacatatcgatcgtcgtctggctcccattgcgaatatgttacttacatatagcaaactcctaccagccggttgtaatgtcttgccaactgttagtcgtgagcagtttaatgaagctaaacagatgctattaaggaaccccgacagctttgggcgtatcagtatcttccctaaagaactttggtctagtgcgattactccagagttaaaatctgtttttaataagctttggattaaaaataaatatcactcacggcttgaaaaacgttttaatttgatgttagtcgcagcgctgttaacccaaaaagataataacttgatacatcaactgtctgcgctttttgaattccactatcagcaagccccgcagcaattaggggtaatctatcaatattattttgaacaagcaggagtatgtcattga

SEQ ID NO: 28574 - DNA, 6315 bp, Escherichia coli
atggacgttcagcaactgcattatgcgccacttctaaatcagcttcatcagcgcgcggtgaggtcggtggtaagtcagttggcattgcggagcaagtcgttgactcattatctggaatcacaatatttccagcctcccggtcaggaggggtcactgcttgcagacccggtattcgaaagcacgttcggctggatgcctgcggatgaaacaatggaggatttgcgggacaagctaatttccagcccgctggttgatgcattgagcaaagcgccggtgccatttcgtcatcaacttacggcgtggcgaacgattctggaagacaaaaaatccttgttagtgagcagcggtacgggatccgggaaaacagaatgctttatggtaccggttctagaagatcttattcgtcagcaaaaatcgacccgtcagtcactaacagggacacaagctattttcttgtatccgttaaatgcattaattaacagccaacaggagcggcttcgtgaatggacgcgcggatttaaggggaaaatacgcttcgcgctatataatggcgaaacccggcataccaaatacgaagttcaggaagatcagttgaaagtacctgaacaagctttgagtcgggaagccatttacgaagcaccaccttccatcatggtgacgaataccaccatgctggaatatatgctgattcgtcgtaaagatgccccaatcatcgaaaagtctcaggggatattaaagtatatcgtcctggatgaagcccatagttatattggttctcaggctgctgagttagcgctgcttttacgtcgtgttatgcaggctttcaatgttggacctggcacagataaacctgtgcagattatcgcgacctctgccactattggtgaagactctcctgaaggtaataaggagcttgctaaatttgtcgctgatcttgcgggcgttacagaacgtgatgtcaaagtggttcgcggctatcgacaaataccgcgggtatcggagtcgctgattcgtcatgaatatcccacatctttaacttctcttaaatctttgagccctcaggatctttaccaacagctttgtcattaccgtgtagcccagcaattgcgtcaggcgttaactcatcccggacggcaggcagtacgtttgagtgagttgctcaatgttgccagaagaacctggccagatattaatcaccgtgagttactgcaactcctcgacctaatggcgagatcgcgagaaggtgaactggcttttacgccattacgtatgcatgggtttatcagaacactggcgggtctatgggcatgttcaaacaaacaatgcttacataaagcgcatgaattaaatcagagtgactggccatttggtcaggtatggtttgagcagcgccaatattgtgactgtggtgcgccggtatttgaagttttacgttgctccgggtgtggttcagcttatttgtctgccaaagaggaggtgcgcggtgatggaacgaactggttggtagcgcaacccgccgctgccgaagtggatgaatttgctcttgatgtagatgtttattctgaagatgaagacaacgacgaattagacaataactctcaatttgatcgtctgattgcgatcgatggtgaaaaatatatcatttcactggaagaaacgacggcggggaaaattgatagtgaagcgcaaaagcactatgaaataaacctgttaagaccggaatctcgaggtgagggacgtaataattcctttgcttgtgtttgctgtggtgacacccaacgaaaaaataatcctttattccgtccgcttcgacttggcgcgcccttttttttaaatgaaattattcctactctgctggagttttcaccattaccgcagacaagagaagagcagttaggaccgtttaatggtcgacgtctgctcacctttacggattcacgtcagggcactgcccgcatttctgcccgcttacagcaggatgccgataaagcgacgttgcgagctctttgttaccaggagttggccaatattaatgagccatcagcaaagctcagcccggcacactgcgcattgttagagagttttattacccagttttctatccttcctttaaaaaactctattgacgcgctgaaaaaagcgatggttgctaatgaagagcttagcccggcggacattcaggcacttaaaattatcgagccgatggtgagttccttaagcccggatcatgctgaagcgatgcaaatactccaggctaactctggcaatcagcagaagaaaaccatgtcatggcaaacactgtctgaacagctggttggcagtgtggaccttgccgatagaatgagaggcagttttaaagaattgtctgggcttgatcttactaaacaacagtttgcagatttttgtttatacagtgagtttggtcgccgccctaaaaatgcctggaccctcgaaagtatgggtctggtagccattcactatccatttattgataaagttacaacctgcccgcaggactggaagacattattacccgatcccgataagcaattagcggaatggcgtaatttattgaagattactcttgatttctttatacgtgaaaacagtgccgttttttacgaaaacgagcaataccctcgctggatgggggctcgtttcccggtaaaaatgctccagggtccagataaaaaaaacaaagggcagaaacgtgatcaactttggccacaaatacgcgatcgccattataaccgggtcattaagctattaattgcagtctttccggcaatacaacctgagcaggctcactggaaatcgttagttaaccacttaatgattgaggtctgggatgcaattcgaccctgcttacgtcagtttgagtcgggttatcagctggatattaaacaacaagctgaattttacagtccaaagcaagtgtggcgttgcccctatactcgacgtgcgttagacgtcacgttactgggatactctccgtatttgccgggtagcaaagaaattgcacctgaaaaagcagtgttgattgaaatgcctgagcttcctgtacgtcactggcgtttgtctggtggtggagaaatcgcccgagaagaacgtctggagtggctggaaagtaatgcgctgattcaacatgcccgcgaggaaggattatggtctactcgcagcgaccgactggccctgaaagatagctggtatcgtctggaggaacactctgcgcagagaacgcctgagcagaaccaatttaatgaaaaacaatttaagtcaggcaaagttaatgtgctgaactgctccacgaccatggagatgggggtggacattggtggtatgagtttggtggcaatgaacaacgttcctccagctccggcaaattatttgcagcgtgcaggccgcgcgggtcgacgtggagagagtgcatctgctgccattacgttatgtaaaaacacggcgcatggaatggaggtattcaaagaccccctctgggcgttcaacactactgccagtgcgccacgggttcgttttgggagcagcagtattgttcaacgacatgttaatgccctggttttaggtctgtttttacgagctgaagttcctgatgcgacaaaactgagttgcaaatggttctttgaaggtgatgagagccagtgtcttcgttttctccattggttaaataaccaggccgatcagctggcggataaacttaaacgccttactcagggaaccgtcctgatgtcattgacggcaacccagctcttgacccgcacacaagcaatgatgcagcaggttgatatccgctggagaagccaacttgcgatactgttggaaaatatcgaagcgttgaaggcggataacagcgcgtgggaagaaacgccagcaggtaaagccatcgcttatcagcttcgtgattatcgcggtgcatatctgttttctaaactcattagtgaagcgttcctgccggggcatggtttcccggttggcgtcgtcaatttcaattatctgacggcagatgagctggaaaaacgtcgcgcaataaaagctactcaggctgaccctaatgaagggggagaaagcttttctcgtcgtattgaaaaattgcccagccgtgatttgcctacagcattacgcgagtatgctccaggtgcagatgtggtattgggcggaaaagtatatcgttcctcgggcattatgcttggcaaggtacttgccagcgggcaggagctgtcaggcgatcatcatattccgtggttctggcattgtcgtaaatgtggtgcgggggcaaccagtactacccgtcctgtcgaatgtagtcactgcaaagcggatatacagcaacttgatgtgaagcgttatttacagcctgttggttttgcgacagatatccgttatcaggcgcataatgatgtatccatgcctgcacaacttccctggaaagatccacgtgttcttgtaccgtcttcggtgtgggtttctttacccgatgctgggctaggacgttaccgttttagccatagtggggaattgttccacttcagtgaaggggaatttgggcacggctacgcaatttgcctctcatgtggtcgggcagaatctcaaaatcaaccccagcgtacccctgaaaatcttaagaacccagagagggaaaatacgcattacctgttgcgagggggcagtaacgatcgtctgggtagcaataaattgtgccacggtcacgtgcataaagatctttggttggggtatagcagtcgtacagatatggttgagctgcaactcaatgatgataatggcctgttgatccgtgatgaggttgccgcgcgttcccttgcggtcgctttgcgtgaagggttagcgcataaattgggtatcgaaaatactgagctgggcgtgacgacgcagcaagcgcgcgatatcaatggctataccggatattccatcttcatttacgacaataatgcgggtggtgcaggttatgcagtgcaattgatcgaccattgggctgatgtctttaattacgccagaaaattgctcgattgcagttgcgataaattctgtcaccactgcttgctcagctacgacagtcagcattatgtcaacagattagatcgtcaccatgcattaaccctgcttaccaatgtacggttgcagcgacttaacctcgcgccagaatatcagtacttcggcgatggtagccgggttgaaactaaccctctgagtttacgtattgcgcaatgcctgaacagcgagatttatgactcctgctcgctggttcttgcggggccgcaggaacagtgggactttgcccaatggccattatttaaagagttgctccagtttgcctcctccggtgggaatgttgagttgctggtggccacgccgctggcaaacttaactgatagctccagacatcagctttccgcgttggcggcgatgccgggaggtcgcttacaagtgaaatccattgccactgcgcagctcatgcaaggaaaggggcgctggcttgcgcaggtgactcgcgaagggcaaagccaacagtgggccgcagacgacagcgctaccgttgcacctggtgaattatggggacaaagtgcgtcttcaccagtagtgacacttaaaggaacgtccggaaaaaccttctcgggtcagaccttaagtgcagaagatttactgcccgccttacccaccggggcggtgcgcatcaatctctgtgaacaactggacgggccgctggaaggttttggttcgcgtttctggtcgttagtcacgcaacagcacgctggctggaagcaggcatttacccgccacaaagagataacgcatgttgagtacagcgatcgttatcttaatagcccattcacggcgcgtttgttaggtgaaatcttaaccgagctggttgaacagggaatggcggaacgcgccagcctcactgtttgcgtcaaaaaattggattacaactctcgccaacacgacgctctctataacgcgtggcttaatgaggaagatcgtcagcaggttgtgaccactttacttgaagaaggatatctggggcctgcgtggccgggagcaattagctggttaacgggggataaccagagtacggagcatggacgagaactgacagtcaccttcagcgatggcagtcagcattatgtcctgctcgacatggggcttagctactggcgctgtattgaagacaccttctttgattttgctctgcgagtaccgcagcaagttgaacggctggcaaacacgcgagcgcgagctgttgcctcgggtaatgaccttaggagttatgttatcgctggataa

SEQ ID NO: 28575 - DNA, 912 bp, Escherichia coli
gtggggaaacttgatggtacagctcgcattgcaccagtaattaaatgggggctacctgtattacagacaaatgatttattacttaatgctctatgcgaagcggattccgaacagcgaaaaaaatattttaatgagctaatttttgaaatagataacaatcctttgcaaaattattgctgtttattaacggagtatattaagaaatacaaaatgaataatggcttatccttgctggatctggatttgttcagaggtatttcgagtaattaccgcgtggttgttcagttgttaatatcatcatgtctttctggtgatagcgatacgatttatgatatacaggacgaattacccttttcatggggatggattcccgtttcaatctggaaagatgtttttcaaaagtgttgggcttatctggaaaaacagattaacgataaaacattagcattacatatattgcaaccctttattgcttttatgaaccatcgtgcacatatcgatcgtcggctggctcccattgcgaatatgttacttacatatagcgaactcctaccagccggttgtaatgtcttgccaactgttagtcgtgagcagtttaatgaagctaaacagatgctattaaggaaccccgacagctttgggcgtatcagtatcttccctaaagaactttggtctagtgctattactccagagttaaaatctgtttttaataagctttggattgaagataaatatcactcacggcttgaaaaacgttttaatttgatgttagtcgcagcgctgttaacccaaaaagataataacttgatatatcaactgtctgcgctttttgaattccactatcagcaagccccgcagcaattaggggtaatctatcaatattattttgaacaagcaggagtatgtcattga

SEQ ID NO: 28576 - DNA, 6345 bp, Escherichia coli; identical to SEQ ID NO: 28560

SEQ ID NO: 28577 - DNA, 3291 bp, Escherichia coli; identical to SEQ ID NO: 28561

SEQ ID NO: 28578 - DNA, 6315 bp, Escherichia coli; identical to SEQ ID NO: 28572

SEQ ID NO: 28579 - DNA, 2937 bp, Escherichia coli; identical to SEQ ID NO: 28573

SEQ ID NO: 28580 - DNA, 6345 bp, Escherichia coli; identical to SEQ ID NO: 28560

SEQ ID NO: 28581 - DNA, 3291 bp, Escherichia coli; identical to SEQ ID NO: 28561

SEQ ID NO: 28582 - DNA, 6345 bp, Escherichia coli; identical to SEQ ID NO: 28560

SEQ ID NO: 28583 - DNA, 3291 bp, Escherichia coli; identical to SEQ ID NO: 28561

SEQ ID NO: 28584 - DNA, 6315 bp, Escherichia coli; identical to SEQ ID NO: 28574

SEQ ID NO: 28585 - DNA, 2937 bp, Escherichia coli; identical to SEQ ID NO: 28571

SEQ ID NO: 28586 - DNA, 6315 bp, Escherichia coli; identical to SEQ ID NO: 28574

SEQ ID NO: 28587 - DNA, 2937 bp, Escherichia coli; identical to SEQ ID NO: 28571

SEQ ID NO: 28588 - DNA, 6315 bp, Escherichia coli
atggacgttcagcaactgcattatgcgccacttctaaatcagcttcatcagcgcgcggtgaggtcggtggtaagtcagttggcattgcggagcaagtcgttgactcattatctggaatcacaatatttccagcctcccggtcaggaggggtcactgcttgcagacccggtattcgaaagcacgttcggctggatgcctgcggatgaaacaatggaggatttgcgggacaagctaatttccagcccgctggttgatgcattgagcaaagcgccggtgccatttcgtcatcaacttacggcgtggcgaacgattctggaagacaaaaaatccttgttagtgagcagcggtacgggatccgggaaaacagaatgctttatggtaccggttctagaagatcttattcgtcagcaaaaatcgacccgtcagtcactaacagggacacaagctattttcttgtatccgttaaatgcattaattaacagccaacaggagcggcttcgtgaatggacgcgcggatttaaggggaaaatacgcttcgcgctatataatggcgaaacccggcataccaaatacgaagttcaggaagatcagttgaaagtacctgaacaagctttgagtcgggaagccatttacgaagcaccaccttccatcatggtgacgaataccaccatgctggaatatatgctgattcgtcgtaaagatgccccaatcatcgaaaagtctcaggggatattaaagtatatcgtcctggatgaagcccatagttatattggttctcaggctgctgagttagcgctgcttttacgtcgtgttatgcaggctttcaatgttggacctggcacagataaacctgtgcagattatcgcgacctctgccactattggtgaagactctcctgaaggtaataaggagcttgctaaatttgtcgctgatcttgcgggcgttacagaacgtgatgtcaaagtggttcgcggctatcgacaaataccgcgggtatcggagtcgctgattcgtcatgaatatcccacatctttaacttctcttaaatctttgagccctcaggatctttaccaacagctttgtcattaccgtgtagcccagcaattgcgtcaggcgttaactcatcccggacggcaggcagtacgtttgagtgagttgctcaatgttgccagaagaacctggccagatattaatcaccgtgagttactgcaactcctcgacctaatggcgagatcgcgagaaggtgaactggcttttacgccattacgtatgcatgggtttatcagaacactggcgggtctatgggcatgttcaaacaaacaatgcttacataaagcgcatgaattaaatcagagtgactggccatttggtcaggtatggtttgagcagcgccaatattgtgactgtggtgcgccggtatttgaagttttacgttgctccgggtgtggttcagcttatttgtctgccaaagaggaggtgcgcggtgatggaacgaactggttggtagcgcaacccgccgctgccgaagtggatgaatttgctcttgatgtagatgtttattctgaagatgaagacaacgacgaattagacaataactctcaatttgatcgtctgattgcgatcgatggtgaaaaatatatcatttcactggaagaaacgacggcggggaaaattgatagtgaagcgcaaaagcactatgaaataaacctgttaagaccggaatctcgaggtgagggacgtaataattcctttgcttgtgtttgctgtggtgacacccaacgaaaaaataatcctttattccgtccgcttcgacttggcgcgcccttttttttaaatgaaattattcctactctgctggagttttcaccattaccgcagacaagagaagagcagttaggaccgtttaatggtcgacgtctgctcacctttacggattcacgtcagggcactgcccgcatttctgcccgcttacagcaggatgccgataaagcgacgttgcgagctctttgttaccaggagttggccaatattaatgagccatcagcaaagctcagcccggcacactgcgcattgttagagagttttattacccagttttctatccttcctttaaaaaactctattgacgcgctgaaaaaagcgatggttgctaatgaagagcttagcccggcggacattcaggcacttaaaattatcgagccgatggtgagttccttaagcccggatcatgctgaagcgatgcaaatactccaggctaactctggcaatcagcagaagaaaaccatgtcatggcaaacactgtctgaacagctggttggcagtgtggaccttgccgatagaatgagaggcagttttaaagaattgtctgggcttgatcttactaaacaacagtttgcagatttttgtttatacagtgagtttggtcgccgccctaaaaatgcctggaccctcgaaagtatgggtctggtagccattcactatccatttattgataaagttacaacctgcccgcaggactggaagacattattacccgatcccgataagcaattagcggaatggcgtaatttattgaagattactcttgatttctttatacgtgaaaacagtgccgttttttacgaaaacgagcaataccctcgctggatgggggctcgtttcccggtaaaaatgctccagggtccagataaaaaaaacaaagggcagaaacgtgatcaactttggccacaaatacgcgatcgccattataaccgggtcattaagctattaattgcagtctttccggcaatacaacctgagcaggctcactggaaatcgttagttaaccacttaatgattgaggtctgggatgcaattcgaccctgcttacgtcagtttgagtcgggttatcagctggatattaaacaacaagctgaattttacagtccaaagcaagtgtggcgttgcccctatactcgacgtgcgttagacgtcacgttactgggatactctccgtatttgccgggtagcaaagaaattgcacctgaaaaagcagtgttgattgaaatgcctgagcttcctgtacgtcactggcgtttgtctggtggtggagaaatcgcccgagaagaacgtctggagtggctggaaagtaatgcgctgattcaacatgcccgcgaggaaggattatggtctactcgcagcgaccgactggccctgaaagatagctggtatcgtctggaggaacactctgcgcagagaacgcctgagcagaaccaatttaatgaaaaacaatttaagtcaggcaaagttaatgtgctgaactgctccacgaccatggagatgggggtggacattggtggtatgagtttggtggcaatgaacaacgttcctccagctccggcaaattatttgcagcgtgcaggccgcgcgggtcgacgtggagagagtgcatctgctgccattacgttatgtaaaaacacggcgcatggaatggaggtattcaaagaccccctctgggcgttcaacactactgccagtgcgccacgggttcgttttgggagcagcagtattgttcaacgacatgttaatgccctggttttaggtctgtttttacgagctgaagttcctgatgcgacaaaactgagttgcaaatggttctttgaaggtgatgagagccagtgtcttcgttttctccattggttaaataaccaggccgatcagctggcggataaacttaaacgccttactcagggaaccgtcctgatgtcattgacggcaacccagctcttgacccgcacacaagcaatgatgcagcaggttgatatccgctggagaagccaacttgcgatactgttggaaaatatcgaagcgttgaaggcggataacagcgcgtgggaagaaacgccagcaggtaaagccatcgcttatcagcttcgtgattatcgcggtgcatatctgttttctaaactcattagtgaagcgttcctgccggggcatggtttcccggttggcgtcgtcaatttcaattatctgacggcagatgagctggaaaaacgtcgcgcaataaaagctactcaggctgaccctaatgaagggggagaaagcttttctcgtcgtattgaaaaattgcccagccgtgatttgcctacagcattacgcgagtatgctccaggtgcagatgtggtattgggcggaaaagtatatcgttcctcgggcattatgcttggcaaggtacttgccagcgggcaggagctgtcaggcgatcatcatattccgtggttctggcattgtcgtaaatgtggtgcggaggcaaccagtactacccgtcctgtcgaatgtagtcactgcaaagcggatatacagcaacttgatgtgaagcgttatttacagcctgttggttttgcgacagatatccgttatcaggcgcataatgatgtatccatgcctgcacaacttccctggaaagatccacgtgttcttgtaccgtcttcggtgtgggtttctttacccgatgctgggctaggacgttaccgttttagccatagtggggaattgttccacttcagtgaaggggaatttgggcacggctacgcaatttgcctctcatgtggtcgggcagaatctcaaaatcaaccccagcgtacccctgaaaatcttaagaacccagagagggaaaatacgcattacctgttgcgagggggcagtaacgatcgtctgggtagcaataaattgtgccacggtcacgtgcataaagatctttggttggggtatagcagtcgtacagatatggttgagctgcaactcaatgatgataatggcctgttgatccgtgatgaggttgccgcgcgttcccttgcggtcgctttgcgtgaagggttagcgcataaattgggtatcgaaaatactgagctgggcgtgacgacgcagcaagcgcgcgatatcaatggctataccggatattccatcttcatttacgacaataatgcgggtggtgcaggttatgcagtgcaattgatcgaccattgggctgatgtctttaattacgccagaaaattgctcgattgcagttgcgataaattctgtcaccactgcttgctcagctacgacagtcagcattatgtcaacagattagatcgtcaccatgcattaaccctgcttaccaatgtacggttgcagcgacttaacctcgcgccagaatatcagtacttcggcgatggtagccgggttgaaactaaccctctgagtttacgtattgcgcaatgcctgaacagcgagatttatgactcctgctcgctggttcttgcggggccgcaggaacagtgggactttgcccaatggccattatttaaagagttgctccagtttgcctcctccggtgggaatgttgagttgctggtggccacgccgctggcaaacttaactgatagctccagacatcagctttccgcgttggcggcgatgccgggaggtcgcttacaagtgaaatccattgccactgcgcagctcatgcaaggaaaggggcgctggcttgcgcaggtgactcgcgaagggcaaagccaacagtgggccgcagacgacagcgctaccgttgcacctggtgaattatggggacaaagtgcgtcttcaccagtagtgacacttaaaggaacgtccggaaaaaccttctcgggtcagaccttaagtgcagaagatttactgcccgccttacccaccggggcggtgcgcatcaatctctgtgaacaactggacgggccgctggaaggttttggttcgcgtttctggtcgttagtcacgcaacagcacgctggctggaagcaggcatttacccgccacaaagagataacgcatgttgagtacagcgatcgttatcttaatagcccattcacggcgcgtttgttaggtgaaatcttaaccgagctggttgaacagggaatggcggaacgcgccagcctcactgtttgcgtcaaaaaattggattacaactctcgccaacacgacgctctctataacgcgtggcttaatgaggaagatcgtcagcaggttgtgaccactttacttgaagaaggatatctggggcctgcgtggccgggagcaattagctggttaacgggggataaccagagtacggagcatggacgagaactgacagtcaccttcagcgatggcagtcagcattatgtcctgctcgacatggggcttagctactggcgctgtattgaagacaccttctttgattttgctctgcgagtaccgcagcaagttgaacggctggcaaacacgcgagcgcgagctgttgcctcgggtaatgaccttaggagttatgttatcgctggataa

SEQ ID NO: 28589 - DNA, 2937 bp, Escherichia coli; identical to SEQ ID NO: 28571

SEQ ID NO: 28590 - DNA, 6315 bp, Escherichia coli; identical to SEQ ID NO: 28574

SEQ ID NO: 28591 - DNA, 2937 bp, Escherichia coli; identical to SEQ ID NO: 28571

SEQ ID NO: 28592 - DNA, 6315 bp, Escherichia coli; identical to SEQ ID NO: 28574

SEQ ID NO: 28593 - DNA, 2937 bp, Escherichia coli; identical to SEQ ID NO: 28571

SEQ ID NO: 28594 - DNA, 6315 bp, Escherichia coli; identical to SEQ ID NO: 28572

SEQ ID NO: 28595 - DNA, 2937 bp, Escherichia coli; identical to SEQ ID NO: 28573

SEQ ID NO: 28596 - DNA, 6345 bp, Escherichia coli
atgactacacgctatttttcgtcacttattgaacaatcgttgtctcgttcaactgaagcaacgctcagtatcatgggcgttaccaacccgcagctgcgtgaacatctcgcgcaacaaatgggggctgattgtgggaaaccgggctcattccttgcttctccggtattccagcaaatgtttggctggaaggagtcaaaccacacgatgcgcagcctgacggaaggcaacgcattgttgagcaaagcagtggttgattcactggatgatcagaataatggccggtaccggtttggtgctgactggaggccttttacgcaccagttagccagttggaaagctttgctggaaaagaaacattcagtggtggtaaccagtggtacgggttcaggtaaaacggaatgttttatggtaccggtgctggaagatctttaccgggaactgcatgaaaatggcaacaatccgttggtcggtgtccgagccctttttctctatccattgaacgccctgattaattcacagcgcgagcgtctggatgcctggacgcgtggttttggtacagggatccgctactgcctttacaacggcaacaccgaaaacctacacgcttcggtaaaaagcgaacaggcaaaaaggccgaatgaggtgctctcgcgcgaaaaaatgcgtgaagaacctgcgccgattctggtgaccaacggcacgatgctggaatatatgatggttcgccaggtcgacgccccgattatccagcaatctaaagcacaaaaatcactacgctggattgtactggatgaagcgcatacctatgtagggtcgcaggccgctgaactggcgctccagctgcgtcgtgtgatgaccgcgtttggcgtgacaccagatgacgtgcgctttgtcgcgacctctgcgaccattgccggcagcgacgctgaaaagcagctgaaaaaatttctctctgaattatccggtatcccgcaggagcgcatcgatgttctggacggaagtcgggtgattcctgaactggaaccatccaaaaacgtttctgttccgttagacgagatagagcaaatacctgatctggatctaagagataaaaatgataataaaattaaagggataagtcctgagcgcttttatgcgcttacgcattcccccgaagcgcgttacatacgtgagatgttggtcaaacagcccaatccgatgaagctggatgagataacagagcggttacacgtgctgacaaaacagcattacagccagcaggaagtactgcgttggatcgatgtctgttcagggactcaacctaatgcaaaggatcccgcatttcttaaagtcagggcgcatatcttccagcgtaatacccagggaatatgggcttgtgttgataaagattgcagattaaagcacggtacaccgctcgacaaaggctggccctttggctatgtgtatgtgaaccagcgacaaaattgtgactgtggaagccctgtatacgaagttgcattctgtaatgattgtaatgagcctcatcttctggcacgggacaaaaagggcaaactagtccagtgggaaaataaaggtggcgatgaattctctttgcaggatgaagtacctgttgaacatgacgctacagaagaaaaagtcgaaaaagagaacagttttcagcctccgttgattattgccgcaggagagaccagcgaggcaggttataccctacaacgcctcgaccgtcagacgcgccgtattggcgttattaacaatgacagcattccgctgattattaatgatattgaacaggtttgtagtgccagtggctgtggctacagaggcatgagtgggaaacagcccttccggcgtgcactattaggtgggccattttacgttactaatatcgtgcccaccgttctagagtattgtcaggactttaccagtgatgaaggcaaagagggcgtcggaccagattcgttgccaggacgaggtcgtcgactcatcacctttacagacagtcgacaagggacagcccgaatggcggtgcgtatgcagcaagaagcagaacgcagtcgcttacgcggaagcgtagtcgaaattctcagctggcatcaaaggacgcaaacgtctacagcgccgaatgccaatgccgatctggaaaaattagcggccagggcgaagcaagcccgtgagcaggcagaagaatatcgaagctggggaatgccagaccaggcgaaattgtcacaagcacaggctgaacagcttgaacaggcttatcaggctgcaaccggtgggaaagccgcgactatcctggtatcccgaacctggacggagatggttaacgagcttaaagagagagccgatatccgcgggccggttctgcaatataaccattatcttaagcctgaagtgtttaatgaaaacggcagcccccttaagctttctgaaatgttgttgttccgggaattcatgcgtcgccctaaacggactaacagcctggaaacacaggggctggttcaggttggttaccaggggctggagaaaatacataagagccccttgcactggcaggaaaaaggattaacgctggatgactggcgcgattttctcaaggttacgttggatcattacgttcgcgagagcaacttcacacagctggatgatgagctgaaaaactggattggtagccgtttttcatcaaaattcgtccgtaacccggaatcaaaagatcctgaagataatcagaacagacgctggcctcaaattcgtaatggcaacgtatcccatcgtttagcgaagttgctgatgctgggggctggattcaaaaccgtcaatgcggcaactattgatattatcaatacatggctgaaagaagcatgggcccaacttaccggaccgcttgcagtactgaaacccgatggcaaccgtttttatttaccgaaagagcatatgactttttctttaatcacggatgcctggatttgcccggtaaccaataaaatcctggatacggcttttaaaggcttaaccccttatctgcctacccatatttcgttcgagcatcttaccctggcgcaatatgacacttttgtcgcgcagaaagtcacaatgccggaaatctggaagctggatcgttcacaggaagactacgcagagggtctggcaaaagcacgcgactgggtcagccatgatccgctgatcgcacaattgcggtcggaaaacgtctggacagacattaacgatcgtgtcgtggaaggcggcttctactatcgtactgccgagcactctgcccagcagtcgtcagaacgtctgcaaagctatgaaaagatgttcaagaatgggcaactaaatgttctcaactgttccaccaccatggaaatgggggttgatatcgggggtattactgcggtggtaatgaacaacgtaccgccacatccggccaactatttacagcgcgccgggcgagccgggcgtagtaaagaatcacgcgcgatctcttacaccctatgtaaaggtaacccacacgaccagcaggtttttgccaacccgctctggccatttgaaaccatgatcccggcacccatggtcgcgatgaactccgcccgactggtgcaacgtcacgtcaatgcattattactgtccgactttttatgtaacgttattggcgaaaccgataaagaaaaaaccagcctcgatagcctctggtttttcggtgaagatgacgggcagtcaaaatgcgaacgctttaaaatctggctggaacgtccggttcttgatatcgacacggcgctggaacggctggtgaaaggtacggcgttgcatggtgcaagagccgaatatctgcgggataaaacaatcaacgcgatcaccttcctgcaacagcggtggctctccgtttatcgcgatctcgtgacacaggagcgtgagtcgcagccgcaaacgccttatcgtaagcgcatagagctggagaagaaacggcactgtggcgagtatctgctgcgcgatctggctgccagaaccttcctgccgggatacggtttcccgacagatgtagtgacgtttgataacttcacgatggaagattatatccgcgaaaaatcgcagaaaagtcgtgataaaaaggaccgtgaagataacgtttcccgttataaaggattaccttcccgtaacctcggtgttgccattcgtgaatatgcaccgggagcagagatcatccttgatggccgtgtcttccgctctgccggtgtctcactgcactggcacaacattaatgctgataccaatgaagcccagcgtctggattgcgcctggcgctgtcacaaatgcgggaccattggctatgaagaggggatgagcagttccgggatgctcttttgctccaatagcgcctgcggcgaaaaaataatcatggataatcgccgtcaggtgctgcagcctgccgggtttgtcaccgatgcacacgctccggtaacgaacaatattgaaaccatgaaattcgtcccggttgtccccgcgtgggtctttgttaaagcagagcccgtaccgttgcctaacccgctaatgggttatatggcttctggggctgatgggcatgttttccagcaaagtttgggggaaggtggacacggttatgcattgtgtctgagctgtggccgtgctgagtcgatgctgaatgaaaatgatgcgccgaaaagtatggaagctcactatccaccgcgtccgggtaaagcggatcgcgacagccagaatcatcgtctgatttgccccggttcgacggcactcatgaagaatgtcaccctgggcgcactggcgcgtaccgatgtctttgaaatggttctgcgcaaaccgcaaaacggcgagtatctgccagataacacagaggaggggcggattgttgctatgactctggcggttgctctgcgtcaggcgctggcgggcgttctgggtatctccgccgcagaactcggctattctgtacgtccggtcagactggaggatgggcaatcggtattagccgtacagctttatgatgtgatcagcggtggtgcaggttttgcctccagcgcaccggtacacattgaagctatattgcagggaatggtgaaacagttaggctgccgccattgtgagactgcatgtagtgaatgcctgcttgattcccagactcgccacgatcacgatttgctggatcgcaaagcggcgctggcctggcttggcgatgacttcacgtattacatcggtttaccggatgaagagacattctcgctgccggatgcccgctactgccctggcgccattggcgatacgattcgccgggcgattaacgaaggcgctgaaaagctcaccctgtggatgaccggcgcgcccaatgagtgggatttatacgcacgtcagttccgcgcggcggttcagaactatcggctaaaagacaacgtcgaggtcgatcttgttattcctacgggagtggatgacccggacctgttgcatgaactatcgcaatttactgcgctgggtgtgcggctgtgccatgttgaacaggatctgcaattaccgatcgttgcccaggtcacctttaccgatcgcgtgatgacgctggcctctcgcagccagcaggcaacgattccggggccggagtggcacctgaatgacgaactggtggtgcgtagtctcggttataaaacggtagaactgaacgagtttattctgccggctaaagccaccaacgctgtcgagcgggtcaaagacattcagatccacaaacagttgaatggaccactgtcgcagtttgggcaacgcttctgggacgtgctgtttaacgaccatgaagaagcgcagtcactgatgaataacacgcgaattaccggcgttcactataccgatcgctatctgcaaaacccggttgcgctggcgttgttgggatcaattctgagaccgctaaaaacaaagctgaccgatggcgctgaagtgacgctggatacgctatttaaagataaagatcgccccggtaaccggcctttccatgactggatgagcatagcggattttcaggatttcgctgatcagtggtttgctgctgcgctgggcaggccggtagaactgacggtgttcgactcgccgcgcgatatccctcaccatcgtaaactgacggtgacttttgaggatggtcaggtattgaagatccgcttcgatcaggggatgggctactggcgcatcaacttttcatcgcaatggcattactttgatttccgcgatgacgtttctttccagttagtcaaaatggctcaggcctgcaaggaagggaatgtcgccaacagcgaagagagttgggcaacggatgtgctggtggaggtgatcgcctcctga

SEQ ID NO: 28597 - DNA, 3291 bp, Escherichia coli; identical to SEQ ID NO: 28561

SEQ ID NO: 28598 - DNA, 6345 bp, Escherichia coli; identical to SEQ ID NO: 28596

SEQ ID NO: 28599 - DNA, 3291 bp, Escherichia coli; identical to SEQ ID NO: 28561

SEQ ID NO: 28600 - DNA, 6345 bp, Escherichia coli
atgactacacgctatttttcgtcacttattgaacaatcgttgtctcgttcaactgaagcaacgctcagtatcatgggcgttacaaacccgcagttgcgtgaacatctcgcgcagcaaatgggggctgattgtgggaaaccgggctcattccttgcttctccggtattccagcaaatgtttggctggaaggagtcaaaccacacgatgcgcagtctgacggaaggcaacgcattgttgagcaaagcagtggttgattcactggatgatcagagtaatggccggtaccgatttggtgctgactggaagccttttacacaccagttagccagttggaaagctttgctggaaaagaaacattcagtggtggtaaccagtggtacgggttcaggtaaaacggaatgttttatggtaccggtgctggaagatctttaccgggaactgcatgaaaatggcaacaatccgttggtcggtgtccgagccctttttctctatccattgaacgccttgattaattcacagcgcgagcgtctggatgcctggacgcgtggttttggtactgggatccgctactgcttgtataacggaaatacagaagagctccacgcaaaaatgaaaacagtgcaggataatagaccaaatgaagtcttatcccgtgaaaagatgcgtctggagccagccccgattctggtgaccaacggcacgatgctggaatatatgatggttcgccaggtcgacgccccgattatccagcaatccaaagcacaaaaatcactacgctggattgtactggatgaagcgcatacctatgtcgggtcgcaggccgctgaactggcactccagctgcgtcgtgtgatgacagcgtttggcgtgacgccagatgatgtgcgctttgtagcgacctctgcgaccattgcctgcagcgacgccgaaaagcagctgaaaaaatttctctctgaattatccggtatcccgcaggagcgcatcgatgttctggacggaagtcgggtgattcctgaactggaaccatccaaaaacgtttctgttccgttagacgaaatagagcaaatacctgatctggatctaaaagataaaaatgataataaaattaaagggataagccctgagcgcttttatgcgcttacgcactcccccgaagcgcgttacatacgtgaaatgttggttagccaacccaatccaatgaaactggatgagatgacgcagcggttaaatgcgctgacaaaacagcattacagccagcaggaagtactgcgttggatcgatgtctgttcagggactcaacctaatgcaaaggatcccgcatttcttaaagtcagggcgcatatcttccagcgtaatacccaaggaatatgggcttgtgttgataaagattgcagattaaagcacggtacaccgctcgaaaaaggctggccctttggctatgtgtatgtgaaccagcgacaaaattgtgactgtggaagccctgtatacgaagttgcattctgtaatgattgtaatgagcctcatcttctggcgcaggacaaaaagggcaaacttgtccaatgggaaaataaaggtggcgatgagttctccttgcaggatgaagtacctgttgaacatgacactacagaggaaaaagtcgaaaaagagaacggtttcctgcctccgttgattattgccgcaggagagaccagcgagacaggctataccctacaacgcctcgaccaccagacgcgccgtattggcgttattaacaatgacagcattccgctgattattaatgatgttgaacaggtttgtagcgccagtggctgtggctacagaggcatgagtgggaaacagcccttccggcgtgcactattaggtgggccattttacgttactaatatcgtgcccaccgttcttgagtattgtcaggactttaccagtgatgaaggcaaagagggcgtcggaccagattcgttgcctgggcgaggacgtcgactcattacctttacggacagtcgacaaggtacagctcgaatggcggtgcgtatgcagcaagaagcagaacgcagtctcttacgcggaagcgtagtcgaaattctgagctggcatcaacggacgcaaacgtccacggcgccgaatgccaatgccgatctggaaaaattagcggccagggcaaagcaagcccgtgagcaggcagaagaatatcgaagctggggaatgccagaccaggcgaaattgtcacaagcacaggctgaacagcttgaacaggcttatcaggctgcaaccggtggaaaagcagcaactaccctggtatcccgcacctggacagaaatggttaacgagcttaaagataaagccgatatccgtggcccggtactgaaatataaccactatttgcagcctgaagtgtttaataaaaacggcgggccactaaagctttcggaaatgttgttgttccgggaattcatgcgtcgccctaaacggactaacagcctggaaacacaggggctggttcaggttggttaccaggggctggagaaaatacataagagccccttgcactggcaggaaaaaggattaacgctggatgactggcgcgattttctcaaggttacgttggatctttatgttcgcgaaagcaacttcacacagctggatgatgagctgaaaaactggattggtagccgtttttcatcaaaattcgtccgtaacccggaatcaaaagatcctgaagataatcagaacagacgctggcctcaaattcgtaatggcaacgtatcccatcgtttagcgaagttactgatgctgggggctggattcaaaaccgtcaatacggcgactattgatattatcaatacatggctgaaagaagcatgggcccaacttaccggaccacttgcagtactgaaacccgatggcaaccgtttttatttaccgaaagagcatatgactttttctttaatcacggatgcctggatttgcccggtaaccaataaaatcctggatacggcttttaaaggcttaaccccttatctgcccacccatatttcgttcgagcatcttacccaggcgcaatatgacacttttgtcgcgcagaaagtcaccatgccggaaatctggaagctggatcgttcacaggaagactacgcagagggtctggcaaaagcacgagactgggtcaacaatgatccgctgatcgcacaattgcggtcggaaaacgtctggacagacatcaacgatcgtgtagtggaaggcggtttctactatcgcactgccgagcactctgcccagcagtcgtcagaacgcctgcaaagctatgaaaagatgttcaagaacgggcaactaaatgttctcaactgttccaccaccatggaaatgggggttgatattgggggcattactgcggtggtaatgaacaacgttccgccacatccggccaactatttacagcgcgccgggcgagccgggcgtagtaaagaatcacgcgcgatctcttataccctatgcaaaggtaacccacacgaccagcaggtttttgccaacccactctggccatttgaaaccatgatcccggcacccatggtcgcgatgaactccgcccgactggtgcaacgtcacgtcaatgcattattactgtctgactttttatgtaacgttattggcgaaaccgataaagagaaaaccagcctcgatagcctctggtttttcggtgaagatgacgggcagtcaaaatgcgaacgctttaaagtctggctggaacgcccggttcttgatatcgacatggcgctggaacggctggtgaaaggtacggcgttgcatggcgcaagagccgaacatctgcgggataaaacaatcaatgcgatcaccttcctgcaacagcggtggctctccgtttatcgcgatctcgtgacccaggagcgtgagtcgcagccgcaaacgccttatcgtaagcgcatagagctggagaagaaacggcactgtggcgagtatctgctgcgcgatctggctgccagaaccttcctgccgggatacggtttcccgacagatgtagtgacgtttgataacttcacgatggaagattatatccgcgaaaaatcgcagaaaagtcgtgataaaaaggaccgtgaagataacgtctcccgttataaaggattaccttcccgtaacctcggtgttgccattcgtgaatatgcaccgggagcagagatcattcttgatggtcgtgtcttccgctctgccggtgtctcactgcactggcacaacattaatgctgataccaatgaagcccagcgtctggattgcgcctggcgctgtcacaaatgcgggaccattggctatgaagaggggatgagcagttccgggatgctcttttgctccaacagcgcctgcggcgaaaaaataaccatggataatcgccgtcaggtgttgcagcctgccgggtttgtcaccgatgcacacgctccggtaacgaacaatattgaaaccatgaaattcgtcccggttgtccccgcgtgggtctttgttaaagcagagcctgtaccgttgcctaacccgctaatgggttatatggcttctggggctgatgggcatgttttccagcaaagtttgggggaaggtggacacggttatgcattgtgtctgagctgtggccgtgcggagtcgatgctgaatgaaaatgatgcaccgaaaagtatggaagctcactatccaccgcgtccgggtaaagcggaccgcgacagccagaatcatcgtctgatttgccccggttcgacggcactcatgaagaacgtcaccctgggcgcactggcgcgcaccgatgtctttgaaatggttctgcgcaaaccgcaaaacggcgagtatctgccagataacacagaagaggggcggattgtcgctatgactctggcggttgctctgcgtcaggcgctggcaggcgttctgggtatctccgccgcagaactcggctattctgtacgtccggtcagactggaggatgggcaatcggtattagccgttcagctttatgatgtgatcagcggtggtgctggttttgcctccagcgcaccggtacatattgaagctatattgcagggaatggtgaaacagttaggctgccgccattgtgatactgcatgcagtgaatgtctgcttgattcccagactcgccacgatcacgatttgctggatcgcaaagtggcgctggcttggcttggcgatgacttcacgtattacatcggtttaccggatgaagagacattctcgctgccggatgcccgctactgccctggcgctattggcgatacgattcgccgggcgattaacgaaggcgctgaaaagctcaccctgtggatgactggcgcgcccaatgagtgggatttatacgcccgtcagttccgcgcggctattcagagctatcggctaaaagacaacgtcgaggtcgatcttgttattcctgcgggagtggatgacccagacctgttgcatgaactatcgcaatttactgcgctgggtgtgcggttgtgccatgttgagcaggagctgcaattaccgattgttgcccaggtcacctttgcctatcgcgtgatgacgctggcctctcgcagtcagcaggcaacgattccggggccggagtggcacctgaatgacgaactggtggtgcgtagtctcggttatcaaacggtagaactgaacgagtttattctgcccgctaaagccgccaacgctgtcgagcgggtcaaagacattcagatccacaaacagttgaatggaccactttcgcagtttgggcaacgcttctgggacgtgctgtttaacgaccatgaagaagcgcagtcactgatgaaaaacacgcgaattaccggcgttcactataccgatcgctatctgcaaaacccggttgcgctggcgttgttgggatcaattctgaaaccgctaaaaacaaagctgaccgatggcgctgaagtggcgctggatacgctgtttaaagataaagatcgccccggtaaccggcctttccatgactggatgagcatagcggattttcaggatttcgctgatcagtggtttgctgctgcgctgggcaggccgatagaactgacggtgttcgattcgccgcgcgatatccctcaccatcgtaaactgacggtgacttttgaggatggtcaggtattgaagatccgcttcgatcaggggatgggctactggcgcatcaactttgcatcgcaatggcattactttgatttccgcgatgacgtttctttccagttagtcaaaatggctcaggcctgcaaggaagggaatgtggccaacagcgaagagagctgggcaacggatgtgctggtggaggtgatcgcctcctga

SEQ ID NO: 28601 - DNA, 3291 bp, Escherichia coli
ttgggtcaatcagaatacatttcatgggtaaaatgtacttcctggctaagtaactttgtgaatcttagagggttgagacaaccggatggacgtcctctttatgaatatcatgcaaccaatgctgaatataaccaattaacgcagctactctgtgctgttggtcaatcacaatctaatatatgtaatagagactttgctgcctgttttgttcttttttgctctgagtggtaccgcagggattatgaacggcaatgcggatggacgtgggaccctatatataaaaaaatagggatttcattcaccgccacagagcttggtactatcgtaccgaaagggatggaagattactggctgcgcccaattcgattttatgaatctgaacgacgtaattttctcggaacattattcagtgaaggtggtttacctttccggctactcaaagaatcagacagtcgctttctggctgttttctccaggatccttggacaatatgagcaagcaaagcagtcaggtttttctgccctttcgctggcaagagctgtcatagaaaaatcagcgctgccaactgtttttagcgaagatacctctgtagaacttatcagtcatatggctgataacctcaattccttagtacttactcacaacctaacaaatcacaaagaaccagtacaacagcttgataaggttcaccctacctggcgaagcgagtttccaataccgttagatgatgaaacaggaacgcattttttgaatggactgctatgcgcagcctctgtagaggctaagcctcgactacaaaaaaataagagtacgcgttgccaattctattggtcagaaaagcatccagatgagcttagggtgatagtatctcttcctgacgaagtttcctttcctgtaactagcgagccgtcaactacgcgctttgaacttgccatttatgaagatggtgaggaagtctctggccttgggccagcctatgcttccctggaaaacagacaggcaacagttcgattacgtaaaagcgaagtgagatttgtcaggcaaaatccatctgcaggtttgtcgttagtggctcgtgctggagggatgattgttgggagcattaaacttgatgacagtgaaattgccattggtgaggtgccgttaaccttcatcgttgatgcagatcaatggctgttacagggacaggcctcctgcagtgtgcgaagcagcgatgttctgattgtgctccctcgggacaatagcactgttgctggttttgatggccaatcgagtgcagtaaacgtattaggacttaaagcgctacctgttaagggatgtcaggacgttacagttacagcaaatgaaacttatcggattcgcaccggaagagaacaaatcagcatcggaaggtttgctctaaatggaaagcgtgcaagctgggtttgtcatccagatgagacatttattggtgtaccaaaagtcatttctacactaccagatattcaaagcattgatataacgcgttacctgagcggaatttcaattgagcaatgtcatatacaagagatgctaggggctcaatatctttctatccgtaatagtaataatgaaacgctcttgcgtcgcaaaatcggtatcttgcctgctgatttcagtattgagataaaaggtggaatgcacgcaaatgaaggcactatcgtaatcaccacacagcatccttgtgtagcaacacttaaagataaaacattggaggctacacgtaagcgtactgaggggcgaacagagatacaactcaaagcggaaggggtacctccggcatttattacattacaagttctgcctaatttggcggctgataccatcgacattgagttacctttcccagctaaaggctgccttgctcttgatgtaaacggacgtcctctggataaaaacattacgctgcatgatctgctgggttccagagcattcctgttctccagaaatggtgagccgacaaaatatacattgcagttgcatttgcgctccattagtggattacaggcatggcacgaatggagttatacggcattgagcgagcgtcctgttgaattgaatctctatagtctacgtgaacacattgaaaatctgatttcacttgaggcaggtattgatcaggttgttgagatgcgtattacgggggcgggtgtggtcatggcctggcaaattcgtcgctataaatacagcctgcgctatgattatgaaaaagaactattactcagccagtcagtgaaccatcgtgctggacagattccttcccccgttatcatgctgttaagtgaacccgagaggaaatccattcccttagcatcaagaatgagcgagggagtgcctgtcggtgaatatgagttgagctcaatcgttaacaaaaacggaccatggttggttgttcctaaaccgggtgaagagatggcttttcgcccctgcttcattcgtggcgaatcttcgttaccggtagaagaaagcaacatccgctcattgcagaaagcgacccagctttttaatccacaggcagaagttaataccatcacacgggttctcggacagatggctaacgatcctgcccattccggctggcaatttatgcgtagcctgtacgatcaatttggttatttaccgctggcaacctttgaagtatggcgtgcactagtgcagcatccgcaggcattggcgatgtcgctcttcaaattcgaaatgtcagcagagtatctgagtcgtattgagaatgagttccctattttatgggagtttttccccatctttgagatcaaagctgcatctgagcgtttcaaattgttcctgagccaaaaaggtgcaccggaggaaacccagaaattactggttaccaatatgtttcaacggctggggctcgtgttcccgacatatgccgatgaaattgagaaatggttaagtaatggatatctccccccgtctattcctgaatcttgtgtccacgggtggtatcaggagctcttacgtgagcacagtgaagctcgctggcctgaatacggctgcaagcgtctgtataaatggatgatgtcacaaaaaaatccagtgattggtattaatcctgacgcaaatcaccgctattccgtggcctggttacccgtcttcgccgcagcggtggcaagcggaaatgcttcttttgaatctgtatttgaccgtaaacccggtgccgtatttttcctgaggcaagtcagggatttcgattcccgctggtttaaggccatcttccagttcagcctgttgcgttatgttgctaaaaaataa

SEQ ID NO: 28602 - DNA, 6315 bp, Escherichia coli
atggacgttcagcaactgcattatgcgccacttctaaatcagcttcatcagcgtgcggtgaggtcggtggtaagtcagttggcattgcggagcaagtcgttgactcattatctggaatcacaatattttcagcctcccggtcaggaggggtcactgcttgcagacccggtattcgaaagtacattcggctggatgcctgcggatgaaacaatggaggatttgcgggacaagctgatctccagcccgctggttgatgcattgagcaaagcgccagtgccatttcgtcatcaacttactgcgtggcgaacgattctggaagacaaaaaatccttgttagtgagcagcggtacgggatccgggaaaacagaatgctttatggtaccggttctggaagatcttattcgtcagcaaaaatcgacccgccagtcactaacagggacacaagctattttcttgtatccgttaaatgcattaattaacagccaacaggagcggcttcgcgaatggacgcgcggatttaaggggaaaatacgcttcgcgctatataatggcgaaacccggcataccaaatacgaaattcaggaagatcagttgaaagtacctgaacaagctttgagtcgggaagccatttatgaagaaccaccttccatcatggtgacgaataccaccatgctggaatatatgctgattcgtcgtaaagatgccccaatcatcgaaaagtctcaggggatgttaaagtatatcgtcctggatgaagcccatagttatattggttctcaggctgctgagttagcgctgcttttacgtcgtgttatgcaggctttcaatgttggacccggcacagataaacctgtgcagattatcgcgacctctgccactattggtgaagactctcctgaaggtaataaggagcttgctaaatttgtcgctgatctcgcgggcgttacagaacgtgatatcaaagtggttcgcggttatcgacaaataccgcgggtatcggagtcgctgattcgtcatgaataccccacatctttaacttctcttaaatccctgagccctcaggatctttaccaacagctttgtcattaccgtgtggcccagcaattgcgtcaggcgttaactcatcccggacggcaggcagtacgtttgagtgagttgctcaatgttgccagaagaacctggccagatattaatcaccgtgagctactgcaactcctcgatctaatggcaagatcgcgagaaggtgaactggcttttacgccattacgtatgcatgggtttatcagaacactggcgggtctatgggcatgttcaaacaaacaatgctcacataaagcacatgaattaaatcagagtgactggccatttggtcaggtatggtttgagcagcgccaatattgtgactgtggagcgccggtatttgaagttttacgttgctccgggtgtggttcagcttatttgtctgccaaagaggagatgcgcggtgatggaacgaactggttggtagcgcaaccagccactgccgaagtggatgagtttgctcttgatgtagatgtttattctgaagatgaagacaacgacgaattagacaataactctcaatttgatcgtctgattgcgagcgatggtgaaaaatatatcatttcactggaagaaacgacggcggggaaaattgatagtgaagcgcaaaagcactatgaaataaacctgttaagaccggaatctcgaggtgagggacgcaataactcctttgcttgtgtttgctgtggtgacactcaacggaaaaataatcctttattccgtccgcttcggctcggcgcgcccttttttttaaatgaaattattcctactctgctggagttttctccattaccgcaaacaagagaagagcagttaggaccgtttaatggtcgacgcttgctcacctttacggattcgcgtcagggtaccgctcgcatttcagcccgcttacagcaggatgccgataaagcgacgttgcgagctctttgttaccaggagctggcaaatattacagagccttcagcaaaactcagcccggcacactgtgcactgttagagaaagttattagccagttttctgtcctccctttaaaaaattccatcgacgcgctgaaaaaagcgatggctgcgaatgaggagcttagcccgacggacattcaggcacttaaaattattgagccgatggtgagttccttaagcacggagcatgctgaagcgatgcaaatacttcaggctaactctggcaatcagcagaagaaaaccatgtcatggcaaacgctgtctgaacagctggttggcagtgtggaccttgccgatagaatgagaggcagttttaaagaattgtctgggcttgatcttactaaacaacagtttgcagatttttgtttatacagcgagtttggtcgccgccctaaaaatgcctggaccctcgaaagtctgggtctggtagccattcactatccattcattgataaagttacaacctgcccgcaggactggaagacattattacccgatcccgataagcaattagcggaatggcgtaatttattgaagattactcttgatttctttatccgtgaaaacagtgccgttttttacgaaaacgagcaataccctcgctggatgggggcacgtttcccggtaaaaatgctccaggggccagataaaaaaaacaaagggcagaaacgtgatcaactttggccacaaatacgcgatcgccattataaccgggtcattaagctattaatcgcagtctttccggcaatacaacctgagcaggctcactggaaatcgttagttaaccacttaatgattgaggtctgggatgcaattcgaccctgcttacgtcagtttgagtcgggttatcagctggatattaaacaacaagctgaattttacagtccaaagcaagtgtggcgttgcccctatactcgacgtgcgttagacgtcacgttgctgggatactctccgtatttgccgggtagcaaagaaattgcacctgaaaaagcagtgttgattgaaatgcctgagcttcctgtacgtcactggcgtttgtctggtggtggagaaatcgcccgagaagaacgtctggagtggctggaaagtaatgcgctgattcaacatgcccgcgaggaaggattatggtctactcgcagcgaccgactggccctgaaagatagctggtatcgtctggaggaacactctgcgcagagaacgcctgagcagaaccagtttaatgaaaaacaatttaagtcaggcaaagttaatgtgctgaactgttccacgaccatggagatgggggtggatattggtggtatgagtttggtggcaatgaacaacgttcctccagcgccggcaaattatttgcaacgtgcaggtcgcgcggggcgtcgtggagagagtgcatctgctgccattacgttatgtaaaaacacggcgcatggaatggaggtattcaaagaccccctctgggcgttcaacactactgccagtgcgccacgggttcgttttgggagcagtagtattgttcaacgacatgttaatgccctggttttaggtctgtttttacgagctgaagttcctgatgcgacaaaactgagttgcaaatggttctttgaaggtgatgagagccagtgtcttcgttttctccattggttaaatcaccaggccgatcagctggcggataaacttaaacgccttactcagggaaccgtactgatgtcattgacggcaacccagctcttgacccgcacacaagcaatgatgcagcaggttgatatccgctggagaagccaacttgcgatactgttggaaaatatcgaagcgttgaaggcggataacagcgcgtgggaagaaacaccagcaggtaaagccatcgcttatcagcttcgtgattatcgcggtgcatatctgttttctaaactcattagtgaagcgttcctgccggggcatggtttcccggttggcgtagtcaatttcaattatctgacggcagatgagctggaaaaacgtcgcgcaataaaagccactcaggctgaccctaatgaagggggagaaagcttttctcgtcgtattgaaaaattgcccagccgtgatttgcctacagcattacgcgagtatgcgcctggtgcagatgtggtattgggcggaaaagtatatcgttcctcgggcattatgcttggcaaggtgcttgccagcgggcaggagctgtcaggcgatcatcatattccgtggttctggcattgccgtaaatgtggtgcgggggcaaccagtactacccatcctgtcgaatgtagtcactgcaaagcggatatacagcaacttgatgtgaagcgttatttacagcctgttggttttgcgacagatattcgttatcaggcacataatgatgtatccatgcctgcacaacttccctggaaagatccacgtgttcttgtaccgtcttcggtgtgggtttctttacccgatgctgggctaggacgttaccgttttagccatagtggggaattgttccacttcagtgaaggggaatttgggcacggctacgcaatttgcctctcatgtggtcgggcagaatctcaaactcaaccccagcgtacccctgaaaatctaaagaacccagagagggaaaatacgcattacctgttgcgagggggcagtaacgatcgtcaggggagcaataaattgtgccacggtcatgtgcataaagatctgtggttgggatatagcagtcgtacagatatggttgagctgcaactcaatgatgataatggcctgttgatccgtgatgaggttgccgcgcgttcccttgcggtcgctttgcgtgaagggttagcgcataaattgggtatcgaaaatactgagctgggcgtgacgacgcagcaagcgcgcgatatcaatggctataccggatattccatcttcatttacgacaataatgcgggtggtgcaggttatgcagtgcaattgatcgaccattgggctgatgtctttaattacgccagaaaattgctcgattgcagttgcgataaattctgtcaccactgcttgctcagctacgacagtcagcattatgtcaacagattagatcgtcaccatgcattaaccctgcttaccaatgtacggttgcagcgacttaacctcgcgccagaatatcagtacttcggcgatggtagccgggttgaaactaaccctctgagtttacgtattgcgcaatgcctgaacagcgagatttatgactcctgctcgctggttcttgcggggccgcaggaacagtgggactttgcccaatggccattatttaaagagttgctccagtttgcctcctccggtgggaatgttgagttgctggtggccacgccgctggcaaacttaactgatagctccagacatcagctttccgcgttggcggcgatgccgggaggtcgcttacaagtgaaatccattgccactgcgcagctcatgcaaggaaaggggcgctggcttgcgcaggtgactcgcgaagggcaaagccaacagtgggccgcagacgacagcgctaccgttgcacctggtgaattatggggacaaagtgcgtcttcaccagtagtgacacttaaaggaacgtccggaaaaaccttctcgggtcagaccttaagtgcagaagatttactgcccgccttacccaccggggcggtgcgcatcaatctctgtgaacaactggacgggccgctggaaggttttggttcgcgtttctggtcgttagtcacgcaacagcacgctggctggaagcaggcatttacccgccacaaagagataacgcatgttgagtacagcgatcgttatcttaatagcccattcacggcgcgtttgttaggtgaaatcttaaccgagctggttgaacagggaatggcggaacgcgccagcctcactgtttgcgtcaaaaaattggattacaactctcgccaacacgacgctctctataacgcgtggcttaatgaggaagatcgtcagcaggttgtgaccactttacttgaagaaggatatctggggcctgcgtggccgggagcaattagctggttaacgggggataaccagagtacggagcatggacgagaactgacagtcaccttcagcgatggcagtcagcattatgtcctgctcgacatggggcttagctactggcgctgtattgaagataccttctttgattttgccctgcgagtaccgcagcaagttgaacggctggcaaacacgcgagcgcgagctgttgccccgggtaatgaccttaggagttatattatcgctggataa

SEQ ID NO: 28603 - DNA, 2937 bp, Escherichia coli; identical to SEQ ID NO: 28445

SEQ ID NO: 28604 - DNA, 6273 bp, Escherichia coli
atgggcgttaccaacccgcagctgcgtgaacatctcgcgcaacaaatgggggctgattgtgggaaaccgggctcattccttgcttctccggtattccagcaaatgtttggctggaaggagtcaaaccacacgatgcgcagcctgacggaaggcaacgcattgttgagcaaagcagtggttgattcactggatgatcagaataatggccggtaccggtttggtgctgactggaggccttttacgcaccagttagccagttggaaagctttgctggaaaagaaacattcagtggtggtaaccagtggtacgggttcaggtaaaacggaatgttttatggtaccggtgctggaagatctttaccgggaactgcatgaaaatggcaacaatccgttggtcggtgtccgagccctttttctctatccattgaacgccctgattaattcacagcgcgagcgtctggatgcctggacgcgtggttttggtacagggatccgctactgcctttacaacggcaacaccgaaaacctacacgcttcggtaaaaagcgaacaggcaaaaaggccgaatgaggtgctctcgcgcgaaaaaatgcgtgaagaacctgcgccgattctggtgaccaacggcacgatgctggaatatatgatggttcgccaggtcgacgccccgattatccagcaatctaaagcacaaaaatcactacgctggattgtactggatgaagcgcatacctatgtagggtcgcaggccgctgaactggcgctccagctgcgtcgtgtgatgaccgcgtttggcgtgacaccagatgacgtgcgctttgtcgcgacctctgcgaccattgccggcagcgacgctgaaaagcagctgaaaaaatttctctctgaattatccggtatcccgcaggagcgcatcgatgttctggacggaagtcgggtgattcctgaactggaaccatccaaaaacgtttctgttccgttagacgagatagagcaaatacctgatctggatctaagagataaaaatgataataaaattaaagggataagtcctgagcgcttttatgcgcttacgcattcccccgaagcgcgttacatacgtgagatgttggtcaaacagcccaatccgatgaagctggatgagataacagagcggttacacgtgctgacaaaacagcattacagccagcaggaagtactgcgttggatcgatgtctgttcagggactcaacctaatgcaaaggatcccgcatttcttaaagtcagggcgcatatcttccagcgtaatacccagggaatatgggcttgtgttgataaagattgcagattaaagcacggtacaccgctcgacaaaggctggccctttggctatgtgtatgtgaaccagcgacaaaattgtgactgtggaagccctgtatacgaagttgcattctgtaatgattgtaatgagcctcatcttctggcacgggacaaaaagggcaaactagtccagtgggaaaataaaggtggcgatgaattctctttgcaggatgaagtacctgttgaacatgacgctacagaagaaaaagtcgaaaaagagaacagttttcagcctccgttgattattgccgcaggagagaccagcgaggcaggttataccctacaacgcctcgaccgtcagacgcgccgtattggcgttattaacaatgacagcattccgctgattattaatgatattgaacaggtttgtagtgccagtggctgtggctacagaggcatgagtgggaaacagcccttccggcgtgcactattaggtgggccattttacgttactaatatcgtgcccaccgttctagagtattgtcaggactttaccagtgatgaaggcaaagagggcgtcggaccagattcgttgccaggacgaggtcgtcgactcatcacctttacagacagtcgacaagggacagcccgaatggcggtgcgtatgcagcaagaagcagaacgcagtcgcttacgcggaagcgtagtcgaaattctcagctggcatcaaaggacgcaaacgtctacagcgccgaatgccaatgccgatctggaaaaattagcggccagggcgaagcaagcccgtgagcaggcagaagaatatcgaagctggggaatgccagaccaggcgaaattgtcacaagcacaggctgaacagcttgaacaggcttatcaggctgcaaccggtgggaaagctgcgactatcctggtatcccgaacctggacggagatggttaacgagcttaaagagagagccgatatccgcgggccggttctgcaatataaccattatcttaagcctgaagtgtttaatgaaaacggcggcccccttaagctttctgaaatgttgttgttccgggaattcatgcgtcgccctaaacggactaacagcctggaaacacaggggctggttcaggttggttaccaggggctggagaaaatacataagagccccttgcactggcaggaaaaaggattaacgctggatgactggcgcgattttctcaaggttacgttggatcattacgttcgcgagagcaacttcacacagctggatgatgagctgaaaaactggattggtagccgtttttcatcaaaattcgtccgtaacccggaatcaaaagatcctgaagataatcagaacagacgctggcctcaaattcgtaatggcaacgtatcccatcgtttagcgaagttgctgatgctgggggctggattcaaaaccgtcaatgcggcaactattgatattatcaatacatggctgaaagaagcatgggcccaacttaccggaccgcttgcagtactgaaacccgatggcaaccgtttttatttaccgaaagagcatatgactttttctttaatcacggatgcctggatttgcccggtaaccaataaaatcctggatacggcttttaaaggcttaaccccttatctgcctacccatatttcgttcgagcatcttaccctggcgcaatatgacacttttgtcgcgcagaaagtcacaatgccggaaatctggaagctggatcgttcacaggaagactacgcagagggtctggcaaaagcacgcgactgggtcagccatgatccgctgatcgcacaattgcggtcggaaaacgtctggacagacattaacgatcgtgtcgtggaaggcggcttctactatcgtactgccgagcactctgcccagcagtcgtcagaacgtctgcaaagctatgaaaagatgttcaagaatgggcaactaaatgttctcaactgttccaccaccatggaaatgggggttgatatcgggggtattactgcggtggtaatgaacaacgtaccgccacatccggccaactatttacagcgcgccgggcgagccgggcgtagtaaagaatcacgcgcgatctcttacaccctatgtaaaggtaacccacacgaccagcaggtttttgccaacccgctctggccatttgaaaccatgatcccggcacccatggtcgcgatgaactccgcccgactggtgcaacgtcacgtcaatgcattattactgtccgactttttatgtaacgttattggcgaaaccgataaagaaaaaaccagcctcgatagcctctggtttttcggtgaagatgacgggcagtcaaaatgcgaacgctttaaaatctggctggaacgtccggttcttgatatcgacacggcgctggaacggctggtgaaaggtacggcgttgcatggtgcaagagccgaatatctgcgggataaaacaatcaacgcgatcaccttcctgcaacagcggtggctctccgtttatcgcgatctcgtgacacaggagcgtgagtcgcagccgcaaacgccttatcgtaagcgcatagagctggagaagaaacggcactgtggcgagtatctgctgcgcgatctggctgccagaaccttcctgccgggatacggtttcccgacagatgtagtgacgtttgataacttcacgatggaagattatatccgcgaaaaatcgcagaaaagtcgtgataaaaaggaccgtgaagataacgtttcccgttataaaggattaccttcccgtaacctcggtgttgccattcgtgaatatgcaccgggagcagagatcatccttgatggccgtgtcttccgctctgccggtgtctcactgcactggcacaacattaatgctgataccaatgaagcccagcgtctggattgcgcctggcgctgtcacaaatgcgggaccattggctatgaagaggggatgagcagttccgggatgctcttttgctccaatagcgcctgcggcgaaaaaataatcatggataatcgccgtcaggtgctgcagcctgccgggtttgtcaccgatgcacacgctccggtaacgaacaatattgaaaccatgaaattcgtcccggttgtccccgcgtgggtctttgttaaagcagagcccgtaccgttgcctaacccgctaatgggttatatggcttctggggctgatgggcatgttttccagcaaagtttgggggaaggtggacacggttatgcattgtgtctgagctgtggccgtgctgagtcgatgctgaatgaaaatgatgcgccgaaaagtatggaagctcactatccaccgcgtccgggtaaagcggatcgcgacagccagaatcatcgtctgatttgccccggttcgacggcactcatgaagaatgtcaccctgggcgcactggcgcgtaccgatgtctttgaaatggttctgcgcaaaccgcaaaacggcgagtatctgccagataacacagaggaggggcggattgttgccatgactctggcggttgctctgcgtcaggcgctggcgggcgttctgggtatctccgccgcagaactcggctattctgtacgtccggtcagactggaggatgggcaatcggtattagccgtacagctttatgatgtgatcagcggtggtgcaggttttgcctccagcgcaccggtacacattgaagctatattgcagggaatggtgaaacagttaggctgccgccattgtgagactgcatgtagtgaatgcctgcttgattcccagactcgccacgatcacgatttgctggatcgcaaagcggcgctggcctggcttggcgatgacttcacgtattacatcggtttaccggatgaagagacattctcgctgccggatgcccgctactgccctggcgccattggcgatacgattcgccgggcgattaacgaaggcgctgaaaagctcaccctgtggatgaccggcgcgcccaatgagtgggatttatacgcacgtcagttccgcgcggcggttcagaactatcggctaaaagacaacgtcgaggtcgatcttgttattcctacgggagtggatgacccggacctgttgcatgaactatcgcaatttactgcgctgggtgtgcggctgtgccatgttgaacaggatctgcaattaccgatcgttgcccaggtcacctttaccgatcgcgtgatgacgctggcctctcgcagccagcaggcaacgattccggggccggagtggcacctgaatgacgaactggtggtgcgtagtctcggttataaaacggtagaactgaacgagtttattctgccggctaaagccaccaacgctgtcgagcgggtcaaagacattcagatccacaaacagttgaatggaccactgtcgcagtttgggcaacgcttctgggacgtgctgtttaacgaccatgaagaagcgcagtcactgatgaataacacgcgaattaccggcgttcactataccgatcgctatctgcaaaacccggttgcgctggcgttgttgggatcaattctgagaccgctaaaaacaaagctgaccgatggcgctgaagtgacgctggatacgctatttaaagataaagatcgccccggtaaccggcctttccatgactggatgagcatagcggattttcaggatttcgctgatcagtggtttgctgctgcgctgggcaggccggtagaactgacggtgttcgactcgccgcgcgatatccctcaccatcgtaaactgacggtgacttttgaggatggtcaggtattgaagatccgcttcgatcaggggatgggctactggcgcatcaacttttcatcgcaatggcattactttgatttccgcgatgacgtttctttccagttagtcaaaatggctcaggcctgcaaggaagggaatgtcgccaacagcgaagagagttgggcaacggatgtgctggtggaggtgatcgcctcctga

SEQ ID NO: 28605 - DNA, 3339 bp, Escherichia coli
atgttgtggggttttgtttttgtatcttttatctctaaggagcttgctttgggtcaatcagaatacatttcatgggtaaaatgtacttcctggctaagtaactttgtgaatcttagagggttgagacaaccggatggccgtcctctttatgaatatcatgcaaccaatgatgaatatacccaattaacgcagctactccgtgcagtcggtcaatcacaatctaatatatgtaatagggactttgctgcctgttttgttcttttttgctctgagtggtaccgcagggattatgaacggcaatgcggatggacgtgggaccctatatataaaaaaatagggatttcattcaccgccacagagcttggtactatcgtaccgaaagggatggaagattactggctgcgcccaattcgattttatgaatctgaacgacgcaattttctcggaacattattcagtgaaggtggtttacctttccggctactcaaagaatcagacagtcgctttctggctgttttctccaggatccttggacaatatgagcaagcaaagcagtcaggtttttctgccctttcgctggcaagagctgtcatagaaaaatcagcgctgccaactgtttttagcgaagatacctctgtagaacttatcagtcatatggctgataacctcaattccttagtacttactcacaacctaataaatcacaaagaaccagtacaacagcttgagaaggttcaccctacctggcgaagcgagtttccaataccgttagatgatgaaacaggaacgcattttttgaatggactgctatgcgcagcctctgtagaggctaagcctcgactacaaaaaaataagagtacgcgttgccaattctattggtcagaaaagcatccagatgagcttagggtgatagtatctcttccggacgaagtttcctttcctgtaacaagcgagccgtcaactacgcgctttgaacttgccatttgtgaagatggtgaggaagtctctggccttgggccagcctatgcttctctggaaaacagacaggcaacagttcgattacgtaaaagcgaagtgagatttggcaggcaaaatccatcggcaggtttgtcgttagtggctcgtgctggagggatgattgttgggagcattaaacttgatgacagtgaaattgccattggtgaggtgccgttaaccttcatcgttgatgcagatcaatggctgttacagggacaggcttcttgcagtgtgcgaagcagcgatgttctgattgtgctccctcgggataatagcaatgttgctggttttgatggccaatcgagggcagtaaacgtattaggactaaaagcactacctgtgaagggatgtcaggacgttacagttacagcaaatgaaacttatcggattcgcaccggaagagaacaaatcagcatcggaaggtttgctctaaatggaaagcgtgcaagctgggtttgtcatccagatgaaacatttattggtgtaccaaaagtcatttctacactaccggatattcaaagcattgatgtaacgcgttacctgagcggaatttcaattgagcaatgtcatatacaagagatgctgggggctcaatatctttctatccgtaatagtaagaatgaaacgctcttgcgtcgcaaaatcggtattttgcctgctgatttcagtattgagataaaaggtggaatacacgcaaatgaaggcactatcgtaatcaccacacagcatccttgtgtagcaaaacttaaagataaaacattggaggctacacgtaagcgtactgaggggcgaacagagatacaactcaaagcggaaggggtacctccggcatttattacattacaagttctgcctaatttggcggctgaccccatcgatattgagttaccttttcccgctaaaggctgtctcgctcttgatgtaaacggacgtcctctggataaaaacattacgctgcatgatctgctgggttccagagcgtttctgttctccagaaatggcgagccgacaagatatacattgcagttgcatttgcgctccgttagtggattacaggcatggcacgaatggtgttatacggcgttgagcgatcgtcctgttgaattgaatctctatagtctgcgcgaacatattgagaacctgatttcacttgaggcaggtattgaccaggttgttgagatgcgtattacgggggcgggtgtggtcatggcctggcaaattcgtcgctataaatacagtctgcgctatgattatgaaaaagaactattactcagccagtcagtgaaccatcgtgctggacagattccttcccccgttatcatgctgttaagtgaacccgagaggaaatccatccccttagcatcaagaatgagcgagggagtgcctgtcggtgaatatgagttgagctcaatcgttaacaaaaatggaccgtggttggttgtccctaaaccgggtgaagagatggcttttcgtccctgcttcattcgtggcgaatcttcgttaccggtagaagaaagcaacatccgctcattgcagaaagcgacccagctttttaatccacaggcagaagttaataccatcacactggttctcggacagatggctaacgatcctgcccattccggctggcaatttatgcgtagcctgtacgatcaatttggttatttaccactggcaacctttgaagtatggcgtgcactggtgcagcatccgcaggcattggcaatgtcgctcttcaaatttgaaatgtcagcagagtacctgagtcgtattgagaatgagttccctattctatgggagtttttccccatctttgagatcaaagcggcatctgagcgtttcaaattgttcctgagccaaaaaggtgcaccggaggaaacccagaaattactggttactaatatgtttcaacggctggggctcgtgttcccgacatatgccgatgaaattgagaaatggttaagtaacggacatctccccccgtctattcctgagtcttttgtccacgtgtggtatcaggagcttttacgtgagcatagtgaagctcaatggccagagtacggcagcaagcggctgcatagctggatggcatcacaaaaaaatccagtgattggtattaatcctgacgcaaatcaccgctattccgtggccttgttacccgtcttcgctgcagctgtggcaagcggaaatgcttcttttgaatctgtatttgaccgtaaacccggtgccgtatttttcctgaggcaagtcagggatttcgattcccgctggtttaaggccatcttccagtgcagcctgttgcgttatgttgctaaaaaataa

SEQ ID NO: 28606 - DNA, 6315 bp, Escherichia coli
atggacgttcagcaactgcattatgcgccacttctaaatcagcttcatcagcgcgcggtgaggtcggtggtaagtcagttggcattgcggagcaagtcgttgactcattatctggaatcacaatatttccagcctcccggtcaggaggggtcactgcttgcagacccggtattcgaaagcacgttcggctggatgcctgcggatgaaacaatggaggatttgcgggacaagctaatttccagcccgctggttgatgcattgagcaaagcgccggtgccatttcgtcatcaacttacggcgtggcgaacgattctggaagacaaaaaatccttgttagtgagcagcggtacgggatccgggaaaacagaatgctttatggtaccggttctggaagatcttattcgtcagcaaaaatcgacccgtcagtcactaacagggacacaagctattttcttgtatccgttaaatgcattaattaacagccaacaggagcggcttcgcgaatggacgcgcggatttaaggggaaaatacgcttcgcgctatataatggcgaaacccggcataccaaatacgaagtgcaggaagatcagttgaaagtacctgaacaagctttgagtcgggaagccatatacgaagcaccaccttccatcatggtgacgaataccaccatgctggaatatatgctgattcgtcgtaaagatgccccaatcatcgaaaagtctcaggggatgttaaagtatatcgtcctggatgaagcccatagttatattggttctcaggctgctgagttagcgctgcttttacgtcgtgttatgcaggctttcaatgttggacctggcacagataaacctgtgcagattatcgcgacctctgccactattggtgaagactctcctgaaggtaataaggagcttgctaaatttgtcgctgatcttgcgggcgttacagaacgtgatgtcaaagtggttcgcggctatcgacaaataccgcgggtatcggagtcgctgattcgtcatgaatatcccacatctttaacttctcttaaatctttgagccctcaggatctttaccaacagctttgtcattaccgtgtggcccagcaattgcgtcaggcgttaactcatcccggacggcaggcagtacgtttgagtgagttgctcaatgttgccagaagaacctggccagatattaatcaccgtgagttactgcaactcctcgacctaatggcgagatcgcgagaaggtgaactggcttttacgccattacgtatgcatgggtttatcagaacactggcgggtctatgggcatgttcaaacaaacaatgctcacataaagcgcatgaattaaatcagagtgactggccatttggtcaggtatggtttgagcagcgccaatattgtgactgtggtgcgccggtatttgaagttttacgttgctccgggtgtggttcagcttatttgtctgccaaagaggaggtgcgcggtgatggaacgaactggttggtagcgcaacccgccgctgccgaagtggatgaatttgctcttgatgtagatgtttattctgaagatgaagacaacgacgaattagacaataactctcaatttgatcgtctgattgcgagcgatggtgaaaaatatatcatttctctggaagaaacgacggcggggacaattgatagtgaagcgcaaaagcactatgaaataaacctgttaagaccggaatctcgaggtgagggacgtaataattcctttgcttgtgtttgctgtggtgacacccaacgaaaaaataatcctttattccgtccgcttcgacttggcgcgcccttttttttaaatgaaattattcctactctgctggagttttcaccattaccgcaaacaagagaagagcagttaggaccgtttaatggtcgacgcttgctcacctttacggattcgcgtcagggtaccgctcgcatttcagcccgcttacagcaggatgccgataaagcgacgttgcgagctctttgttaccaggagttggcaaatattaatgagccatcagcaaagctcagcccggcacactgcgcattgttagagagttttattacccagttttctatccttcctttaaaaaactctattgacgcgctgaaaaaagcgatggttgctaatgaagagcttagcccggcggacattcaggcacttaaaattatcgagccgatggtgagttccttaagcccggatcatgctgaagcgatgcaaatactcctggctaactctggcaatcagcagaagaaaaccatgtcatggcaaacactgtctgaacagctggttggcagtgtggaccttgccgatagaatgagaggcagttttaaagaattgtctgggcttgatcttactaaacaacagtttgcagatttttgtttatacagtgagtttggtcgccgccctaaaaatgcctggaccctcgaaagtctgggtctggtagccattcactatccatttattgataaagttacaacctgcccgcaggactggaagacattattacccgatcccgataagcaattagcggaatggcgtaatttattgaagattactcttgatttctttatacgtgaaaacagtgccgttttttacgaaaacgagcaataccctcgctggatgggggctcgtttcccggtaaaaatgctccagggtccagataaaaaaaacaaagggcagaaacgtgatcaactttggccacaaatacgcgatcgccattataaccgggtcattaggctattaattgcagtctttccggcaatacaacctgagcaggctcactggaaatcgttagttaaccacttaatgattgaggtctgggatgcaattcgaccctgcttacgtcagtttgagtcgggttatcagctggatattaaacaacaagctgaattttacagtccaaagcaagtgtggcgttgcccctatactcgacgtgcgttagacgtcacgttactgggatactctccgtatttgccgggtagcaaagaaattgcacctgaaaaagcagtgttgattgaaatgcctgagcttcctgtacgtcactggcgtttgtctggtggtggagaaatcgcccgagaagaacgtctggagtggctggaaagtaatgcgctgattcaacatgcccgcgaggaaggattatggtctactcgcagcgaccgactggccctgaaagatagctggtatcgtctggaggaacactccgcgcagagaacgcctgagcagaaccagtttaatgaaaaacaatttaagtcaggcaaagttaatgtgctgaactgctccacgaccatggagatgggggtggacattggtggtatgagtttggtggcaatgaacaacgttcctccagctccggcaaattatttgcagcgtgcaggccgcgcgggtcgacgtggagagagtgcatctgctgccattacgttatgtaaaaacacggcgcatggaatggaggtattcaaagaccccctctgggcgttcaacactactgccagtgcgccacgggttcgttttgggagcagcagtattgttcaacgacatgttaatgccctggttttaggtctgtttttacgagctgaagttcatgatgcgacaaaactgagttgcaaatggttctttgaaggtgatgagagccagtgtcttcgttttctccattggttaaataaccaggccgatcagctagcggataaacttaaacgccttactcagggaaccgtcctgatgtcattgacggcaacccagctcttgacccgcacacaagcaatgatgcagcaggttgatatccgctggagaagccaacttgcgatactgttggaaaatatcgaagcgttgaaggcggataacagcgcgtgggaagaaacgccagcaggtaaagccatcgcttatcagcttcgtgattatcgcggtgcatatctgttttctaaactcattagtgaagcgttcctgccggggcatggtttcccggttggcgtcgtcaatttcaattatctgacggcagatgagctggaaaaacgtcgcgcaataaaagctactcaggctgaccctaatgaagggggagaaagcttttctcgtcgtattgaaaaattgcccagccgtgatttgcctacagcattacgcgagtatgctccaggtgcagatgtggtattgggcggaaaagtatatcgttcctcgggcattatgcttggcaaggtacttgccagcgggcaggagctgtcaggcgatcatcatattccgtggttctggcattgtcgtaaatgtggtgcgggggcaaccagtactacccgtcctgtcgaatgtagtcactgcaaagcggatatacagcaacttgatgtgaagcgttatttacagcctgttggttttgcgacagatattcgttatcaggcgcataatgatgtatccatgcctgcacaacttccctggaaagatccacgtgttcttgtaccgtcttcggtgtgggtttctttacccgatgctgggctaggacgttaccgttttagccatagtggggaattgttccacttcagtgaaggggaatttgggcacggctacgcaatttgcctctcatgtggtcgggcagaatctcaaactcaaccccagcgtacccctgaaaatctaaagaacccagagagggaaaatacgcattacctgttgcgagggggcagtaacgatcgtcaggggagcaataaattgtgccacggtcatgtgcataaagatctgtggttggggtatagcagtcgtacagatatggttgagctgcaacttaatgatgataatggcctgttgatccgtgatgaggttgccgcgcgatcccttgcggtcgctttgcgtgaagggttagcgcataaattgggtatcgaaaatactgagctgggcgtgacgacgcagcaagcgcgcgatatcaatggctataccggatattccatcttcatttacgacaataatgcgggtggtgcaggttatgcagtgcaattgatcgaccattgggctgatgtctttaattacgccagaaaattgctcgattgcagttgcgataaattctgtcaccactgcttgctcagctacgacagtcagcattatgtcaacagattagatcgtcaccatgcattaaccctgcttaccaatgtacggttgcagcgacttaacctcgcgccagaatatcagtacttcggcgatggtagccgggttgaaactaacccgctgagtttacgtattgcgcaatgcctgaacagcgagatttatgactcctgctcgctggttcttgcggggccgcaggaacagtgggattttgcccaatggccattatttaaagagttgctccagtttgcctcctccggtgggcatgttgagttgctggtggccacgccgttggcaaacttaactgatagctccagacatcagctttccgcgttggcggcgatgccgggagggcgcttacaagtgaaatccattgccactgcgcaactcatgcaaggaaaggggcgctggcttgcgcaggtgactcgcgaagaacaaagccaacagtgggccgcagacgacagcgctaccgttgcacctggtgaattatggggacaaagtgcgtcctcaccagtagtgacacttaaaggaacgtccggaaaaaccttctcgggtcagaccttaagtgcagaagatttactgcccgccttacccaccggggcggtgcgcatcaatctctgcgaacaactggacgggccgctggaagggtttggttcgcgtttctggtcgttagtcacgcaacagcacgctggctggaagcaggcatttacccgccacaaagagataacgcatgttgagtacagcgatcgttatcttaatagcccattcacggcgcgtttgttaggtgaaatcttaaccgagctggttgaacagggaatggcggaacgcgccagcctcactgtttgcgtcaaaaaattggattacaactctcgccaacacgacgctctctataacgcgtggcttaatgaggaagatcgtcagcaggttgtgaccactttacttgaagaaggatatctggggcctgcgtggccgggagcaattagctggttaacgggggataaccagagtacggagcatggacgagaactgacagtcaccttcagcgatggcagtcagcattatgtcctgctcgacatggggcttagctactggcgctgtattgaagacaccttctttgattttgctctgcgagtaccgcagcaagttgaacggctggcaaacacgcgagcgcgagctgttgccccgggtaatgaccttaggagttatattatcgctggataa

SEQ ID NO: 28607 - DNA, 2937 bp, Escherichia coli
atgattgaaaatgagagcggttatttgattacctatttcagaaggatatatcaggcgcttcgtgggcaagcatctcaatatcctgccgctaaaattgcacaagaattaggcgatacgattcctgtcacaatgcaaaacgaactggtctatgaaatagccggtgaattctgcgagactctctgccgattacttagtgagcatccacctcaaagcagtgatcccgtttctgcattacgtaagctctctccagactggcatcttcaacttccactcgttctccccgaagcgaatgctgcagagattgtaaggcgattactttctcaatcttctgaaatacgcagtgcaagtagtcttcaggttgaaagaatctgggtcgatgttgatgacagttggtattgtgatgcccggttccgattcccggccacaatgcgtacagaacagttaacctctttgtttgaatgcaatattcagccggagcagacccgactcatcatttcaggaaaatggagaaatggcggggcaaggttggcaatgctaagccgttatgagcagcaagattggcgggtcgagttattacctattgcgatgcaaaagctctctggtgcagatgcaatggccgaaatctcgttgtcgcttcatgaaggtccaattctgttaggccacacaattccaaaaggcggttatgaacttactgaagaactcccctgggtttttgaagcgatgaatgagagtgaatcgcagctaaaacttgtcggtatggggtctgtgagttccaggctaaatgctctgtttatttcgctaccgaaaaatagccatttagatattagtggagaaggtgagtttgatatcccaaggttgctgaaaaacagtgaacgcagcttaactaaaataagtggagtatttagcgttgttttacatgatggtgcagtttgtacaattcgtacccagcaactttatgattctgcgattgaatattatattaaatcgacagaagttgaactggttaaatcggattatcctgtccatcgagcctggccgaagatcggttggaaaaaggatctgcaatatggcattgtaccggagaaagaacttttttggcgttccattcgttcaggtaacaatgcctggtattctgtctcatcagaaatgccaaaaggacagatagaagtcagacgaatagttaatgatgaggttttatttagcggtaaagttgtagttttaccagcagacttcgatattaatattatacctgagagtgctcagcaaggcatcataatgctttctggtataacggatactagaattgacaaatattcaaacaatgaaaaagtaacacttaagtccgattattcacaaaacgagtgtgctatttattataattcatcggagatgctggaaaataccgttgatttacgggtctcctggaaagatggttctaatcttaaactattattacctaagccggttagcggtggccgatttgtaactcatgatggttctgttcattttgatggtgtggcatctatagcgcatttgcatggaatagatgctgagttgttaaccatatcttgtgctggaagaggatatcttaatatcgagttgttggatgaaaatccagtagctgaaaaattccgttatttacatgccgaccttcctcttttatcaggatgcaatgacaaattaaaacaaatttcactttatgagaactataatttgataaatgctatgctggcatgtgcatggaacagcaatagtacattaagtgttgatttttactctgacagatttggaaaggataaagcaacactcagtattaaacgctacgatggtagttttattgaacacgatcaagggttactggttgatataaaaaattctgttgtttttcctgcaaatagaatagacgaactggttgttgatgctatttctcttaaggatcctggcttacacatatcgttgctaaaaaaagatgaatttgcttatgaactttcagctctgaatgttcaggatagcccatggttaattgtgggaaaacttgatggtatagctcgcattgcaccagtaattaaatgggtgctacctgtattacagacaaatgatttattactaaatgctttatgcgaagcggattccgaacagcgaaaaaaatattttaatgagctaatttttgaaatagataacaatcctttgcaaaattattgctgtttattaacggagtatattaagaaatacaaaatgaataatggcttatccttgctggatctggatttgttcagaggtatttcgagtaattaccgcgtagttgttcagttgttaatatcatcatgtctttctggtgatagcgatacgatttatgatatacaggaagaattacccttttcatggggatggattcccgtttcaatctggaaagatgtttttcaaaagtgttggacttatctggaaaaacagattaacgataaaacattagcattacatatattgcaaccctttattgcttttatgaaccatcgtgcacatatcgatcgtcgtctggctcccattgcgaatatgttacttacatatagcgaactcctaccagccggttgtaatgtcttgccaactgttagtcgtgagcagtttaatgaagctaaacagatgctattaaggaaccccgacagctttgggcgtatcagtatcttccctaaagaactttggtctagtgctattactccagagttaaaatctgtttttaataagctttggattgaagataaatatcactcacggcttgaaaaacgttttaatttgatgttagtcgcagcgctgttaacccaaaaagataataacttgatacatcaactgtctgcgctttttgaattccactatcagcaagccccgcagcaattaggggtaatctatcaatattattttgaacaagcaggagtatgtcattga

SEQ ID NO: 28608 - DNA, 6315 bp, Escherichia coli
atggacgttcagcaactgcattatgcgccacttctaaatcagcttcatcagcgtgcggtgaggtcggtggtaagtcagttggcattgcggagcaagtcgttgactcattatctggaatcacaatattttcagcctcccggtcaggaggggtcactgcttgcagacccggtattcgaaagtacattcggctggatgcctgcggatgaaacaatggaggatttgcgggacaagctgatctccagcccgctggttgatgcattgagcaaagcgccagtgccatttcgtcatcaactcactgcgtggcgaacaattctggaagacaaaaaatccttgttagtgagcagcggtacgggatccgggaaaacagaatgctttatggtaccggttctggaagatcttattcgtcagcaaaaatcgacccgtcagtcactaacagggacacaagctattttcttgtatccgttaaatgcattaattaacagccaacaggagcggcttcgcgaatggacgcgcggatttaaggggaaaatacgcttcgcgctatataatggcgaaacccggcataccaaatacgaagttcaggaagatcagttgaaagtacctgaacaagctttgagtcgggaagccatttacgaagcaccaccttccatcatggtgacgaataccaccatgctggaatatatgctgattcgtcgtaaagatgccccaatcatcgaaaagtctcaggggatgttaaagtatatcgtcctggatgaagcccatagttatattggttctcaggctgctgagttagcgctgcttttacgtcgtgttatgcaggctttcaatgttggacctggcacagataaacctgtgcagattatcacgacctctgccactattggtgaagactctcctgaaggtaataaggagcttgctaaatttgtcgctgatcttgcgggcgttacagaacgtgatgtcaaagtggttcgcggctatcgacaaataccgcgggtatcggagtcgctgattcgtcatgaataccccacatctttaacttctcttaaatctctgagccctcaggatctttaccaacagctttgtcattaccgtgtggcccagcaattgcgtcaggcgttaactcatcccggacggcaggcagtacgtttgagtgagttgctcaatgttgccagaagaacctggccagatattaatcaccgtgagctactgcaactcctcgatctaatggcaagatcgcgagaaggtgaactggcttttacgccattacgtatgcatggatttatcagaacactggcgggtctatgggcatgttcaaacaaacaatgctcacataaagcacatgaattaaatcagagtgactggccatttggtcaggtatggtttgagcagcgccaatattgtgactgtggtgcgccggtatttgaagttttacgttgctccgggtgtggttcagcttatttgtctgccaaagaggaggtgcgcggtgatggaacgaactggttggtagcgcaacccgccgctgccgaagtggatgaatttgctcttgatgtagatgtttattctgaagatgaagacaacgacgaattagacaataactctcaatttgatcgtctgattgcgatcgatggtgaaaaatatatcatttctctggaagaaacgacggcggggaaaattgatagtgaagcgcaaaagcactatgaaataaacctgttaagaccggaatctcgaggtgagggacgtaataattcctttgcttgtgtttgctgtggtgacacccaacgaaaaaataatcctttattccgtccgcttcgacttggcgcgcccttttttttaaatgaaattattcctactctgctggagttttcaccattaccgcagacaagagaagagcagttaggaccgtttaatggtcgacgtctgctcacctttacggattcacgtcagggcactgcccgcatttctgcccgcttacagcaggatgccgataaagcgacgttgcgagctctttgctaccaggagttggccaatattaatgagccatcagcaaagctcagcccggcacactgcgcattgttagagagttttattgcccagttttctatccttcctttaaaaaactctattgacgcgctgaaaaaagcgatggttgctaatgaagagcttagcccggcggacattcaggcacttaaaattatcgagccgatggtgagttccttaagcccggatcatgctgaagcgatgcaaatactccaggctaactctggcaatcagcagaagaaaaccatgtcatggcaaacactgtctgaacagctggttggcagtgtggaccttgccgatagaatgagaggcagttttaaagaattgtctgggcttgatcttactaaacaacagtttgcagatttttgtttatacagtgaatttggtcgccgccctaaaaatgcctggaccctcgaaagtctgggtctggtagccattcactatccatttattgataaagttacaacctgcccgcaggactggaagacattattacccgatcccgataagcaattagcggaatggcgtaatttattgaagattactcttgatttctttatacgtgaaaacagtgccgttttttacgaaaacgagcaataccctcgctggatgggggctcgtttcccggtaaaaatgctccagggtccagataaaaaaaacaaagggcagaaacgtgatcaactttggccacaaatacgcgatcgccattataaccgggtcattaagctattaattgcagtctttccggcaatacaacctgagcaggctcactggaaatcgttagttaaccacttaatgattgaggtctgggatgcaattcgaccctgcttacgtcagtttgagtcgggttatcagctggatattaaacaacaagctgaattttacagtccaaagcaagtgtggcgttgcccctatactcgacgtgcgttagacgtcacgttactgggatactctccgtatttaccgggtagcaaagaaattgcacctgaaaaagcagtgttgattgaaatgcctgagcttcctgtacgtcactggcgtttgtctggtggtggagaaatcgcccgagaagaacgtctggagtggctggaaagtaatgcgctgattcaacatgcccgcgaggaaggattatggtctactcgcagcgaccgactggccctgaaagatagctggtatcgtctggaggaacactctgcgcagagaacgcctgagcagaaccagtttaatgaaaaacaatttaagtcaggcaaagttaatgtgctgaactgctccacgaccatggagatgggggtggacattggtggtatgagtttggtggcaatgaacaacgttcctccagctccggcaaattatttgcagcgtgcaggccgcgcgggtcgacgtggagagagtgcatctgctgccattacgttatgtaaaaacacggcgcatggaatggaggtattcaaagaccccctctgggcgttcaacactactgccagtgcgccacgggttcgttttgggagcagcagtattgttcaacgacatgttaatgccctggttttaggtctgtttttacgagctgaagttcctgatgcgacaaaactgagttgcaaatggttctttgaaggtgatgagagccagtgtcttcgttttctccattggttaaataaccaggccgatcagctggcggataaacttaaacgccttactcagggaaccgtcctgatgtcattgacggcaacccagctcttgacccgcacacaagcaatgatgcagcaggttgatatccgctggagaagccaacttgcgatactgttggaaaatatcgaagcgttgaaagcggataacagcgcgtgggaagaaacgccagcaggtaaagccatcgcttatcagcttcgtgattatcgcggtgcatatctgttttctaaactcattagtgaagcgttcctgccggggcatggtttcccggttggtgtcgtcaatttcaattatctgacggcagatgagctggaaaaacgtcgcgcaataaaagctactcaggctgaccctaatgaagggggagaaagcttttctcgtcgtattgaaaaattgcccagccgtgatctacctacagcattacgcgagtatgcgcctggtgcagatgtggtattgggcggaaaagtatatcgttcctcgggcattatgcttggcaaggtacttgccagcgggcaggagctgtcaggcgatcatcatattccgtggttctggcattgccgtaaatgtggtgcgggggcaaccagtgctacccatcctgtcgaatgtagtcactgcaaagcggatatacagcaacttgatgtgaagcgttatttacagcctgttggttttgcgacagatattcgttatcaggcacataatgatgtatccatgcctgcacaacttccctggaaagatccacgtgttcttgtaccgtcttcggtgtgggtttctttacccgatgctgggctaggacgttaccgttttagccatagtggggaattgttccacttcagtgaaggggaatttgggcacggctacgcaatttgcctctcatgtggtcgggccgaatctcaaactcaaccccagcgtacccctgaaaatctaaagaacccagagcgggaaaatacgcattacctgttgcgagggggcagtaacgatcgtcaggggagcaataaattgtgccacggtcatgtgcataaagatctgtggttggggtatagcagtcgtacagatatggttgagctgcaactcaatgatgataatggcctgttgatccgtgatgaggttgccgcgcgttcccttgcggtcgctttgcgtgaagggttagcgcataaattgggtatcgaaaatactgagctgggcgtgacgacgcagcaagcgcgcgatatcaatggctataccggatattccatcttcatttacgacaataatgcgggtggtgcaggttatgcagtgcaattgatcgaccattgggctgatgtctttaattacgccagaaaattgctcgattgcagttgcgataaattctgtcaccactgcttgctcagctacgacagtcagcattatgtcaacagattagatcgtcaccatgcattaaccctgcttaccaatgtacggttgcagcgacttaacctcgcgccagaatatcagtacttcgtcgatggtagccgggttgaaactaaccctctgagtttacgtattgcgcaatgcctgaacagcgagatttatgactcctgctcgctggttcttgcggggccgcaggaacagtgggactttgcccaatggccattatttaaagagttgctccagtttgcctcctccggtgggaatgttgagttgctggtggccacgccgctggaaaacttaactgatagctccagacatcagctttccgcgttggcggcgatgccgggaggacgcttacaagtgaaatccattgccactgcgcaactcatgcaaggaaaggggcgctggcttgcgcaggtgactcgcgaagggcaaagccaacagtgggccgcagacgactgcgctaccgttgcccctggtgaattatggggacaaagtgcgtcttcaccagtagtgacacttaaaggaacgtccggaaaaaccttctcgggtcagatcttaagtgcagaagatttactgcccgccttacccaccggggcggtgcgcatcaatctctgcgaacaactggacgggccgctggaaggttttggttcgcgtttctggtcgttagtcacgcaacagcacgctggctggaagcaggcatttacccgccacaaagagataacgcatgttgagtacagcgatcgttatcttaatagcccattcacggcgcgtatgttaggtgaaatcttaaccgagctggttgaacagggaatggcggaacgcgccagcctcactgtttgcgtcaaaaaattggattacaactctcgccaacacgacgctctctataacgcgtggcttaatgaggaagatcgtcagcaggttgtgaccactttacttgaagaaggatatctggggcctgcgtggccgggagcaattagctggttaacgggggataaccagagtacggagcatggacgagaactgacagtcaccttcagcgatggcagtcagcattatgtcctgctcgacatggggcttagctactggcgctgtattgaagacaccttctttgattttgctctgcgagtaccgcagcaagttgaacggctggcaaacacgcgagcgcgagctgttgccccgggtaatgaccttaggagttatgttatcgctggataa

SEQ ID NO: 28609 - DNA, 2937 bp, Escherichia coli
atgattgaaaatgagagcggttatttgattacctatttcagaaggatatatcaggcgcttcgtgggcaagcatctcaatatcctgccgctaaaattgcacaaaaattaggcgatacgattcctgtcacaatgcaaaacgaactggtctatgaaatagccggtgaattctgcgagactctctgccgattacttagtgagcatccacctcaaagcagtgatcccgtttctgcattacgtaagctctctccagactggcatcttcaacttccactcgttctccccgaagcgaatgctgcagagattgtaaggcgattactttctcaatcttctgaaatacgcagtgcaagtagtcttcaggttgaaagaatctgggtcgatgttgatgacagttggtattgtgatgcccggttccgattcccggccacaatgcgtacagaacagttaacctctttgtttgaatgcaatattcagccggagcagacccgactcatcatttcaggaaaatggagaaatggcggggcaaggttggcaatgctaagccgttatgagcagcaagattggcgggtcgagttattacctattgcgatgcaaaagctctctggtgcagatgcaatggccgaaatctcgttgtcgcttcatgaaggtccaattctgttaggccacacaattccaaaaggcggttatgaacttactgaagaactcccctgggtttttgaagcgatgaatgagagtgaatcgcagctaaaacttgtcggtatggggtctgtgagttccaggctaaatgctctgtttatttcgctaccgaaaaatagccatttagatattagtggagaaggtgagtttgatatcccaaggttgctgaaaaacagtgaacgcagcttaactaaaataagtggagtatttagtgttgttttacatgatggtgcagtttgtacaattcgcacccagcaactttatgattctgcgattgaatattatattaaatcgacagaagttgaactggttaaatcggattatcctgtccatcgagcctggccgaagatcggttggaaaaaggatctgcaatatggcattgtaccggagaaagaacttttttggcgttccattcgttcaggtaacaatgcctggtattctgtcgcatcagaaatgccaaaaggacagatagaagtcagacgaatagttaatgatgaggttttatttagcggtaaagttgtagttttaccagcagacttcgatattaatattatacctgagagtgctcagcaaggcatcataatgctttctggtataacggatactagaattgacaaatatacaaacaatgaaaaagtaacacttaagtccgattattcacaaaacgagtgtgctatttattataattcatcgcagatgctggaaaataccgttgatttacgggtctcctggaaagatggttctaatcttaaactattattacctaagccggttagcggtggccgatttgtaactaatgatggttctgttcattttgatggtgtggcatctatagcacatttgcatggaatagatgctgagttattaaccatgtcatgtgctggaagaggatatcttaatatcgagttattggatgaaaatccagtagctgaaaaattccgttatttacatgccgaccttcctcttttatcaggacgcaatgacaaattacaacaaatttcactttatgagaactataatttgctaaattctatgctggcatgtgcatggaacagcaatagtacattatgtgttgatttttactctgacagatttggaaaggataaagcaacactcaatattaaacgctacgatggtagttttattgaacacgatcaagggttgctggttgatataaaaaattctgttgtttttcctgcaaatagaatagacgaactggttgttgatgctatttctcttaaggatcctggcttacacaaatcattgctaaaaaaagatgaatttgcttatgatctttcagctctgaatgttcaggatagtccatggttaattgtgggaaaacttgatggtacagctcgcattgcaccagtaattaaatggatgctacctgtattgcagacaaatgatttattactaaatgctctatgcgaagcagacccagaacagcgcaaaaaaaaatttaatgagctaatttttgaaatagataacaacccattgcaaaattattgctgtttattaacagagtatattaaggaatacaaaatgaataatggcttatccttgctggatctggacttgttcagaggtatttcgagtaattaccgcgtggttgttcagttgttaatatcatcatgtctttctggtgatagcgatacgatttatgatatacaggaagaattacccttttcatggggatggattcccgtttcaatctggaaagatgttttccaaaaatgttgggcttatctggaaaaacagattaacgataaaacattagcattacatatattgcaaccctttattgcttttatgaaccatcgtgcacatatcgatcgtcggctggctcccattgcgaatatgttacttacatatagtgagagcctaccaaccggttgtgatgtattgccaactgttagtcgtgagcagtttaatgaagctaaacagatgctattaaggaaccccgacagctttgggcgtatcagtatcttccctaaagaactttggtctagtgctattactccagagttaaaatctgtttttaataagctttggattgaagataaatatcactcacggcttgaaaaacgttttaatttgatgttagtcgcagcgctgttaacccaaaaagataataacctgatacatcaactgtctgcgctttttgaatttcactatcagcaagccccacagcaattaggggtaatctatcaatattattttgaacaagcaggagtatgtcattga

SEQ ID NO: 28610 - DNA, 6345 bp, Escherichia coli
atgactacacgctatttttcgtcacttattgaacaatcgttgtctcgttcaactgaagcaacgctcagtatcatgggcgttaccaacccgcagctgcgtgaacatctcgcgcaacaaatgggggctgattgtgggaaaccgggctcattccttgcttctccggtattccagcaaatgtttggctggaaggagtcaaaccacacgatgcgcagcctgacggaaggcaacgcattgttgagcaaagcagtggttgattcactggatgatcagaataatggccggtaccggtttggtgctgactggaggccttttacgcaccagttagccagttggaaagctttgctggaaaagaaacattcagtggtggtaaccagtggtacgggttcaggtaaaacggaatgttttatggtaccggtgctggaagatctttaccgggaactgcatgaaaatggcaacaatccgttggtcggtgtccgagccctttttctctatccattgaacgccctgattaattcacagcgcgagcgtctggatgcctggacgcgtggttttggtacagggatccgctactgcctttacaacggcaacaccgaaaacctacacgcttcggtaaaaagcgaacaggcaaaaaggccgaatgaggtgctctcgcgcgaaaaaatgcgtgaagaacctgcgccgattctggtgaccaacggcacgatgctggaatatatgatggttcgccaggtcgacgccccgattatccagcaatctaaagcacaaaaatcactacgctggattgtactggatgaagcgcatacctatgtagggtcgcaggccgctgaactggcgctccagctgcgtcgtgtgatgaccgcgtttggcgtgacaccagatgacgtgcgctttgtcgcgacctctgcgaccattgccggcagcgacgctgaaaagcagctgaaaaaatttctctctgaattatccggtatcccgcaggagcgcatcgatgttctggacggaagtcgggtgattcctgaactggaaccatccaaaaacgtttctgttccgttagacgagatagagcaaatacctgatctggatctaagagataaaaatgataataaaattaaagggataagtcctgagcgcttttatgcgcttacgcattcccccgaagcgcgttacatacgtgagatgttggtcaaacagcccaatccgatgaagctggatgagataacagagcggttacacgtgctgacaaaacagcattacagccagcaggaagtactgcgttggatcgatgtctgttcagggactcaacctaatgcaaaggatcccgcatttcttaaagtcagggcgcatatcttccagcgtaatacccagggaatatgggcttgtgttgataaagattgcagattaaagcacggtacaccgctcgacaaaggctggccctttggctatgtgtatgtgaaccagcgacaaaattgtgactgtggaagccctgtatacgaagttgcattctgtaatgattgtaatgagcctcatcttctggcacgggacaaaaagggcaaactagtccagtgggaaaataaaggtggcgatgaattctctttgcaggatgaagtacctgttgaacatgacgctacagaagaaaaagtcgaaaaagagaacagttttcagcctccgttgattattgccgcaggagagaccagcgaggcaggttataccctacaacgcctcgaccgtcagacgcgccgtattggcgttattaacaatgacagcattccgctgattattaatgatattgaacaggtttgtagtgccagtggctgtggctacagaggcatgagtgggaaacagcccttccggcgtgcactattaggtgggccattttacgttactaatatcgtgcccaccgttctagagtattgtcaggactttaccagtgatgaaggcaaagagggcgtcggaccagattcgttgccaggacgaggtcgtcgactcatcacctttacagacagtcgacaagggacagcccgaatggcggtgcgtatgcagcaagaagcagaacgcagtcgcttacgcggaagcgtagtcgaaattctcagctggcatcaaaggacgcaaacgtctacagcgccgaatgccaatgccgatctggaaaaattagcggccagggcgaagcaagcccgtgagcaggcagaagaatatcgaagctggggaatgccagaccaggcgaaattgtcacaagcacaggctgaacagcttgaacaggcttatcaggctgcaaccggtgggaaagccgcgactatcctggtatcccgaacctggacggagatggttaacgagcttaaagagagagccgatatccgcgggccggttctgcaatataaccattatcttaagcctgaagtgtttaatgaaaacggcggcccccttaagctttctgaaatgttgttgttccgggaattcatgcgtcgccctaaacggactaacagcctggaaacacaggggctggttcaggttggttaccaggggctggagaaaatacataagagccccttgcactggcaggaaaaaggattaacgctggatgactggcgcgattttctcaaggttacgttggatcattacgttcgcgagagcaacttcacacagctggatgatgagctgaaaaactggattggtagccgtttttcatcaaaattcgtccgtaacccggaatcaaaagatcctgaagataatcagaacagacgctggcctcaaattcgtaatggcaacgtatcccatcgtttagcgaagttgctgatgctgggggctggattcaaaaccgtcaatgcggcaactattgatattatcaatacatggctgaaagaagcatgggcccaacttaccggaccgcttgcagtactgaaacccgatggcaaccgtttttatttaccgaaagagcatatgactttttctttaatcacggatgcctggatttgcccggtaaccaataaaatcctggatacggcttttaaaggcttaaccccttatctgcctacccatatttcgttcgagcatcttaccctggcgcaatatgacacttttgtcgcgcagaaagtcacaatgccggaaatctggaagctggatcgttcacaggaagactacgcagagggtctggcaaaagcacgcgactgggtcagccatgatccgctgatcgcacaattgcggtcggaaaacgtctggacagacattaacgatcgtgtcgtggaaggcggcttctactatcgtactgccgagcactctgcccagcagtcgtcagaacgtctgcaaagctatgaaaagatgttcaagaatgggcaactaaatgttctcaactgttccaccaccatggaaatgggggttgatatcgggggtattactgcggtggtaatgaacaacgtaccgccacatccggccaactatttacagcgcgccgggcgagccgggcgtagtaaagaatcacgcgcgatctcttacaccctatgtaaaggtaacccacacgaccagcaggtttttgccaacccgctctggccatttgaaaccatgatcccggcacccatggtcgcgatgaactccgcccgactggtgcaacgtcacgtcaatgcattattactgtccgactttttatgtaacgttattggcgaaaccgataaagaaaaaaccagcctcgatagcctctggtttttcggtgaagatgacgggcagtcaaaatgcgaacgctttaaaatctggctggaacgtccggttcttgatatcgacacggcgctggaacggctggtgaaaggtacggcgttgcatggtgcaagagccgaatatctgcgggataaaacaatcaacgcgatcaccttcctgcaacagcggtggctctccgtttatcgcgatctcgtgacacaggagcgtgagtcgcagccgcaaacgccttatcgtaagcgcatagagctggagaagaaacggcactgtggcgagtatctgctgcgcgatctggctgccagaaccttcctgccgggatacggtttcccgacagatgtagtgacgtttgataacttcacgatggaagattatatccgcgaaaaatcgcagaaaagtcgtgataaaaaggaccgtgaagataacgtttcccgttataaaggattaccttcccgtaacctcggtgttgccattcgtgaatatgcaccgggagcagagatcatccttgatggccgtgtcttccgctctgccggtgtctcactgcactggcacaacattaatgctgataccaatgaagcccagcgtctggattgcgcctggcgctgtcacaaatgcgggaccattggctatgaagaggggatgagcagttccgggatgctcttttgctccaatagcgcctgcggcgaaaaaataatcatggataatcgccgtcaggtgctgcagcctgccgggtttgtcaccgatgcacacgctccggtaacgaacaatattgaaaccatgaaattcgtcccggttgtccccgcgtgggtctttgttaaagcagagcccgtaccgttgcctaacccgctaatgggttatatggcttctggggctgatgggcatgttttccagcaaagtttgggggaaggtggacacggttatgcattgtgtctgagctgtggccgtgctgagtcgatgctgaatgaaaatgatgcgccgaaaagtatggaagctcactatccaccgcgtccgggtaaagcggatcgcgacagccagaatcatcgtctgatttgccccggttcgacggcactcatgaagaatgtcaccctgggcgcactggcgcgtaccgatgtctttgaaatggttctgcgcaaaccgcaaaacggcgagtatctgccagataacacagaggaggggcggattgttgccatgactctggcggttgctctgcgtcaggcgctggcgggcgttctgggtatctccgccgcagaactcggctattctgtacgtccggtcagactggaggatgggcaatcggtattagccgtacagctttatgatgtgatcagcggtggtgcaggttttgcctccagcgcaccggtacacattgaagctatattgcagggaatggtgaaacagttaggctgccgccattgtgagactgcatgtagtgaatgcctgcttgattcccagactcgccacgatcacgatttgctggatcgcaaagcggcgctggcctggcttggcgatgacttcacgtattacatcggtttaccggatgaagagacattctcgctgccggatgcccgctactgccctggcgccattggcgatacgattcgccgggcgattaacgaaggcgctgaaaagctcaccctgtggatgaccggcgcgcccaatgagtgggatttatacgcacgtcagttccgcgcggcggttcagaactatcggctaaaagacaacgtcgaggtcgatcttgttattcctacgggagtggatgacccggacctgttgcatgaactatcgcaatttactgcgctgggtgtgcggctgtgccatgttgaacaggatctgcaattaccgatcgttgcccaggtcacctttaccgatcgcgtgatgacgctggcctctcgcagccagcaggcaacgattccggggccggagtggcacctgaatgacgaactggtggtgcgtagtctcggttataaaacggtagaactgaacgagtttattctgccggctaaagccaccaacgctgtcgagcgggtcaaagacattcagatccacaaacagttgaatggaccactgtcgcagtttgggcaacgcttctgggacgtgctgtttaacgaccatgaagaagcgcagtcactgatgaataacacgcgaattaccggcgttcactataccgatcgctatctgcaaaacccggttgcgctggcgttgttgggatcaattctgagaccgctaaaaacaaagctgaccgatggcgctgaagtgacgctggatacgctatttaaagataaagatcgccctggtaaccggcctttccatgactggatgagcatagcggattttcaggatttcgctgatcagtggtttgctgctgcgctgggcaggccggtagaactgacggtgttcgactcgccgcgcgatatccctcaccatcgtaaactgacggtgacttttgaggatggtcaggtattgaagatccgcttcgatcaggggatgggctactggcgcatcaacttttcatcgcaatggcattactttgatttccgcgatgacgtttctttccagttagtcaaaatggctcaggcctgcaaggaagggaatgtcgccaacagcgaagagagttgggcaacggatgtgctggtggaggtgatcgcctcctga

SEQ ID NO: 28611 - DNA, 3291 bp, Escherichia coli; identical to SEQ ID NO: 28561

SEQ ID NO: 28612 - DNA, 6345 bp, Escherichia coli; identical to SEQ ID NO: 28486

SEQ ID NO: 28613 - DNA, 2555 bp, Escherichia coli
aatataggggcaaatccagactgctatgcgcagcctctgtagaggctaagcctcgactacaaaaaaataagagtacgcgttgccaattctattggtcagaaaagcatccagatgagcttagggtgatagtatctcttccggacgaagtttcctttcctgtaacaagcgagccgtcaactacgcgctttgaacttgccatttgtgaagatggtgaggaagtctctggccttgggccagcctatgcttctctggaaaacagacaggcaacagttcgattacgtaaaagcgaagtgagatttggcaggcaaaatccatcggcaggtttgtcgttagtggctcgtgctggagggatgattgttgggagcattaaacttgatgacagtgaaattgccattggtgaggtgccgttaaccttcatcgttgatgcagatcaatggctgttacagggacaggcttcttgcagtgtgcgaagcagcgatgttctgattgtgctccctcgggataatagcaatgttgctggttttgatggccaatcgagggcagtaaacgtattaggactaaaagcactacctgtgaagggatgtcaggacgttacagttacagcaaatgaaacttatcggattcgcaccggaagagaacaaatcagcatcggaaggtttgctctaaatggaaagcgtgcaagctgggtttgtcatccagatgaaacatttattggtgtaccaaaagtcatttctacactaccggatattcaaagcattgatgtaacgcgttacctgagcggaatttcaattgagcaatgtcatatacaagagatgctgggggctcaatatctttctatccgtaatagtaagaatgaaacgctcttgcgtcgcaaaatcggtattttgcctgctgatttcagtattgagataaaaggtggaatacacgcaaatgaaggcactatcgtaatcaccacacagcatccttgtgtagcaaaacttaaagataaaacattggaggctacacgtaagcgtactgaggggcgaacagagatacaactcaaagcggaaggggtacctccggcatttattacattacaagttctgcctaatttggcggctgaccccatcgatattgagttaccttttcccgctaaaggctgtctcgctcttgatgtaaacggacgtcctctggataaaaacattacgctgcatgatctgctgggttccagagcgtttctgttctccagaaatggcgagccgacaagatatacattgcagttgcatttgcgctccgttagtggattacaggcatggcacgaatggtgttatacggcgttgagcgatcgtcctgttgaattgaatctctatagtctgcgcgaacatattgagaacctgatttcacttgaggcaggtattgaccaggttgttgagatgcgtattacgggggcgggtgtggtcatggcctggcaaattcgtcgctataaatacagtctgcgctatgattatgaaaaagaactattactcagccagtcagtgaaccatcgtgctggacagattccttcccccgttatcatgctgttaagtgaacccgagaggaaatccatccccttagcatcaagaatgagcgagggagtgcctgtcggtgaatatgagttgagctcaatcgttaacaaaaatggaccgtggttggttgtccctaaaccgggtgaagagatggcttttcgtccctgcttcattcgtggcgaatcttcgttaccggtagaagaaagcaacatccgctcattgcagaaagcgacccagctttttaatccacaggcagaagttaataccatcacactggttctcggacagatggctaacgatcctgcccattccggctggcaatttatgcgtagcctgtacgatcaatttggttatttaccactggcaacctttgaagtatggcgtgcactggtgcagcatccgcaggcattggcaatgtcgctcttcaaatttgaaatgtcagcagagtacctgagtcgtattgagaatgagttccctattctatgggagtttttccccatctttgagatcaaagcggcatctgagcgtttcaaattgttcctgagccaaaaaggtgcaccggaggaaacccagaaattactggttactaatatgtttcaacggctggggctcgtgttcccgacatatgccgatgaaattgagaaatggttaagtaacggacatctccccccgtctattcctgagtcttttgtccacgtgtggtatcaggagcttttacgtgagcatagtgaagctcaatggccagagtacggcagcaagcggctgcatagctggatggcatcacaaaaaaatccagtgattggtattaatcctgacgcaaatcaccgctattccgtggccttgttacccgtcttcgctgcagctgtggcaagcggaaatgcttcttttgaatctgtatttgaccgtaaacccggtgccgtatttttcctgaggcaagtcagggatttcgattcccgctggtttaaggccatcttccagtgcagcctgttgcgttatgttgctaaaaaataa

SEQ ID NO: 28614 - DNA, 6345 bp, Escherichia coli
atgactacacgctatttttcgtcacttattgaacaatcgttgtctcgttcaactgaagcaacgctcagtatcatgggcgttaccaacccgcagctgcgtgaacatctcgcgcaacaaatgggggctgattgtgggaaaccgggctcattccttgcttctccggtattccagcaaatgtttggctggaaggagtcaaaccacacgatgcgcagcctgacggaaggcaacgcattgttgagcaaagcagtggttgattcactggatgatcagaataatggccggtaccggtttggtgctgactggaggccttttacgcaccagttagccagttggaaagctttgctggaaaagaaacattcagtggtggtaaccagtggtacgggttcaggtaaaacggaatgttttatggtaccggtgctggaagatctttaccgggaactgcatgaaaatggcaacaatccgttggtcggtgtccgagccctttttctctatccattgaacgccctgattaattcacagcgcgagcgtctggatgcctggacgcgtggttttggtacagggatccgctactgcctttacaacggcaacaccgaaaacctatacgcttcggtaaaaagcgaacaggcaaaaaggccgaatgaggtgctctcgcgcgaaaaaatgcgtgaagaacctgcgccgattctggtgaccaacggcacgatgctggaatatatgatggttcgccaggtcgacgccccgattatccagcaatctaaagcacaaaaatcactacgctggattgtactggatgaagcgcatacctatgtagggtcgcaggccgctgaactggcgctccagctgcgtcgtgtgatgaccgcgtttggcgtgacaccagatgacgtgcgctttgtcgcgacctctgcgaccattgccggcagcgacgctgaaaagcagctgaaaaaatttctctctgaattatccggtatcccgcaggagcgcatcgatgttctggacggaagtcgggtgattcctgaactggaaccatccaaaaacgtttctgttccgttagacgagatagagcaaatacctgatctggatctaagagataaaaatgataataaaattaaagggataagtcctgagcgcttttatgcgcttacgcattcccccgaagcgcgttacatacgtgagatgttggtcaaacagcccaatccgatgaagctggatgagataacagagcggttacacgtgctgacaaaacagcattacagccagcaggaagtactgcgttggatcgatgtctgttcagggactcaacctaatgcaaaggatcccgcatttcttaaagtcagggcgcatatcttccagcgtaatacccagggaatatgggcttgtgttgataaagattgcagattaaagcacggtacaccgctcgacaaaggctggccctttggctatgtgtatgtgaaccagcgacaaaattgtgactgtggaagccctgtatacgaagttgcattctgtaatgattgtaatgagcctcatcttctggcacgggacaaaaagggcaaactagtccagtgggaaaataaaggtggcgatgaattctctttgcaggatgaagtacctgttgaacatgacgctacagaagaaaaagtcgaaaaagagaacagttttcagcctccgttgattattgccgcaggagagaccagcgaggcaggttataccctacaacgcctcgaccgtcagacgcgccgtattggcgttattaacaatgacagcattccgctgattattaatgatattgaacaggtttgtagtgccagtggctgtggctacagaggcatgagtgggaaacagcccttccggcgtgcactattaggtgggccattttacgttactaatatcgtgcccaccgttctagagtattgtcaggactttaccagtgatgaaggcaaagagggcgtcggaccagattcgttgccaggacgaggtcgtcgactcatcacctttacagacagtcgacaagggacagcccgaatggcggtgcgtatgcagcaagaagcagaacgcagtcgcttacgcggaagcgtagtcgaaattctcagctggcatcaaaggacgcaaacgtctacagcgccgaatgccaatgccgatctggaaaaattagcggccagagcgaagcaagcccgtgagcaggcagaagaatatcgaagctggggaatgccagaccaggcgaaattgtcacaagcacaggctgaacagcttgaacaggcttatcaggctgcaaccggtgggaaagccgcgactatcctggtatcccgaacctggacggagatggttaacgagcttaaagagagagccgatatccgcgggccggttctgcaatataaccattatcttaagcctgaagtgtttaatgaaaacggcggcccccttaagctttctgaaatgttgttgttccgggaattcatgcgtcgccctaaacggactaacagcctggaaacacaggggctggttcaggttggttaccaggggctggagaaaatacataagagccccttgcactggcaggaaaaaggattaacgctggatgactggcgcgattttctcaaggttacgttggatcattacgttcgcgagagcaacttcacacagctggatgatgagctgaaaaactggattggtagccgtttttcatcaaaattcgtccgtaacccggaatcaaaagatcctgaagataatcagaacagacgctggcctcaaattcgtaatggcaacgtatcccatcgtttagcgaagttgctgatgctgggggctggattcaaaaccgtcaatgcggcaactattgatattatcaatacatggctgaaagaagcatgggcccaacttaccggaccgcttgcagtactgaaacccgatggcaaccgtttttatttaccgaaagagcatatgactttttctttaatcacggatgcctggatttgcccggtaaccaataaaatcctggatacggcttttaaaggcttaaccccttatctgcctacccatatttcgttcgagcatcttaccctggcgcaatatgacacttttgtcgcgcagaaagtcacaatgccggaaatctggaagctggatcgttcacaggaagactacgcagagggtctggcaaaagcacgcgactgggtcagccatgatccgctgatcgcacaattgcggtcggaaaacgtctggacagacattaacgatcgtgtcgtggaaggcggcttctactatcgtactgccgagcactctgcccagcagtcgtcagaacgtctgcaaagctatgaaaagatgttcaagaatgggcaactaaatgttctcaactgttccaccaccatggaaatgggggttgatatcgggggtattactgcggtggtaatgaacaacgtaccgccacatccggccaactatttacagcgcgccgggcgagccgggcgtagtaaagaatcacgcgcgatctcttacaccctatgtaaaggtaacccacacgaccagcaggtttttgccaacccgctctggccatttgaaaccatgatcccggcacccatggtcgcgatgaactccgcccgactggtgcaacgtcacgtcaatgcattattactgtccgactttttatgtaacgttattggcgaaaccgataaagaaaaaaccagcctcgatagcctctggtttttcggtgaagatgacgggcagtcaaaatgcgaacgctttaaaatctggctggaacgtccggttcttgatatcgacacggcgctggaacggctggtgaaaggtacggcgttgcatggtgcaagagccgaatatctgcgggataaaacaatcaacgcgatcaccttcctgcaacagcggtggctctccgtttatcgcgatctcgtgacacaggagcgtgagtcgcagccgcaaacgccttatcgtaagcgcatagagctggagaagaaacggcactgtggcgagtatctgctgcgcgatctggctgccagaaccttcctgccgggatacggtttcccgacagatgtagtgacgtttgataacttcacgatggaagattatatccgcgaaaaatcgcagaaaagtcgtgataaaaaggaccgtgaagataacgtttcccgttataaaggattaccttcccgtaacctcggtgttgccattcgtgaatatgcaccgggagcagagatcatccttgatggccgtgtcttccgctctgccggtgtctcactgcactggcacaacattaatgctgataccaatgaagcccagcgtctggattgcgcctggcgctgtcacaaatgcgggaccattggctatgaagaggggatgagcagttccgggatgctcttttgctccaatagcgcctgcggcgaaaaaataatcatggataatcgccgtcaggtgctgcagcctgccgggtttgtcaccgatgcacacgctccggtaacgaacaatattgaaaccatgaaattcgtcccggttgtccccgcgtgggtctttgttaaagcagagcccgtaccgttgcctaacccgctaatgggttatatggcttctggggctgatgggcatgttttccagcaaagtttgggggaaggtggacacggttatgcattgtgtctgagctgtggccgtgctgagtcgatgctgaatgaaaatgatgcgccgaaaagtatggaagctcactatccaccgcgtccgggtaaagcggatcgcgacagccagaatcatcgtctgatttgccccggttcgacggcactcatgaagaatgtcaccctgggcgcactggcgcgtaccgatgtctttgaaatggttctgcgcaaaccgcaaaacggcgagtatctgccagataacacagaggaggggcggattgttgccatgactctggcggttgctctgcgtcaggcgctggcgggcgttctgggtatctccgccgcagaactcggctattctgtacgtccggtcagactggaggatgggcaatcggtattagccgtacagctttatgatgtgatcagcggtggtgcaggttttgcctccagcgcaccggtacacattgaagctatattgcagggaatggtgaaacagttaggctgccgccattgtgagactgcatgtagtgaatgcctgcttgattcccagactcgccacgatcacgatttgctggatcgcaaagcggcgctggcctggcttggcgatgacttcacgtattacatcggtttaccggatgaagagacattctcgctgccggatgcccgctactgccctggcgccattggcgatacgattcgccgggcgattaacgaaggcgctgaaaagctcaccctgtggatgaccggcgcgcccaatgagtgggatttatacgcacgtcagttccgcgcggcggttcagaactatcggctaaaagacaacgtcgaggtcgatcttgttattcctacgggagtggatgacccggacctgttgcatgaactatcgcaatttactgcgctgggtgtgcggctgtgccatgttgaacaggatctgcaattaccgatcgttgcccaggtcacctttaccgatcgcgtgatgacgctggcctctcgcagccagcaggcaacgattccggggccggagtggcacctgaatgacgaactggtggtgcgtagtctcggttataaaacggtagaactgaacgagtttattctgccggctaaagccaccaacgctgtcgagcgggtcaaagacattcagatccacaaacagttgaatggaccactgtcgcagtttgggcaacgcttctgggacgtgctgtttaacgaccatgaagaagcgcagtcactgatgaataacacgcgaattaccggcgttcactataccgatcgctatctgcaaaacccggttgcgctggcgttgttgggatcaattctgagaccgctaaaaacaaagctgaccgatggcgctgaagtgacgctggatacgctatttaaagataaagatcgccccggtaaccggcctttccatgactggatgagcatagcggattttcaggatttcgctgatcagtggtttgctgctgcgctgggcaggccggtagaactgacggtgttcgactcgccgcgcgatatccctcaccatcgtaaactgacggtgacttttgaggatggtcaggtattgaagatccgcttcgatcaggggatgggctactggcgcatcaacttttcatcgcaatggcattactttgatttccgcgatgacgtttctttccagttagtcaaaatggctcaggcctgcaaggaagggaatgtcgccaacagcgaagagagttgggcaacggatgtgctggtggaggtgatcgcctcctga

SEQ ID NO: 28615 - DNA, 3291 bp, Escherichia coli; identical to SEQ ID NO: 28561

SEQ ID NO: 28616 - DNA, 6345 bp, Escherichia coli
atgactacacgctatttttcgtcacttattgaacaatcgttgtctcgttcaactgaagcaacgctcagtatcatgggcgttaccaacccgcagctgcgtgaacatctcgcgcaacaaatgggggctgattgtgggaaaccgggctcattccttgcttctccggtattccagcaaatgtttggctggaaggagtcaaaccacacgatgcgcagcctgacggaaggcaacgcattgttgagcaaagcagtggttgattcactggatgatcagaataatggccggtaccggtttggtgctgactggaggccttttacgcaccagttagccagttggaaagctttgctggaaaagaaacattcagtggtggtaaccagtggtacgggttcaggtaaaacggaatgttttatggtaccggtgctggaagatctttaccgggaactgcatgaaaatggcaacaatccgttggtcggtgtccgagccctttttctctatccattgaacgccctgattaattcacagcgcgagcgtctggatgcctggacgcgtggttttggtacagggatccgctactgcctttacaacggcaacaccgaaaacctatacgcttcggtaaaaagcgaacaggcaaaaaggccgaatgaggtgctctcgcgcgaaaaaatgcgtgaagaacctgcgccgattctggtgaccaacggcacgatgctggaatatatgatggttcgccaggtcgacgccccgattatccagcaatctaaagcacaaaaatcactacgctggattgtactggatgaagcgcatacctatgtagggtcgcaggccgctgaactggcgctccagctgcgtcgtgtgatgaccgcgtttggcgtgacaccagatgacgtgcgctttgtcgcgacctctgcgaccattgccggcagcgacgctgaaaagcagctgaaaaaatttctctctgaattatccggtatcccgcaggagcgcatcgatgttctggacggaagtcgggtgattcctgaactggaaccatccaaaaacgtttctgttccgttagacgagatagagcaaatacctgatctggatctaagagataaaaatgataataaaattaaagggataagtcctgagcgcttttatgcgcttacgcattcccccgaagcgcgttacatacgtgagatgttggtcaaacagcccaatccgatgaagctggatgagataacagagcggttacacgtgctgacaaaacagcattacagccagcaggaagtactgcgttggatcgatgtctgttcagggactcaacctaatgcaaaggatcccgcatttcttaaagtcagggcgcatatcttccagcgtaatacccagggaatatgggcttgtgttgataaagattgcagattaaagcacggtacaccgctcgacaaaggctggccctttggctatgtgtatgtgaaccagcgacaaaattgtgactgtggaagccctgtatacgaagttgcattctgtaatgattgtaatgagcctcatcttctggcacgggacaaaaagggcaaactagtccagtgggaaaataaaggtggcgatgaattctctttgcaggatgaagtacctgttgaacatgacgctacagaagaaaaagtcgaaaaagagaacagttttcagcctccgttgattattgccgcaggagagaccagcgaggcaggttataccctacaacgcctcgaccgtcagacgcgccgtattggcgttattaacaatgacagcattccgctgattattaatgatattgaacaggtttgtagtgccagtggctgtggctacagaggcatgagtgggaaacagcccttccggcgtgcactattaggtgggccattttacgttactaatatcgtgcccaccgttctagagtattgtcaggactttaccagtgatgaaggcaaagagggcgtcggaccagattcgttgccaggacgaggtcgtcgactcatcacctttacagacagtcgacaagggacagcccgaatggcggtgcgtatgcagcaagaagcagaacgcagtcgcttacgcggaagcgtagtcgaaattctcagctggcatcaaaggacgcaaacgtctacagcgccgaatgccaatgccgatctggaaaaattagcggccagggcgaagcaagcccgtgagcaggcagaagaatatcgaagctggggaatgccagaccaggcgaaattgtcacaagcacaggctgaacagcttgaacaggcttatcaggctgcaaccggtgggaaagccgcgactatcctggtatcccgaacctggacggagatggttaacgagcttaaagagagagccgatatccgcgggccggttctgcaatataaccattatcttaagcctgaagtgtttaatgaaaacggcggcccccttaagctttctgaaatgttgttgttccgggaattcatgcgtcgccctaaacggactaacagcctggaaacacaggggctggttcaggttggttaccaggggctggagaaaatacataagagccccttgcactggcaggaaaaaggattaacgctggatgactggcgcgattttctcaaggttacgttggatcattacgttcgcgagagcaacttcacacagctggatgatgagctgaaaaactggattggtagccgtttttcatcaaaattcgtccgtaacccggaatcaaaagatcctgaagataatcagaacagacgctggcctcaaattcgtaatggcaacgtatcccatcgtttagcgaagttgctgatgctgggggctggattcaaaaccgtcaatgcggcaactattgatattatcaatacatggctgaaagaagcatgggcccaacttaccggaccgcttgcagtactgaaacccgatggcaaccgtttttatttaccgaaagagcatatgactttttctttaatcacggatgcctggatttgcccggtaaccaataaaatcctggatacggcttttaaaggcttaaccccttatctgcctacccatatttcgttcgagcatcttaccctggcgcaatatgacacttttgtcgcgcagaaagtcacaatgccggaaatctggaagctggatcgttcacaggaagactacgcagagggtctggcaaaagcacgcgactgggtcagccatgatccgctgatcgcacaattgcggtcggaaaacgtctggacagacattaacgatcgtgtcgtggaaggcggcttctactatcgtactgccgagcactctgcccagcagtcgtcagaacgtctgcaaagctatgaaaagatgttcaagaatgggcaactaaatgttctcaactgttccaccaccatggaaatgggggttgatatcgggggtattactgcggtggtaatgaacaacgtaccgccacatccggccaactatttacagcgcgccgggcgagccgggcgtagtaaagaatcacgcgcgatctcttacaccctatgtaaaggtaacccacacgaccagcaggtttttgccaacccgctctggccatttgaaaccatgatcccggcacccatggtcgcgatgaactccgcccgactggtgcaacgtcacgtcaatgcattattactgtccgactttttatgtaacgttattggcgaaaccgataaagaaaaaaccagcctcgatagcctctggtttttcggtgaagatgacgggcagtcaaaatgcgaacgctttaaaatctggctggaacgtccggttcttgatatcgacacggcgctggaacggctggtgaaaggtacggcgttgcatggtgcaagagccgaatatctgcgggataaaacaatcaacgcgatcaccttcctgcaacagcggtggctctccgtttatcgcgatctcgtgacacaggagcgtgagtcgcagccgcaaacgccttatcgtaagcgcatagagctggagaagaaacggcactgtggcgagtatctgctgcgcgatctggctgccagaaccttcctgccgggatacggtttcccgacagatgtagtgacgtttgataacttcacgatggaagattatatccgcgaaaaatcgcagaaaagtcgtgataaaaaggaccgtgaagataacgtttcccgttataaaggattaccttcccgtaacctcggtgttgccattcgtgaatatgcaccgggagcagagatcatccttgatggccgtgtcttccgctctgccggtgtctcactgcactggcacaacattaatgctgataccaatgaagcccagcgtctggattgcgcctggcgctgtcacaaatgcgggaccattggctatgaagaggggatgagcagttccgggatgctcttttgctccaatagcgcctgcggcgaaaaaataatcatggataatcgccgtcaggtgctgcagcctgccgggtttgtcaccgatgcacacgctccggtaacgaacaatattgaaaccatgaaattcgtcccggttgtccccgcgtgggtctttgttaaagcagagcccgtaccgttgcctaacccgctaatgggttatatggcttctggggctgatgggcatgttttccagcaaagtttgggggaaggtggacacggttatgcattgtgtctgagctgtggccgtgctgagtcgatgctgaatgaaaatgatgcgccgaaaagtatggaagctcactatccaccgcgtccgggtaaagcggatcgcgacagccagaatcatcgtctgatttgccccggttcgacggcactcatgaagaatgtcaccctgggcgcactggcgcgtaccgatgtctttgaaatggttctgcgcaaaccgcaaaacggcgagtatctgccagataacacagaggaggggcggattgttgccatgactctggcggttgctctgcgtcaggcgctggcgggcgttctgggtatctccgccgcagaactcggctattctgtacgtccggtcagactggaggatgggcaatcggtattagccgtacagctttatgatgtgatcagcggtggtgcaggttttgcctccagcgcaccggtacacattgaagctatattgcagggaatggtgaaacagttaggctgccgccattgtgagactgcatgtagtgaatgcctgcttgattcccagactcgccacgatcacgatttgctggatcgcaaagcggcgctggcctggcttggcgatgacttcacgtattacatcggtttaccggatgaagagacattctcgctgccggatgcccgctactgccctggcgccattggcgatacgattcgccgggcgattaacgaaggcgctgaaaagctcaccctgtggatgaccggcgcgcccaatgagtgggatttatacgcacgtcagttccgcgcggcggttcagaactatcggctaaaagacaacgtcgaggtcgatcttgttattcctacgggagtggatgacccggacctgttgcatgaactatcgcaatttactgcgctgggtgtgcggctgtgccatgttgaacaggatctgcaattaccgatcgttgcccaggtcacctttaccgatcgcgtgatgacgctggcctctcgcagccagcaggcaacgattccggggccggagtggcacctgaatgacgaactggtggtgcgtagtctcggttataaaacggtagaactgaacgagtttattctgccggctaaagccaccaacgctgtcgagcgggtcaaagacattcagatccacaaacagttgaatggaccactgtcgcagtttgggcaacgcttctgggacgtgctgtttaacgaccatgaagaagcgcagtcactgatgaataacacgcgaattaccggcgttcactataccgatcgctatctgcaaaacccggttgcgctggcgttgttgggatcaattctgagaccgctaaaaacaaagctgaccgatggcgctgaagtgacgctggatacgctatttaaagataaagatcgccccggtaaccggcctttccatgactggatgagcatagcggattttcaggatttcgctgatcagtggtttgctgctgcgctgggcaggccggtagaactgacggtgttcgactcgccgcgcgatatccctcaccatcgtaaactgacggtgacttttgaggatggtcaggtattgaagatccgcttcgatcaggggatgggctactggcgcatcaacttttcatcgcaatggcattactttgatttccgcgatgacgtttctttccagttagtcaaaatggctcaggcctgcaaggaagggaatgtcgccaacagcgaagagagttgggcaacggatgtgctggtggaggtgatcgcctcctga

SEQ ID NO: 28617 - DNA, 1575 bp, Escherichia coli
attcagggggccagtctagctacacgtaagcgtactgaggggcgaacagagatacaactcaaagcggaaggggtacctccggcatttattacattacaagttctgcctaatttggcggctgaccccatcgatattgagttaccttttcccgctaaaggctgtctcgctcttgatgtaaacggacgtcctctggataaaaacattacgctgcatgatctgctgggttccagagcgtttctgttctccagaaatggcgagccgacaagatatacattgcagttgcatttgcgctccgttagtggattacaggcatggcacgaatggtgttatacggcgttgagcgatcgtcctgttgaattgaatctctatagtctgcgcgaacatattgagaacctgatttcacttgaggcaggtattgaccaggttgttgagatgcgtattacgggggcgggtgtggtcatggcctggcaaattcgtcgctataaatacagtctgcgctatgattatgaaaaagaactattactcagccagtcagtgaaccatcgtgctggacagattccttcccccgttatcatgctgttaagtgaacccgagaggaaatccatccccttagcatcaagaatgagcgagggagtgcctgtcggtgaatatgagttgagctcaatcgttaacaaaaatggaccgtggttggttgtccctaaaccgggtgaagagatggcttttcgtccctgcttcattcgtggcgaatcttcgttaccggtagaagaaagcaacatccgctcattgcagaaagcgacccagctttttaatccacaggcagaagttaataccatcacactggttctcggacagatggctaacgatcctgcccattccggctggcaatttatgcgtagcctgtacgatcaatttggttatttaccactggcaacctttgaagtatggcgtgcactggtgcagcatccgcaggcattggcaatgtcgctcttcaaatttgaaatgtcagcagagtacctgagtcgtattgagaatgagttccctattctatgggagtttttccccatctttgagatcaaagcggcatctgagcgtttcaaattgttcctgagccaaaaaggtgcaccggaggaaacccagaaattactggttactaatatgtttcaacggctggggctcgtgttcccgacatatgccgatgaaattgagaaatggttaagtaacggacatctccccccgtctattcctgagtcttttgtccacgtgtggtatcaggagcttttacgtgagcatagtgaagctcaatggccagagtacggcagcaagcggctgcatagctggatggcatcacaaaaaaatccagtgattggtattaatcctgacgcaaatcaccgctattccgtggccttgttacccgtcttcgctgcagctgtggcaagcggaaatgcttcttttgaatctgtatttgaccgtaaacccggtgccgtatttttcctgaggcaagtcagggatttcgattcccgctggtttaaggccatcttccagtgcagcctgttgcgttatgttgctaaaaaataa

SEQ ID NO: 28618 - DNA, 6345 bp, Escherichia coli; identical to SEQ ID NO: 28616

SEQ ID NO: 28619 - DNA, 237 bp, Escherichia coli
atggcatcacaaaaaaatccagtgattggtattaatcctgacgcaaatcaccgctattccgtggccttgttacccgtcttcgctgcagctgtggcaagcggaaatgcttcttttgaatctgtatttgaccgtaaacccggtgccgtatttttcctgaggcaagtcagggatttcgattcccgctggtttaaggccatcttccagtgcagcctgttgcgttatgttgctaaaaaataa

SEQ ID NO: 28620 - DNA, 6345 bp, Escherichia coli
atgactacacgctatttttcgtcacttattgaacaatcgttgtctcgttcaactgaagcaacgctcagtatcatgggcgttaccaacccgcagctgcgtgaacatctcgcgcaacaaatgggggctgattgtgggaaaccgggctcattccttgcttctccggtattccagcaaatgtttggctggaaggagtcaaaccacacgatgcgcagcctgacggaaggcaacgcattgttgagcaaagcagtggttgattcactggatgatcagaataatggccggtaccggtttggtgctgactggaggccttttacgcaccagttagccagttggaaagctttgctggaaaagaaacattcagtggtggtaaccagtggtacgggttcaggtaaaacggaatgttttatggtaccggtgctggaagatctttaccgggaactgcatgaaaatggcaacaatccgttggtcggtgtccgagccctttttctctatccattgaacgccctgattaattcacagcgcgagcgtctggatgcctggacgcgtggttttggtacagggatccgctactgcctttacaacggcaacaccgaaaacctatacgcttcggtaaaaagcgaacaggcaaaaaggccgaatgaggtgctctcgcgcgaaaaaatgcgtgaagaacctgcgccgattctggtgaccaacggcacgatgctggaatatatgatggttcgccaggtcgacgccccgattatccagcaatctaaagcacaaaaatcactacgctggattgtactggatgaagcgcatacctatgtagggtcgcaggccgctgaactggcgctccagctgcgtcgtgtgatgaccgcgtttggcgtgacaccagatgacgtgcgctttgtcgcgacctctgcgaccattgccggcagcgacgctgaaaagcagctgaaaaaatttctctctgaattatccggtatcccgcaggagcgcatcgatgttctggacggaagtcgggtgattcctgaactggaaccatccaaaaacgtttctgttccgttagacgagatagagcaaatacctgatctggatctaagagataaaaatgataataaaattaaagggataagtcctgagcgcttttatgcgcttacgcattcccccgaagcgcgttacatacgtgagatgttggtcaaacagcccaatccgatgaagctggatgagataacagagcggttacacgtgctgacaaaacagcattacagccagcaggaagtactgcgttggatcgatgtctgttcagggactcaacctaatgcaaaggatcccgcatttcttaaagtcagggcgcatatcttccagcgtaatacccagggaatatgggcttgtgttgataaagattgcagattaaagcacggtacaccgctcgacaaaggctggccctttggctatgtgtatgtgaaccagcgacaaaattgtgactgtggaagccctgtatacgaagttgcattctgtaatgattgtaatgagcctcatcttctggcacgggacaaaaagggcaaactagtccagtgggaaaataaaggtggcgatgaattctctttgcaggatgaagtacctgttgaacatgacgctacagaagaaaaagtcgaaaaagagaacagttttcagcctccgttgattattgccgcaggagagaccagcgaggcaggttataccctacaacgcctcgaccgtcagacgcgccgtattggcgttattaacaatgacagcattccgctgattattaatgatattgaacaggtttgtagtgccagtggctgtggctacagaggcatgagtgggaaacagcccttccggcgtgcactattaggtgggccattttacgttactaatatcgtgcccaccgttctagagtattgtcaggactttaccagtgatgaaggcaaagagggcgtcggaccagattcgttgccaggacgaggtcgtcgactcatcacctttacagacagtcgacaagggacagcccgaatggcggtgcgtatgcagcaagaagcagaacgcagtcgcttacgcggaagcgtagtcgaaattctcagctggcatcaaaggacgcaaacgtctacagcgccgaatgccaatgccgatctggaaaaattagcggccagggcgaagcaagcccgtgagcaggcagaagaatatcgaagctggggaatgccagaccaggcgaaattgtcacaagcacaggctgaacagcttgaacaggcttatcaggctgcaaccggtgggaaagccgcgactatcctggtatcccgaacctggacggagatggttaacgagcttaaagagagagccgatatccgcgggccggttctgcaatataaccattatcttaagcctgaagtgtttaatgaaaacggcggcccccttaagctttctgaaatgttgttgttccgggaattcatgcgtcgccctaaacggactaacagcctggaaacacaggggctggttcaggttggttaccaggggctggagaaaatacataagagccccttgcactggcaggaaaaaggattaacgctggatgactggcgcgattttctcaaggttacgttggatcattacgttcgcgagagcaacttcacacagctggatgatgagctgaaaaactggattggtagccgtttttcatcaaaattcgtccgtaacccggaatcaaaagatcctgaagataatcagaacagacgctggcctcaaattcgtaatggcaacgtatcccatcgtttagcgaagttgctgatgctgggggctggattcaaaaccgtcaatgcggcaactattgatattatcaatacatggctgaaagaagcatgggcccaacttaccggaccgcttgcagtactgaaacccgatggcaaccgtttttatttaccgaaagagcatatgactttttctttaatcacggatgcctggatttgcccggtaaccaataaaatcctggatacggcttttaaaggcttaaccccttatctgcctacccatatttcgttcgagcatcttaccttggcgcaatatgacacttttgtcgcgcagaaagtcacaatgccggaaatctggaagctggatcgttcacaggaagactacgcagagggtctggcaaaagcacgcgactgggtcagccatgatccgctgatcgcacaattgcggtcggaaaacgtctggacagacattaacgatcgtgtcgtggaaggcggcttctactatcgtactgccgagcactctgcccagcagtcgtcagaacgtctgcaaagctatgaaaagatgttcaagaatgggcaactaaatgttctcaactgttccaccaccatggaaatgggggttgatatcgggggtattactgcggtggtaatgaacaacgtaccgccacatccggccaactatttacagcgcgccgggcgagccgggcgtagtaaagaatcacgcgcgatctcttacaccctatgtaaaggtaacccacacgaccagcaggtttttgccaacccgctctggccatttgaaaccatgatcccggcacccatggtcgcgatgaactccgcccgactggtgcaacgtcacgtcaatgcattattactgtccgactttttatgtaacgttattggcgaaaccgataaagaaaaaaccagcctcgatagcctctggtttttcggtgaagatgacgggcagtcaaaatgcgaacgctttaaaatctggctggaacgtccggttcttgatatcgacacggcgctggaacggctggtgaaaggtacggcgttgcatggtgcaagagccgaatatctgcgggataaaacaatcaacgcgatcaccttcctgcaacagcggtggctctccgtttatcgcgatctcgtgacacaggagcgtgagtcgcagccgcaaacgccttatcgtaagcgcatagagctggagaagaaacggcactgtggcgagtatctgctgcgcgatctggctgccagaaccttcctgccgggatacggtttcccgacagatgtagtgacgtttgataacttcacgatggaagattatatccgcgaaaaatcgcagaaaagtcgtgataaaaaggaccgtgaagataacgtttcccgttataaaggattaccttcccgtaacctcggtgttgccattcgtgaatatgcaccgggagcagagatcatccttgatggccgtgtcttccgctctgccggtgtctcactgcactggcacaacattaatgctgataccaatgaagcccagcgtctggattgcgcctggcgctgtcacaaatgcgggaccattggctatgaagaggggatgagcagttccgggatgctcttttgctccaatagcgcctgcggcgaaaaaataatcatggataatcgccgtcaggtgctgcagcctgccgggtttgtcaccgatgcacacgctccggtaacgaacaatattgaaaccatgaaattcgtcccggttgtccccgcgtgggtctttgttaaagcagagcccgtaccgttgcctaacccgctaatgggttatatggcttctggggctgatgggcatgttttccagcaaagtttgggggaaggtggacacggttatgcattgtgtctgagctgtggccgtgctgagtcgatgctgaatgaaaatgatgcgccgaaaagtatggaagctcactatccaccgcgtccgggtaaagcggatcgcgacagccagaatcatcgtctgatttgccccggttcgacggcactcatgaagaatgtcaccctgggcgcactggcgcgtaccgatgtctttgaaatggttctgcgcaaaccgcaaaacggcgagtatctgccagataacacagaggaggggcggattgttgccatgactctggcggttgctctgcgtcaggcgctggcgggcgttctgggtatctccgccgcagaactcggctattctgtacgtccggtcagactggaggatgggcaatcggtattagccgtacagctttatgatgtgatcagcggtggtgcaggttttgcctccagcgcaccggtacacattgaagctatattgcagggaatggtgaaacagttaggctgccgccattgtgagactgcatgtagtgaatgcctgcttgattcccagactcgccacgatcacgatttgctggatcgcaaagcggcgctggcctggcttggcgatgacttcacgtattacatcggtttaccggatgaagagacattctcgctgccggatgcccgctactgccctggcgccattggcgatacgattcgccgggcgattaacgaaggcgctgaaaagctcaccctgtggatgaccggcgcgcccaatgagtgggatttatacgcacgtcagttccgcgcggcggttcagaactatcggctaaaagacaacgtcgaggtcgatcttgttattcctacgggagtggatgacccggacctgttgcatgaactatcgcaatttactgcgctgggtgtgcggctgtgccatgttgaacaggatctgcaattaccgatcgttgcccaggtcacctttaccgatcgcgtgatgacgctggcctctcgcagccagcaggcaacgattccggggccggagtggcacctgaatgacgaactggtggtgcgtagtctcggttataaaacggtagaactgaacgagtttattctgccggctaaagccaccaacgctgtcgagcgggtcaaagacattcagatccacaaacagttgaatggaccactgtcgcagtttgggcaacgcttctgggacgtgctgtttaacgaccatgaagaagcgcagtcactgatgaataacacgcgaattaccggcgttcactataccgatcgctatctgcaaaacccggttgcgctggcgttgttgggatcaattctgagaccgctaaaaacaaagctgaccgatggcgctgaagtgacgctggatacgctatttaaagataaagatcgccccggtaaccggcctttccatgactggatgagcatagcggattttcaggatttcgctgatcagtggtttgctgctgcgctgggcaggccggtagaactgacggtgttcgactcgccgcgcgatatccctcaccatcgtaaactgacggtgacttttgaggatggtcaggtattgaagatccgcttcgatcaggggatgggctactggcgcatcaacttttcatcgcaatggcattactttgatttccgcgatgacgtttctttccagttagtcaaaatggctcaggcctgcaaggaagggaatgtcgccaacagcgaagagagttgggcaacggatgtgctggtggaggtgatcgcctcctga

SEQ ID NO: 28621 - DNA, 237 bp, Escherichia coli; identical to SEQ ID NO: 28619

SEQ ID NO: 28622 - DNA, 6345 bp, Escherichia coli; identical to SEQ ID NO: 28616

SEQ ID NO: 28623 - DNA, 1576 bp, Escherichia coli
gattcagggggccagtctagctacacgtaagcgtactgaggggcgaacagagatacaactcaaagcggaaggggtacctccggcatttattacattacaagttctgcctaatttggcggctgaccccatcgatattgagttaccttttcccgctaaaggctgtctcgctcttgatgtaaacggacgtcctctggataaaaacattacgctgcatgatctgctgggttccagagcgtttctgttctccagaaatggcgagccgacaagatatacattgcagttgcatttgcgctccgttagtggattacaggcatggcacgaatggtgttatacggcgttgagcgatcgtcctgttgaattgaatctctatagtctgcgcgaacatattgagaacctgatttcacttgaggcaggtattgaccaggttgttgagatgcgtattacgggggcgggtgtggtcatggcctggcaaattcgtcgctataaatacagtctgcgctatgattatgaaaaagaactattactcagccagtcagtgaaccatcgtgctggacagattccttcccccgttatcatgctgttaagtgaacccgagaggaaatccatccccttagcatcaagaatgagcgagggagtgcctgtcggtgaatatgagttgagctcaatcgttaacaaaaatggaccgtggttggttgtccctaaaccgggtgaagagatggcttttcgtccctgcttcattcgtggcgaatcttcgttaccggtagaagaaagcaacatccgctcattgcagaaagcgacccagctttttaatccacaggcagaagttaataccatcacactggttctcggacagatggctaacgatcctgcccattccggctggcaatttatgcgtagcctgtacgatcaatttggttatttaccactggcaacctttgaagtatggcgtgcactggtgcagcatccgcaggcattggcaatgtcgctcttcaaatttgaaatgtcagcagagtacctgagtcgtattgagaatgagttccctattctatgggagtttttccccatctttgagatcaaagcggcatctgagcgtttcaaattgttcctgagccaaaaaggtgcaccggaggaaacccagaaattactggttactaatatgtttcaacggctggggctcgtgttcccgacatatgccgatgaaattgagaaatggttaagtaacggacatctccccccgtctattcctgagtcttttgtccacgtgtggtatcaggagcttttacgtgagcatagtgaagctcaatggccagagtacggcagcaagcggctgcatagctggatggcatcacaaaaaaatccagtgattggtattaatcctgacgcaaatcaccgctattccgtggccttgttacccgtcttcgctgcagctgtggcaagcggaaatgcttcttttgaatctgtatttgaccgtaaacccggtgccgtatttttcctgaggcaagtcagggatttcgattcccgctggtttaaggccatcttccagtgcagcctgttgcgttatgttgctaaaaaataa

SEQ ID NO: 28624 - DNA, 6345 bp, Escherichia coli
atgactacacgctatttttcgtcacttattgaacaatcgttgtctcgttcaactgaagcaacgctcagtatcatgggcgttacaaacccgcagttgcgtgaacatctcgcgcagcaaatgggggctgattgtgggaaaccgggctcattccttgcttctccggtattccagcaaatgtttggctggaaggagtcaaaccacacgatgcgcagtctgacggaaggcaacgcattgttgagcaaagcagtggttgattcactggatgatcagagtaatggccggtaccgatttggtgctgactggaagccttttacacaccagttagccagttggaaagctttgctggaaaagaaacattcagtggtggtaaccagtggtacgggttcaggtaaaacggaatgttttatggtaccggtgctggaagatctttaccgggaactgcatgaaaatggcaacaatccgttggtcggtgtccgagccctttttctctatccattgaacgccctgattaattcacagcgcgagcgtctggatgcctggacgcgtggttttggtaccgggatccgctactgcctttacaacggcaacaccgaaaacctacacgcttcggtaaaaagcgaacaggcaaaaaggccgaatgaggtgctctcgcgcgaaaaaatgcgtgaagaacctgcgccgattctggtgaccaacggcacgatgctggaatatatgatggttcgccaggtcgacgccccgattatccagcaatctaaagcacaaaaatcactacgctggattgtactggatgaagcgcatacctatgtcgggtcgcaggccgctgaactggcactccagctgcgtcgtgtgatgacagcgtttggcgtgacgccagatgatgtgcgctttgtagcgacctctgcgaccattgccggcagcgacgccgaaaagcagctgaaaaaatttctctctgaattatccggtatcccgcaggagcgcatcgatgttctggacggaagtcgggtgattcctgaactggaaccatccaaaaacgtttctcttccgttagacgaaatagagcaaatacctgatctggaactaagagataaaaatgataataaaattaaagggataagctctgatcgcttttatgcgcttacgcattcccccgaagcacgttacatacgtgagatgttggtcaaacagcccaatccgatgaagctggatgagataacagagcggttaaacgtgctgacaaaacagcattacagccagcaggaagtactgcgttggatcgatgtctgttcagggactcaacctaatgcaaaggatcccgcatttcttaaagtcagggcgcatatcttccagcgtaatacccagggaatatgggcttgtgtggataaaaattgcagattaaagcacggtacaccgctcgaaaaaggctggccctttggctatgtgtatgtgaaccagcgacaaaattgcgactgtggaagccctgtctacgaagtggcgttctgtaatgattgtaatgagcctcatcttctggcgcaggacaaaaagggcaaacttgtccaatgggaaaataaaggtggcgatgagttctccttgcaggatgaagtacctgttgaacatgacactacagaggaaaaagtcgaaaaagagaacggtttcctgcctccgttgattattgccgcaggagagaccagcgagacaggctataccctacaacgcctcgaccgccagacgcgccgtattggcgttattaacaatgacagcattccgctgattattaatgatgttgaacaggtttgtagcgccagtggctgtggctacagaggcatgagtgggaaacagcccttccggcgtgcactattaggtgggccattttacgttactaatatcgtgcccaccgttcttgagtattgtcaggactttaccagtgatgaaggcaaagagggcgtcggaccagattcgttgccagggcgaggacgtcgactcattacctttacggacagtcgacaaggtacagctcgaatggcggtgcgtatgcagcaagaagcagaacgcagtctcttacgcggaagcgtagtcgaaattctgagctggcatcaacggacgcaaacgtccacggcgccgaatgccaatgccgatctggaaaaattagcggccagggcgaagcaagcccgtgagcaggcagaagaatatcgaagctggggaatgccagaccaggcgaaattgtcacaagcgcaggctgaacagcttgaacaggcttatcaggctgcaaccggtggaaaagcagcaactaccctggtatcccgcacctggacagaaatggttaacgagcttaaagataaagccgatatccgtggcccggtactgaaatataaccactatttgcagcctgaagtgtttaataaaaacggcgggccactaaagctttcggaaatgttgttgttccgggaattcatgcgtcgccctaaacggactaacagcctggaaacacaggggctggttcaggttggttaccaggggctggagaaaatacataagagccccttgcactggcaggaaaaaggattaacgctggatgactggcgcgattttctcaaggttacgttggatctttatgttcgcgaaagcaacttcacacagctggatgatgagctgaaaaactggattggtagccgtttttcatcaaaattcgtccgtaacccggaatcaaaagatcctgaagataatcagaacagacgctggcctcaaattcgtaatggcaacgtatcccatcgtttagcgaagttactgatgctgggggctggattcaaaaccgtcaatacggcgactattgatattatcaatacatggctgaaagaagcatgggcccaacttaccggaccacttgcagtactgaaacccgatggcaaccgtttttatttaccgaaagagcatatgactttttctttaatcacggatgcctggatttgcccggtaaccaataaaatcctggatacggcttttaaaggcttaaccccttatctgcccacccatatttcgttcgagcatcttacccaggcgcaatatgacacttttgtcgcgcagaaagtcaccatgccggaaatctggaagctggatcgttcacaggaagactacgcagagggtctggcaaaagcacgagactgggtcaacaatgatccgctgatcgcacaattgcggtcggaaaacgtctggacagacatcaacgatcgtgtcgtggaaggcggtttctactatcgcactgccgagcactctgcccagcagtcgtcagaacgcctgcaaagctatgaaaagatgttcaagaacgggcaactaaatgttctcaactgttccaccaccatggaaatgggggttgatattgggggcattactgcggtggtaatgaacaacgttccgccacatccggccaactatttacagcgcgccgggcgagccgggcgtagtaaagaatcacgcgcgatctcttataccctatgcaaaggtaacccacacgaccagcaggtttttgccaacccactctggccatttgaaaccatgatcccggcacccatggtcgcgatgaactccgcccgactggtgcaacgtcacgtcaatgcattattactgtctgactttttatgtaacgttattggcgaaaccgataaagagaaaaccagcctcgatagcctctggtttttcggtgaagatgacgggcagtcaaaatgcgaacgctttaaagtctggctggaacgcccggttcttgatatcgacacggcgctggaacggctggtgaaaggtacggcgttgcatggcgcaagagccgaacatctgcgggataaaacaatcaatgcgatcaccttcctgcaacagcggtggctctccgtttatcgcgatctcgtgacccaggagcgtgagtcgcagccgcaaacgccttatcgtaagcgcatagagctggagaagaaacggcactgtggcgagtatctgctgcgcgatctggctgccagaaccttcctgccgggatacggcttcccgacagatgtagtgacgtttgataacttcacaatggaagattatatccgcgaaaaatcgcaaaaaagtcgtgataaaaaggaccgtgaagataacgtctcccgttataaaggattaccttcccgtaacctcggggtcgctattcgtgaatatgcaccgggagcagagatcattcttgatggccgtgtcttccgctctgccggtgtctcactgcactggcacaatattaatgctgataccaatgaagcccagcgtctggattgcgcctggcgctgtcacaaatgcgggaccattggctatgaagagggcatgagcagttccgggatgctcttttgctccaacagcgcctgcggcgaaaaaatcatcctggataatcgccgtcaggtgctgcagcctgccggttttgtcaccgatgcacatgctccggtaacgaacaatattgaaaccatgaaattcgtcccggttgtccccgcctgggtctttgttaaagcagagcccgtaccgttgcctaacccgctaatgggttatatggcttctggggctgatgggcatgttttccagcaaagtctgggggaaggtggacacggttatgcattgtgtctgagctgtggccgtgcggagtcgatgctgaatgaaaatgatgctccgaaaagtatggaagctcactatccaccgcgtccgggtaaagcggaccgcgacagccagaatcatcgtctgatttgcccaggttcgacggcactcgtgaagaaagtcaccctgggcgcactggcgcgcaccgatgtctttgaaatggttctgcgcaaaccgcaaaacggcgagtatctgccagataacacagaggaggggcggattgttgccatgactctggcagttgctctgcgtcaggcgctggcgggcgttctgggtatctccgccgcagaactcggctattctgtacgtccggtcagactggaggatgggcaatcggttttagccgttcagctttatgatgtgatcagcggtggtgcaggttttgcctccagcgcaccggtacacattgaagctattttacagggaatggtgaaacagttaggctgccgccattgtgatactgcatgtagtgaatgcctgcttgattcccagactcgccacgatcacgatttgctggatcgcaaagcggcgctggcctggcttggcgatgacttcacgtattacatcggtttaccggatgaagagacattctcgctgccggatgcccgctactgccctggcgctattggcgatacgattcgccgggcgattaacgaaggcgctgaaaagctcaccctgtggatgaccggtgcgcccaatgagtgggatttatacgcccgtcagttccgcgcggctattcagagctatcggctaaaagacaacgtcgaggtcgatcttgttattcctgcgggagtggatgatccggacctgttgcatgaactatcgcaatttactgcactgggtgtgcgactgtgccatgttgaacaagatctgcaattaccgattgttgcccaggttacctttgccgatcgcgtgatgacgctggcctctcgcagccagcaggcaacgattccggggccggagtggcacctgaatgacgaactggtggtgcgtagtctcggttataaaacggtagaactgaacgagtttattctgccggctaaagccgccaacgctgtcgagcgggtcaaagacattcagatccacaaacagttgaatggaccactttcgcagtttggacaacgcttctgggacgtgctgtttaacgaccatgaagaagcacagtcactgatgaataacacgcgaattaccggcgttcactataccgatcgctatctacaaaacccggttgcgctggcgttgttggggtcaattctgaaaccgctaaaaacaaagctgaccgatggcgctgaagtggcgctggatacgttgtttaaagataaagatcgccccggtaaccggcctttccatgactggatgagcatagcggattttcaggatttcgctgatcagtggtttgctgctgcgctgggcaggccggtagaactgacggtgttcgactcgccgcgcgatatccctcaccatcgtaaactgacggtgacttttgaggatggtcagatattgaagatccgcttcgatcaggggatgggctactggcgtatcaactttgcatcgaaatggcattactttgacttcagcgatgacgtttctttccagttagtcaaaatggctcaggcctgtcaggaagggaatgtggctaacagcgaagatagctgggcaacggatgtactggtggaggtgatcgcctcctga

SEQ ID NO: 28625 - DNA, 3291 bp, Escherichia coli
ttgggtcaatcagaatacatttcatgggtaaaatgtacttcctggctaagtaactttgtgaatcttagagggttgagacaaccggatggacgtcctctttatgaatatcatgcaaccaatgctgaatataaccaattaacgcagctactctgtgctgttggtcaatcacaatctaatatatgtaatagagactttgctgcctgttttgttcttttttgctctgagtggtaccgcagggattatgaacggcaatgcggatggacgtgggaccctatatataaaaaaatagggatttcattcaccgccacagagcttggtactatcgtaccgaaagggatggaagattactggctgcgcccaattcgattttatgaatctgaacgacgtaattttctcggaacattattcagtgaaggtggtttacctttccggctactcaaagaatcagacagtcgctttctggctgttttctccaggatccttggacaatatgagcaagcaaagcagtcaggtttttctgccctttcgctggcaagagctgtcatagaaaaatcagcgctgccaactgtttttagcgaagatacctctgtagaacttatcagtcatatggctgataacctcaattccttagtacttactcacaacctaacaaatcacaaagaaccagtacaacagcttgataaggttcaccctacctggcgaagcgagtttccaataccgttagatgatgaaacaggaacgcattttttgaatggactgctatgcgcagcctctgtagaggctaagcctcgactacaaaaaaataagagtacgcgttgccaattctattggtcagaaaagcatccagatgagcttagggtgatagtatctcttcctgacgaagtttcctttcctgtaactagcgagccgtcaactacgcgctttgaacttgccatttatgaagatggtgaggaagtctctggccttgggccagcctatgcttccctggaaaacagacaggcaacagttcgattacgtaaaagcgaagtgagatttgtcaggcaaaatccatctgcaggtttgtcgttagtggctcgtgctggagggatgattgttgggagcattaaacttgatgacagtgaaattgccattggtgaggtgccgttaaccttcatcgttgatgcagatcaatggctgttacagggacaggcctcctgcagtgtgcgaagcagcgatgttctgattgtgctccctcgggacaatagcactgttgctggttttgatggccaatcgagtgcagtaaacgtattaggacttaaagcgctacctgttaagggatgtcaggacgttacagttacagcaaatgaaacttatcggattcgcaccggaagagaacaaatcagcatcggaaggtttgctctaaatggaaagcgtgcaagctgggtttgtcatccagatgagacatttattggtgtaccaaaagtcatttctacactaccagatattcaaagcattgatgtaacgcgttacctgagcggaatttcaattgagcaatgtcatatacaagagatgctaggggctcaatatctttctatccgtaatagtaataatgaaacgctcttgcgtcgcaaaatcggtatcttgcctgctgatttcagtattgagataaaaggtggaatgcacgcaaatgaaggcactatcgtaatcaccacacagcatccttgtgtagcaacacttaaagataaaacattggaggctacacgtaagcgtactgaggggcgaacagagatacaactcaaagcggaaggggtacctccggcatttattacattacaagttctgcctaatttggcggctgataccatcgacattgagttacctttcccagctaaaggctgccttgctcttgatgtaaacggacgtcctctggataaaaacattacgctgcatgatctgctgggttccagagcattcctgttctccagaaatggtgagccgacaaaatatacattgcagttgcatttgcgctccattagtggattacaggcatggcacgaatggagttatacggcattgagcgagcgtcctgttgaattgaatctctatagtctacgtgaacacattgaaaatctgatttcacttgaggcaggtattgatcaggttgttgagatgcgtattacgggggcgggtgtggtcatggcctggcaaattcgtcgctataaatacagcctgcgctatgattatgaaaaagaactattactcagccagtcagtgaaccatcgtgctggacagattccttcccccgttatcatgctgttaagtgaacccgagaggaaatccattcccttagcatcaagaatgagcgagggagtgcctgtcggtgaatatgagttgagctcaatcgttaacaaaaacggaccatggttggttgttcctaaaccgggtgaagagatggcttttcgcccctgcttcattcgtggcgaatcttcgttaccggtagaagaaagcaacatccgctcattgcagaaagcgacccagctttttaatccacaggcagaagttaataccatcacacgggttctcggacagatggctaacgatcctgcccattccggctggcaatttatgcgtagcctgtacgatcaatttggttatttaccgctggcaacctttgaagtatggcgtgcactagtgcagcatccgcaggcattggcgatgtcgctcttcaaattcgaaatgtcagcagagtatctgagtcgtattgagaatgagttccctattttatgggagtttttccccatctttgagatcaaagctgcatctgagcgtttcaaattgttcctgagccaaaaaggtgcaccggaggaaacccagaaattactggttaccaatatgtttcaacggctggggctcgtgttcccgacatatgccgatgaaattgagaaatggttaagtaatggatatctccccccgtctattcctgaatcttgtgtccacgggtggtatcaggagctcttacgtgagcacagtgaggctcgctggcctgaatatggctgcaagcgtctgtataaatggatgatgtcacaaaaaaatccagtgattggtattaatcctgacgcaaatcaccgctattccgtggcctggttacccgtcttcgccgcagcggtggcaagcggaaatgcttcttttgaatctgtatttgaccgtaaacccggtgccgtatttttcctgaggcaagtcagggatttcgattcccgctggtttaaggccatcttccagttcagcctgttgcattatgttgctaaaaaataa

SEQ ID NO: 28626 - DNA, 6345 bp, Escherichia coli
atgactacacgctatttttcgtcacttattgaacaatcgttgtctcgttcaactgaagcaacgctcagtatcatgggcgttaccaacccgcagctgcgtgaacatctcgcgcaacaaatgggggctgattgtgggaaaccgggctcattccttgcttctccggtattccagcaaatgtttggctggaaggagtcaaaccacacgatgcgcagcctgacggaaggcaacgcattgttgagcaaagcagtggttgattcactggatgatcagaataatggccggtaccggtttggtgctgactggaggccttttacgcaccagttagccagttggaaagctttgctggaaaagaaacattcagtggtggtaaccagtggtacgggttcaggtaaaacggaatgttttatggtaccggtgctggaagatctttaccgggaactgcatgaaaatggcaacaatccgttggtcggtgtccgagccctttttctctatccattgaacgccctgattaattcacagcgcgagcgtctggatgcctggacgcgtggttttggtacagggatccgctactgcctttacaacggcaacaccgaaaacctatacgcttcggtaaaaagcgaacaggcaaaaaggccgaatgaggtgctctcgcgcgaaaaaatgcgtgaagaacctgcgccgattctggtgaccaacggcacgatgctggaatatatgatggttcgccaggtcgacgccccgattatccagcaatctaaagcacaaaaatcactacgctggattgtactggatgaagcgcatacctatgtagggtcgcaggccgctgaactggcgctccagctgcgtcgtgtgatgaccgcgtttggcgtgacaccagatgacgtgcgctttgtcgcgacctctgcgaccattgccggcagcgacgctgaaaagcagctgaaaaaatttctctctgaattatccggtatcccgcaggagcgcatcgatgttctggacggaagtcgggtgattcctgaactggaaccatccaaaaacgtttctgttccgttagacgagatagagcaaatacctgatctggatctaagagataaaaatgataataaaattaaagggataagtcctgagcgcttttatgcgcttacgcattcccccgaagcgcgttacatacgtgagatgttggtcaaacagcccaatccgatgaagctggatgagataacagagcggttacacgtgctgacaaaacagcattacagccagcaggaagtactgcgttggatcgatgtctgttcagggactcaacctaatgcaaaggatcccgcatttcttaaagtcagggcgcatatcttccagcgtaatacccagggaatatgggcttgtgttgataaagattgcagattaaagcacggtacaccgctcgacaaaggctggccctttggctatgtgtatgtgaaccagcgacaaaattgtgactgtggaagccctgtatacgaagttgcattctgtaatgattgtaatgagcctcatcttctggcacgggacaaaaagggcaaactagtccagtgggaaaataaaggtggcgatgaattctctttgcaggatgaagtacctgttgaacatgacgctacagaagaaaaagtcgaaaaagagaacagttttcagcctccgttgattattgccgcaggagagaccagcgaggcaggttataccctacaacgcctcgaccgtcagacgcgccgtattggcgttattaacaatgacagcattccgctgattattaatgatattgaacaggtttgtagtgccagtggctgtggctacagaggcatgagtgggaaacagcccttccggcgtgcactattaggtgggccattttacgttactaatatcgtgcccaccgttctagagtattgtcaggactttaccagtgatgaaggcaaagagggcgtcggaccagattcgttgccaggacgaggtcgtcgactcatcacctttacagacagtcgacaagggacagcccgaatggcggtgcgtatgcagcaagaagcagaacgcagtcgcttacgcggaagcgtagtcgaaattctcagctggcatcaaaggacgcaaacgtctacagcgccgaatgccaatgccgatctggaaaaattagcggccagggcgaagcaagcccgtgagcaggcagaagaatatcgaagctggggaatgccagaccaggcgaaattgtcacaagcacaggctgaacagcttgaacaggcttatcaggctgcaaccggtgggaaagccgcgactatcctggtatcccgaacctggacggagatggttaacgagcttaaagagagagccgatatccgcgggccggttctgcaatataaccattatcttaagcctgaagtgtttaatgaaaacggcggcccccttaagctttctgaaatgttgttgttccgggaattcatgcgtcgccctaaacggactaacagcctggaaacacaggggctggttcaggttggttaccaggggctggagaaaatacataagagccccttgcactggcaggaaaaaggattaacgctggatgactggcgcgattttctcaaggttacgttggatcattacgttcgcgagagcaacttcacacagctggatgatgagctgaaaaactggattggtagccgtttttcatcaaaattcgtccgtaacccggaatcaaaagatcctgaagataatcagaacagacgctggcctcaaattcgtaatggcaacgtatcccatcgtttagcgaagttgctgatgctgggggctggattcaaaaccgtcaatgcggcaactattgatattatcaatacatggctgaaagaagcatgggcccaacttaccggaccgcttgcagtactgaaacccgatggcaaccgtttttatttaccgaaagagcatatgactttttctttaatcacggatgcctggatttgcccggtaaccaataaaatcctggatacggcttttaaaggcttaaccccttatctgcctacccatatttcgttcgagcatcttaccctggcgcaatatgacacttttgtcgcgcagaaagtcacaatgccggaaatctggaagctggatcgttcacaggaagactacgcagagggtctggcaaaagcacgcgactgggtcagccatgatccgctgatcgcacaattgcggtcggaaaacgtctggacagacattaacgatcgtgtcgtggaaggcggcttctactatcgtactgccgagcactctgcccagcagtcgtcagaacgtctgcaaagctatgaaaagatgttcaagaatgggcaactaaatgttctcaactgttccaccaccatggaaatgggggttgatatcgggggtattactgcggtggtaatgaacaacgtaccgccacatccggccaactatttacagcgcgccgggcgagccgggcgtagtaaagaatcacgcgcgatctcttacaccctatgtaaaggtaacccacacgaccagcaggtttttgccaacccgctctggccatttgaaaccatgatcccggcacccatggtcgcgatgaactccgcccgactggtgcaacgtcacgtcaatgcattattactgtccgactttttatgtaacgttattggcgaaaccgataaagaaaaaaccagcctcgatagcctctggtttttcggtgaagatgacgggcagtcaaaatgcgaacgctttaaaatctggctggaacgtccggttcttgatatcgacacggcgctggaacggctggtgaaaggtacggcgttgcatggtgcaagagccgaatatctgcgggataaaacaatcaacgcgatcaccttcctgcaacagcggtggctctccgtttatcgcgatctcgtgacacaggagcgtgagtcgcagccgcaaacgccttatcgtaagcgcatagagctggagaagaaacggcactgtggcgagtatctgctgcgcgatctggctgccagaaccttcctgccgggatacggtttcccgacagatgtagtgacgtttgataacttcacgatggaagattatatccgcgaaaaatcgcagaaaagtcgtgataaaaaggaccgtgaagataacgtttcccgttataaaggattaccttcccgtaacctcggtgttgccattcgtgaatatgcaccgggagcagagatcatccttgatggccgtgtcttccgctctgccggtgtctcactgcactggcacaacattaatgctgataccaatgaagcccagcgtctggattgcgcctggcgctgtcacaaatgcgggaccattggctatgaagaggggatgagcagttccgggatgctcttttgctccaatagcgcctgcggcgaaaaaataatcatggataatcgccgtcaggtgctgcagcctgccgggtttgtcaccgatgcacacgctccggtaacgaacaatattgaaaccatgagattcgtcccggttgtccccgcgtgggtctttgttaaagcagagcccgtaccgttgcctaacccgctaatgggttatatggcttctggggctgatgggcatgttttccagcaaagtttgggggaaggtggacacggttatgcattgtgtctgagctgtggccgtgctgagtcgatgctgaatgaaaatgatgcgccgaaaagtatggaagctcactatccaccgcgtccgggtaaagcggatcgcgacagccagaatcatcgtctgatttgccccggttcgacggcactcatgaagaatgtcaccctgggcgcactggcgcgtaccgatgtctttgaaatggttctgcgcaaaccgcaaaacggcgagtatctgccagataacacagaggaggggcggattgttgccatgactctggcggttgctctgcgtcaggcgctggcgggcgttctgggtatctccgccgcagaactcggctattctgtacgtccggtcagactggaggatgggcaatcggtattagccgtacagctttatgatgtgatcagcggtggtgcaggttttgcctccagcgcaccggtacacattgaagctatattgcagggaatggtgaaacagttaggctgccgccattgtgagactgcatgtagtgaatgcctgcttgattcccagactcgccacgatcacgatttgctggatcgcaaagcggcgctggcctggcttggcgatgacttcacgtattacatcggtttaccggatgaagagacattctcgctgccggatgcccgctactgccctggcgccattggcgatacgattcgccgggcgattaacgaaggcgctgaaaagctcaccctgtggatgaccggcgcgcccaatgagtgggatttatacgcacgtcagttccgcgcggcggttcagaactatcggctaaaagacaacgtcgaggtcgatcttgttattcctacgggagtggatgacccggacctgttgcatgaactatcgcaatttactgcgctgggtgtgcggctgtgccatgttgaacaggatctgcaattaccgatcgttgcccaggtcacctttaccgatcgcgtgatgacgctggcctctcgcagccagcaggcaacgattccggggccggagtggcacctgaatgacgaactggtggtgcgtagtctcggttataaaacggtagaactgaacgagtttattctgccggctaaagccaccaacgctgtcgagcgggtcaaagacattcagatccacaaacagttgaatggaccactgtcgcagtttgggcaacgcttctgggacgtgctgtttaacgaccatgaagaagcgcagtcactgatgaataacacgcgaattaccggcgttcactataccgatcgctatctgcaaaacccggttgcgctggcgttgttgggatcaattctgagaccgctaaaaacaaagctgaccgatggcgctgaagtgacgctggatacgctatttaaagataaagatcgccccggtaaccggcctttccatgactggatgagcatagcggattttcaggatttcgctgatcagtggtttgctgctgcgctgggcaggccggtagaactgacggtgttcgactcgccgcgcgatatccctcaccatcgtaaactgacggtgacttttgaggatggtcaggtattgaagatccgcttcgatcaggggatgggctactggcgcatcaacttttcatcgcaatggcattactttgatttccgcgatgacgtttctttccagttagtcaaaatggctcaggcctgcaaggaagggaatgtcgccaacagcgaagagagttgggcaacggatgtgctggtggaggtgatcgcctcctga

SEQ ID NO: 28627 - DNA, 3291 bp, Escherichia coli; identical to SEQ ID NO: 28561

SEQ ID NO: 28628 - DNA, 6315 bp, Escherichia coli 0.1304; identical to SEQ ID NO: 28464

SEQ ID NO: 28629 - DNA, 2937 bp, Escherichia coli 0.1304; identical to SEQ ID NO: 28445

SEQ ID NO: 28630 - DNA, 6315 bp, Escherichia coli 08BKT055439; identical to SEQ ID NO: 28464

SEQ ID NO: 28631 - DNA, 2937 bp, Escherichia coli 08BKT055439; identical to SEQ ID NO: 28445

SEQ ID NO: 28632 - DNA, 6315 bp, Escherichia coli 08BKT77219; identical to SEQ ID NO: 28464

SEQ ID NO: 28633 - DNA, 2937 bp, Escherichia coli 08BKT77219; identical to SEQ ID NO: 28489

SEQ ID NO: 28634 - DNA, 6315 bp, Escherichia coli 09BKT024447; identical to SEQ ID NO: 28464

SEQ ID NO: 28635 - DNA, 2937 bp, Escherichia coli 09BKT024447; identical to SEQ ID NO: 28445

SEQ ID NO: 28636 - DNA, 6315 bp, Escherichia coli 09BKT076207
atggacgttcagcaactgcattatgcgccacttctaaatcagcttcatcagcgtgcggtgaggtcggtggtaagtcagttggcattgcggagcaagtcgttgactcattatctggaatcacaatattttcagcctcccggtcaggaggggtcactgcttgcagacccggtattcgaaagtacattcggctggatgcctgcggatgaaacaatggaggatttgcgggacaagctgatctccagcccgctggttgatgcattgagcaaagcgccagtgccatttcgtcatcaacttactgcgtggcgaacgattctggaagacaaaaaatccttgttagtgagcagcggtacgggatccgggaaaacagaatgctttatggtaccggttctggaagatcttattcgtcagcaaaaatcgacccgccagtcactaacagggacacaagctattttcttgtatccgttaaatgcattaattaacagccaacaggagcggcttcgcgaatggacgcgcggatttaaggggaaaatacgcttcgcgctatataatggcgaaacccggcataccaaatacgaaattcaggaagatcagttgaaagtacctgaacaagctttgagtcgggaagccatttatgaagaaccaccttccatcatggtgacgaataccaccatgctggaatatatgctgattcgtcgtaaagatgccccaatcatcgaaaagtctcaggggatgttaaagtatatcgtcctggatgaagcccatagttatattggttctcaggctgctgagttagcgctgcttttacgtcgtgttatgcaggctttcaatgttggacccggcacagataaacctgtgcagattatcgcgacctctgccactattggtgaagactctcctgaaggtaataaggagcttgctaaatttgtcgctgatctcgcgggcgttacagaacgtgatgtcaaagtggttcgcggttatcgacaaataccgcgggtatcggagtcgctgattcgtcatgaataccccacatctttaacttctcttaaatccctgagccctcaggatctttaccaacagctttgtcattaccgtgtggcccagcaattgcgtcaggcgttaactcatcccggacggcaggcagtacgtttgagtgagttgctcaatgttgccagaagaacctggccagatattaatcaccgtgagctactgcaactcctcgatctaatggcaagatcgcgagaaggtgaactggcttttacgccattacgtatgcatgggtttatcagaacactggcgggtctatgggcatgttcaaacaaacaatgctcacataaagcacatgaattaaatcagagtgactggccatttggtcaggtatggtttgagcagcgccaatattgtgactgtggagcgccggtatttgaagttttacgttgctccgggtgtggttcagcttatttgtctgccaaagaggagatgcgcggtgatggaacgaactggttggtagcgcaaccagccactgccgaagtggatgagtttgctcttgatgtagatgtttattctgaagatgaagacaacgacgaattagacaataactctcaatttgatcgtctgattgcgagcgatggtgaaaaatatatcatttcactggaagaaacgacggcggggaaaattgatagtgaagcgcaaaagcactatgaaataaacctgttaagaccggaatctcgaggtgagggacgcaataactcctttgcttgtgtttgctgtggtgacactcaacggaaaaataatcctttattccgtccgcttcggctcggcgcgcccttttttttaaatgaaattattcctactctgctggagttttctccattaccgcaaacaagagaagagcagttaggaccgtttaatggtcgacgcttgctcacctttacggattcgcgtcagggtaccgctcgcatttcagcccgcttacagcaggatgccgataaagcgacgttgcgagctctttgttaccaggagctggcaaatattacagagccttcagcaaaactcagcccggcacactgtgcactgttagagaaagttattagccagttttctgtcctccctttaaaaaattccatcgacgcgctgaaaaaagcgatggctgcgaatgaggagcttagcccgacggacattcaggcacttaaaattattgagccgatggtgagttccttaagcacggagcatgctgaagcgatgcaaatacttcaggctaactctggcaatcagcagaagaaaaccatgtcatggcaaacgctgtctgaacagctggttggcagtgtggaccttgccgatagaatgagaggcagttttaaagaattgtctgggcttgatcttactaaacaacagtttgcagatttttgtttatacagcgagtttggtcgccgccctaaaaatgcctggaccctcgaaagtctgggtctggtagccattcactatccattcattgataaagttacaacctgcccgcaggactggaagacattattacccgatcccgataagcaattagcggaatggcgtaatttattgaagattactcttgatttctttatccgtgaaaacagtgccgttttttacgaaaacgagcaataccctcgctggatgggggcacgtttcccggtaaaaatgctccaggggccagataaaaaaaacaaagggcagaaacgtgatcaactttggccacaaatacgcgatcgccattataaccgggtcattaagctattaatcgcagtctttccggcaatacaacctgagcaggctcactggaaatcgttagttaaccacttaatgattgaggtctgggatgcaattcgaccctgcttacgtcagtttgagtcgggttatcagctggatattaaacaacaagctgaattttacagtccaaagcaagtgtggcgttgcccctatactcgacgtgcgttagacgtcacgttgctgggatactctccgtatttgccgggtagcaaagaaattgcacctgaaaaagcagtgttgattgaaatgcctgagcttcctgtacgtcactggcgtttgtctggtggtggagaaatcgcccgagaagaacgtctggagtggctggaaagtaatgcgctgattcaacatgcccgcgaggaaggattatggtctactcgcagcgaccgactggccctgaaagatagctggtatcgtctggaggaacactctgcgcagagaacgcctgagcagaaccagtttaatgaaaaacaatttaagtcaggcaaagttaatgtgctgaactgttccacgaccatggagatgggggtggatattggtggtatgagtttggtggcaatgaacaacgttcctccagcgccggcaaattatttgcaacgtgcaggtcgcgcggggcgtcgtggagagagtgcatctgctgccattacgttatgtaaaaacacggcgcatggaatggaggtattcaaagaccccctctgggcgttcaacactactgccagtgcgccacgggttcgttttgggagcagtagtattgttcaacgacatgttaatgccctggttttaggtctgtttttacgagctgaagttcctgatgcgacaaaactgagttgcaaatggttctttgaaggtgatgagagccagtgtcttcgttttctccattggttaaatcaccaggccgatcagctggcggataaacttaaacgccttactcagggaaccgtactgatgtcattgacggcaacccagctcttgacccgcacacaagcaatgatgcagcaggttgatatccgctggagaagccaacttgcgatactgttggaaaatatcgaagcgttgaaggcggataacagcgcgtgggaagaaacaccagcaggtaaagccatcgcttatcagcttcgtgattatcgcggtgcatatctgttttctaaactcattagtgaagcgttcctgccggggcatggtttcccggttggcgtagtcaatttcaattatctgacggcagatgagctggaaaaacgtcgcgcaataaaagccactcaggctgaccctaatgaagggggagaaagcttttctcgtcgtattgaaaaattgcccagccgtgatttgcctacagcattacgcgagtatgcgcctggtgcagatgtggtattgggcggaaaagtatatcgttcctcgggcattatgcttggcaaggtgcttgccagcgggcaggagctgtcaggcgatcatcatattccgtggttctggcattgccgtaaatgtggtgcgggggcaaccagtactacccatcctgtcgaatgtagtcactgcaaagcggatatacagcaacttgatgtgaagcgttatttacagcctgttggttttgcgacagatattcgttatcaggcacataatgatgtatccatgcctgcacaacttccctggaaagatccacgtgttcttgtaccgtcttcggtgtgggtttctttacccgatgctgggctaggacgttaccgttttagccatagtggggaattgttccacttcagtgaaggggaatttgggcacggctacgcaatttgcctctcatgtggtcgggcagaatctcaaactcaaccccagcgtacccctgaaaatctaaagaacccagagagggaaaatacgcattacctgttgcgagggggcagtaacgatcgtcaggggagcaataaattgtgccacggtcatgtgcataaagatctgtggttgggatatagcagtcgtacagatatggttgagctgcaactcaatgatgataatggcctgttgatccgtgatgaggttgccgcgcgttcccttgcggtcgctttgcgtgaagggttagcgcataaattgggtatcgaaaatactgagctgggcgtgacgacgcagcaagcgcgcgatatcaatggctataccggatattccatcttcatttacgacaataatgcgggtggtgcaggttatgcagtgcaattgatcgaccattgggctgatgtctttaattacgccagaaaattgctcgattgcagttgcgataaattctgtcaccactgcttgctcagctacgacagtcagcattatgtcaacagattagatcgtcaccatgcattaaccctgcttaccaatgtacggttgcagcgacttaacctcgcgccagaatatcagtacttcggcgatggtagccgggttgaaactaaccctctgagtttacgtattgcgcaatgcctgaacagcgagatttatgactcctgctcgctggttcttgcggggccgcaggaacagtgggactttgcccaatggccattatttaaagagttgctccagtttgcctcctccggtgggaatgttgagttgctggtggccacgccgctggcaaacttaactgatagctccagacatcagctttccgcgttggcggcgatgccgggaggtcgcttacaagtgaaatccattgccactgcgcagctcatgcaaggaaaggggcgctggcttgcgcaggtgactcgcgaagggcaaagccaacagtgggccgcagacgacagcgctaccgttgcacctggtgaattatggggacaaagtgcgtcttcaccagtagtgacacttaaaggaacgtccggaaaaaccttctcgggtcagaccttaagtgcagaagatttactgcccgccttacccaccggggcggtgcgcatcaatctctgtgaacaactggacgggccgctggaaggttttggttcgcgtttctggtcgttagtcacgcaacagcacgctggctggaagcaggcatttacccgccacaaagagataacgcatgttgagtacagcgatcgttatcttaatagcccattcacggcgcgtttgttaggtgaaatcttaaccgagctggttgaacagggaatggcggaacgcgccagcctcactgtttgcgtcaaaaaattggattacaactctcgccaacacgacgctctctataacgcgtggcttaatgaggaagatcgtcagcaggttgtgaccactttacttgaagaaggatatctggggcctgcgtggccgggagcaattagctggttaacgggggataaccagagtacggagcatggacgagaactgacagtcaccttcagcgatggcagtcagcattatgtcctgctcgacatggggcttagctactggcgctgtattgaagataccttctttgattttgccctgcgagtaccgcagcaagttgaacggctggcaaacacgcgagcgcgagctgttgccccgggtaatgaccttaggagttatattatcgctggataa

SEQ ID NO: 28637 - DNA, 2937 bp, Escherichia coli 09BKT076207; identical to SEQ ID NO: 28445

SEQ ID NO: 28638 - DNA, 6315 bp, Escherichia coli 09BKT078844; identical to SEQ ID NO: 28464

SEQ ID NO: 28639 - DNA, 2937 bp, Escherichia coli 09BKT078844; identical to SEQ ID NO: 28445

SEQ ID NO: 28640 - DNA, 6315 bp, Escherichia coli 10.0821; identical to SEQ ID NO: 28464

SEQ ID NO: 28641 - DNA, 2937 bp, Escherichia coli 10.0821; identical to SEQ ID NO: 28445

SEQ ID NO: 28642 - DNA, 6315 bp, Escherichia coli 10.0833; identical to SEQ ID NO: 28636

SEQ ID NO: 28643 - DNA, 2937 bp, Escherichia coli 10.0833; identical to SEQ ID NO: 28445

SEQ ID NO: 28644 - DNA, 6315 bp, Escherichia coli 10.0869
atggacgttcagcaactgcattatgcgccacttctaaatcagcttcatcagcgtgcggtgaggtcggtggtaagtcagttggcattgcggagcaagtcgttgactcattatctggaatcacaatattttcagcctcccggtcaggaggggtcactgcttgcagacccggtattcgaaagtacattcggctggatgcctgcggatgaaacaatggaggatttgcgggacaagctgatctccagcccgctggttgatgcattgagcaaagcgccagtgccatttcgtcatcaacttactgcgtggcgaacgattctggaagacaaaaaatccttgttagtgagcagcggtacgggatccgggaaaacagaatgctttatggtaccggttctggaagatcttattcgtcagcaaaaatcgacccgccagtcactaacagggacacaagctattttcttgtatccgttaaatgcattaattaacagccaacaggagcggcttcgcgaatggacgcgcggatttaaggggaaaatacgcttcgcgctatataatggcgaaacccggcataccaaatacgaaattcaggaagatcagttgaaagtacctgaacaagctttgagtcgggaagccatttatgaagcaccaccttccatcatggtgacgaataccaccatgctggaatatatgctgattcgtcgtaaagatgccccaatcatcgaaaagtctcaggggatgttaaagtatatcgtcctggatgaagcccatagttatattggttctcaggctgctgagttagcgctgcttttacgtcgtgttatgcaggctttcaatgttggacccggcacagataaacctgtgcagattatcgcgacctctgccactattggtgaagactctcctgaaggtaataaggagcttgctaaatttgtcgctgatctcgcgggcgttacagaacgtgatgtcaaagtggttcgcggttatcgacaaataccgcgggtatcggagtcgctgattcgtcatgaataccccacatctttaacttctcttaaatccctgagccctcaggatctttaccaacagctttgtcattaccgtgtggcccagcaattgcgtcaggcgttaactcatcccggacggcaggcagtacgtttgagtgagttgctcaatgttgccagaagaacctggccagatattaatcaccgtgagctactgcaactcctcgatctaatggcaagatcgcgagaaggtgaactggcttttacgccattacgtatgcatgggtttatcagaacactggcgggtctatgggcatgttcaaacaaacaatgctcacataaagcacatgaattaaatcagagtgactggccatttggtcaggtatggtttgagcagcgccaatattgtgactgtggagcgccggtatttgaagttttacgttgctccgggtgtggttcagcttatttgtctgccaaagaggagatgcgcggtgatggaacgaactggttggtagcgcaaccagccgctgccgaagtggatgagtttgctcttgatgtagatgtttattctgaagatgaagacaacgacgaattagacaataactctcaatttgatcgtctgattgcgagcgatggtgaaaaatatatcatttcactggaagaaacgacggcggggaaaattgatagtgaagcgcaaaagcactatgaaataaacctgttaagaccggaatctcgaggtgagggacgcaataactcctttgcttgtgtttgctgtggtgacactcaacggaaaaataatcctttattccgtccgcttcggctcggcgcgcccttttttttaaatgaaattattcctactctgctggagttttctccattaccgcaaacaagagaagagcagttaggaccgtttaatggtcgacgcttgctcacctttacggattcgcgtcagggtaccgctcgcatttcagcccgcttacagcaggatgccgataaagcgacgttgcgagctctttgttaccaggagctggcaaatattacagagccttcagcaaaactcagcccggcacactgtgcactgttagagaaagttattagccagttttctgtcctccctttaaaaaattccatcgacgcgctgaaaaaagcgatggctgcgaatgaggagcttagcccgacggacattcaggcacttaaaattattgagccgatggtgagttccttaagcacggagcatgctgaagcgatgcaaatacttcaggctaactctggcaatcagcagaagaaaaccatgtcatggcaaacgctgtctgaacagctggttggcagtgtggaccttgccgatagaatgagaggcagttttaaagaattgtctgggcttgatcttactaaacaacagtttgcagatttttgtttatacagcgagtttggtcgccgccctaaaaatgcctggaccctcgaaagtctgggtctggtagccattcactatccattcattgataaagttacaacctgcccgcaggactggaagacattattacccgatcccgataagcaattagcggaatggcgtaatttattgaagattactcttgatttctttatccgtgaaaacagtgccgttttttacgaaaacgagcaataccctcgctggatgggggcacgtttcccggtaaaaatgctccaggggccagataaaaaaaacaaagggcagaaacgtgatcaactttggccacaaatacgcgatcgccattataaccgggtcattaagctattaatcgcagtctttccggcaatacaacctgagcaggctcactggaaatcgttagttaaccacttaatgattgaggtctgggatgcaattcgaccctgcttacgtcagtttgagtcgggttatcagctggatattaaacaacaagctgaattttacagtccaaagcaagtgtggcgttgcccctatactcgacgtgcgttagacgtcacgttgctgggatactctccgtatttgccgggtagcaaagaaattgcacctgaaaaagcagtgttgattgaaatgcctgagcttcctgtacgtcactggcgtttgtctggtggtggagaaatcgcccgagaagaacgtctggagtggctggaaagtaatgcgctgattcaacatgcccgcgaggaaggattatggtctactcgcagcgaccgactggccctgaaagatagctggtatcgtctggaggaacactctgcgcagagaacgcctgagcagaaccagtttaatgaaaaacaatttaagtcaggcaaagttaatgtgctgaactgttccacgaccatggagatgggggtggatattggtggtatgagtttggtggcaatgaacaacgttcctccagcgccggcaaattatttgcaacgtgcaggtcgcgcggggcgtcgtggagagagtgcatctgctgccattacgttatgtaaaaacacggcgcatggaatggaggtattcaaagaccccctctgggcgttcaacactactgccagtgcgccacgggttcgttttgggagcagtagtattgttcaacgacatgttaatgccctggttttaggtctgtttttacgagctgaagttcctgatgcgacaaaactgagttgcaaatggttctttgaaggtgatgagagccagtgtcttcgttttctccattggttaaatcaccaggccgatcagctggcggataaacttaaacgccttactcagggaaccgtactgatgtcattgacggcaacccagctcttgacccgcacacaagcaatgatgcagcaggttgatatccgctggagaagccaacttgcgatactgttggaaaatatcgaagcgttgaaggcggataacagcgcgtgggaagaaacaccagcaggtaaagccatcgcttatcagcttcgtgattatcgcggtgcatatctgttttctaaactcattagtgaagcgttcctgccggggcatggtttcccggttggcgtagtcaatttcaattatctgacggcagatgagctggaaaaacgtcgcgcaataaaagccactcaggctgaccctaatgaagggggagaaagcttttctcgtcgtattgaaaaattgcccagccgtgatttgcctacagcattacgcgagtatgcgcctggtgcagatgtggtattgggcggaaaagtatatcgttcctcgggcattatgcttggcaaggtgcttgccagcgggcaggagctgtcaggcgatcatcatattccgtggttctggcattgccgtaaatgtggtgcgggggcaaccagtactacccatcctgtcgaatgtagtcactgcaaagcggatatacagcaacttgatgtgaagcgttatttacagcctgttggttttgcgacagatattcgttatcaggcacataatgatgtatccatgcctgcacaacttccctggaaagatccacgtgttcttgtaccgtcttcggtgtgggtttctttacccgatgctgggctaggacgttaccgttttagccatagtggggaattgttccacttcagtgaaggggaatttgggcacggctacgcaatttgcctctcatgtggtcgggcagaatctcaaactcaaccccagcgtacccctgaaaatctaaagaacccagagagggaaaatacgcattacctgttgcgagggggcagtaacgatcgtcaggggagcaataaattgtgccacggtcatgtgcataaagatctgtggttgggatatagcagtcgtacagatatggttgagctgcaactcaatgatgataatggcctgttgatccgtgatgaggttgccgcgcgttcccttgcggtcgctttgcgtgaagggttagcgcataaattgggtatcgaaaatactgagctgggcgtgacgacgcagcaagcgcgcgatatcaatggctataccggatattccatcttcatttacgacaataatgcgggtggtgcaggttatgcagtgcaattgatcgaccattgggctgatgtctttaattacgccagaaaattgctcgattgcagttgcgataaattctgtcaccactgcttgctcagctacgacagtcagcattatgtcaacagattagatcgtcaccatgcattaaccctgcttaccaatgtacggttgcagcgacttaacctcgcgccagaatatcagtacttcggcgatggtagccgggttgaaactaaccctctgagtttacgtattgcgcaatgcctgaacagcgagatttatgactcctgctcgctggttcttgcggggccgcaggaacagtgggactttgcccaatggccattatttaaagagttgctccagtttgcctcctccggtgggaatgttgagttgctggtggccacgccgctggcaaacttaactgatagctccagacatcagctttccgcgttggcggcgatgccgggaggtcgcttacaagtgaaatccattgccactgcgcagctcatgcaaggaaaggggcgctggcttgcgcaggtgactcgcgaagggcaaagccaacagtgggccgcagacgacagcgctaccgttgcacctggtgaattatggggacaaagtgcgtcttcaccagtagtgacacttaaaggaacgtccggaaaaaccttctcgggtcagaccttaagtgcagaagatttactgcccgccttacccaccggggcggtgcgcatcaatctctgtgaacaactggacgggccgctggaaggttttggttcgcgtttctggtcgttagtcacgcaacagcacgctggctggaagcaggcatttacccgccacaaagagataacgcatgttgagtacagcgatcgttatcttaatagcccattcacggcgcgtttgttaggtgaaatcttaaccgagctggttgaacagggaatggctgaacgcgccagcctcactgtttgcgtcaaaaaattggattacaactctcgccaacacgacgctctctataacgcgtggcttaatgaggaagatcgtcagcaggttgtgaccactttacttgaagaaggatatctggggcctgcgtggccgggagcaattagctggttaacgggggataaccagagtacggagcatggacgagaactgacagtcaccttcagcgatggcagtcagcattatgtcctgctcgacatggggcttagctactggcgctgtattgaagataccttctttgattttgccctgcgagtaccgcagcaagttgaacggctggcaaacacgcgagcgcgagctgttgccccgggtaatgaccttaggagttatattatcgctggataa

SEQ ID NO: 28645 - DNA, 2949 bp, Escherichia coli 10.0869
ttgcctatccgcatgattgaaaatgagagcggttatttgattacctatttcagaaggatatatcaggcgcttcgtgggcaatcatctcaatatcctgccgctaaaattgcacaagaattaggcgatacgattcctgtcacaatgcaaaacgaactggtctatgaaatagccggtgaattctgcgagactctctgccgattacttagtgagcatcctcctcatagcagtgatcccgtttctgcattacgtaagctctctccagactggcatcttcaacttccactcgttctccccgaagcgaatgctgcagagattgtaaggcgattactttctcaatcttctgaaatacgcagtgcaagtagtcttcaggttgaaagaatctgggtcgatgttgatgacagttggtattgcgatgcccggttccgattcccggccacaatgcgtacagaacagttaacctctttgtttgaatgccatattcagccggagcagacccgactcatcatttcaggaaaatggaaaaatggcggggcaaggttggcaatgctaagccgttatgagcagcaagattggcgggtcgagttattacctattgcgatgcaaaaactctctggtgcagatgcaatggccgaaatctcattgtcgcttcatgaaggtccaattctgttaggtcacacaattccaaaaggcggttatgaacttactgaagaacttccctgggtttttgaagcgatgaatgagagtgaatcgcagctaaaacttgttggtatggggtctgtgagttccaggctaaatgctctgtttatttcgctaccgaaaaatagccatttagatattagtggagaaggtgagtttgatatcccaaggttgctgaaaaacagtgaacgcagcttaactaaaataagtggagtatttagcgttgttttacatgatggtgctgtttgtacaattcgcacccagcaactttatgattctgcgattgaatattatattaaatcgacagaagttgaactggttaaatcggattatcctgtccatcgagcctggccgaagatcggttggaaaaaggatctgcaatatggcattgtaccggagaaagaacttttttggcgttccattcgttcaggtaataatgcctggtattctgtcgcatcagaaatgccaaaaggacagatagaagtccggcgaatagttaatgatgaggttttatttagcggtaaagttgtagttttaccagcagacttcgatattaatattatacctgagagtgctcagcaaggcattattatgctttctggtataacggatactagaattgataaatattcaaacaatgaaaaagtaacacttaagtccgattattcacaaaacgagtgtgctatttattataattcatcgctgatgctggaaaataccgttgatttacgggtctcctggaaagatggttctaatcttaaactattattacctaagccggttagcggtggccgatttgtaactaatgatggttctgttcattttgatggtgtggcatctatagcacatttgcatggaatagatgctgagttattaaccatatcatgtgctggaagaggatatcttaatatcgagttattggatgaaaatccagtagctgaaaaattccgctatttacatgccgaccttcctcttttatcaggacgcaatgacaaattacaacaaatttcactttatgagaactataatttgctaaatgctatgctggcatgtgcatggaacagcaatagtacattatgtgttgatttttactctgacagatttggaaaggataaagcaacactcaatattaaacgctacgatggtagttttattgaacacgatcaagggttactggttgatataaaaaattctgttgtttttcctgcaaatagaatagacgaactggttgttgatgctatttctcttaagaatcctggcttacacatatcattgttaaaaaaagatgagtttgcttatgatctttcagctctgaatgttcaggatagtccatggttaattgtgggaaaacttgatggtacagctcgcattgcaccagtaattaaatggatgctacctgtattgcagacaaatgatttattactaaatgctctatgcgaagcagacccagaacagcgcaaaaaaaattttaatgagctaatttttgaaatagataacaacccattgcaaaattattgctgtttattaacagagtatattaagaaatacaaaatgaataatggcttatccttgctggatctggacttgttcagaggtatttcgagtaattaccgcgtggttgttcaattgttaatatcatcatgtctttctggtgatagcgatacgatttatgatatacaggaagaattacccttttcatggggatggattcccgtttcaatctggaaagatgttttccaaaaatgttggacttatctggagaaacagattaacgataaaacattagcattacatatattgcaaccctttattgcttttatgaaccatcgtgcacatatcgatcgtcggctggctccgattgcgaatatgttacttacatatagtgagagcctaccaaccggttgtgatgtattgccaactgttagtcgtgagcagtttaatgaagctaaacagatgctattaaggaaccccgacagctttgggcgtatcagtatcttccctaaagaactttggtctagtgctattactccagagttaaaatctgtttttaataagctttggattgaagataaatatcactcacggcttgaaaaacgttttaatttgatgttagtcgcagcgctgttaacccaaaaagataataacctgatacatcaactgtctgcgctttttgaatttcactatcagcaagccccacagcaattaggggtaatctatcaatattattttgaacaagcaggagtatgtcattga

SEQ ID NO: 28646 - DNA, 6315 bp, Escherichia coli 1-110-08_S3_C1
atggacgttcagcaactgcattatgcgccacttctaaatcagcttcatcagcgcgcggtgaggtcggtggtaagtcagttggcattgcggagcaagtcgttgactcattatctggaatcacaatatttccagcctcccggtcaggaggggtcactgcttgcagacccggtattcgaaagcacgttcggctggatgcctgcggatgaaacaatggaggatttgcgggacaagctaatttccagcccgctggttgatgcattgagcaaagcgccggtgccatttcgtcatcaacttacggcgtggcgaacgattctggaagacaaaaaatccttgttagtgagcagcggtacgggatccgggaaaacagaatgctttatggtaccggttctagaagatcttattcgtcagcaaaaatcgacccgtcagtcactaacagggacacaagctattttcttgtatccgttaaatgcattaattaacagccaacaggagcggcttcgtgaatggacgcgcggatttaaggggaaaatacgcttcgcgctatataatggcgaaacccggcataccaaatacgaagttcaggaagatcagttgaaagtacctgaacaagctttgagtcgggaagccatttacgaagcaccaccttccatcatggtgacgaataccaccatgctggaatatatgctgattcgtcgtaaagatgccccaatcatcgaaaagtctcaggggatattaaagtatatcgtcctggatgaagcccatagttatattggttctcaggctgctgagttagcgctgcttttacgtcgtgttatgcaggctttcaatgttggacctggcacagataaacctgtgcagattatcgcgacctctgccactattggtgaagactctcctgaaggtaataaggagcttgctaaatttgtcgctgatcttgcgggcgttacagaacgtgatgtcaaagtggttcgcggctatcgacaaataccgcgggtatcggagtcgctgattcgtcatgaatatcccacatctttaacttctcttaaatctttgagccctcaggatctttaccaacagctttgtcattaccgtgtagcccagcaattgcgtcaggcgttaactcatcccggacggcaggcagtacgtttgagtgagttgctcaatgttgccagaagaacctggccagatattaatcaccgtgagttactgcaactcctcgacctaatggcgagatcgcgagaaggtgaactggcttttacgccattacgtatgcatgggtttatcagaacactggcggggctatgggcatgttcaaacaaacaatgcttacataaagcgcatgaattaaatcagagtgactggccatttggtcaggtatggtttgagcagcgccaatattgtgactgtggtgcgccggtatttgaagttttacgttgctccgggtgtggttcagcttatttgtctgccaaagaggaggtgcgcggtgatggaacgaactggttggtagcgcaacccgccgctgccgaattggatgaatttgctcttgatgtagatgtttattctgaagatgaagacaacgacgaattagacaataactctcaatttgatcgtctgattgcgatcgatggtgaaaaatatatcatttcactggaagaaacgacggcggggaaaattgatagtgaagcgcaaaagcactatgaaataaacctgttaagaccggaatctcgaggtgagggacgtaataattcctttgcttgtgtttgctgtggtgacacccaacgaaaaaataatcctttattccgtccgcttcgacttggcgcgcccttttttttaaatgaaattattcctactctgctggagttttcaccattaccgcagacaagagaagagcagttaggaccgtttaatggtcgacgtctgctcacctttacggattcacgtcagggcactgcccgcatttctgcccgcttacagcaggatgccgataaagcgacgttgcgagctctttgttaccaggagttggccaatattaatgagccatcagcaaagctcagcccggcacactgcgcattgttagagagttttattacccagttttctatccttcctttaaaaaactctattgacgcgctgaaaaaagcgatggttgctaatgaagagcttagcccggcggacattcaggcacttaaaattatcgagccgatggtgagttccttaagcccggatcatgctgaagcgatgcaaatactccaggctaactctggcaatcagcagaagaaaaccatgtcatggcaaacactgtctgaacagctggttggcagtgtggaccttgccgatagaatgagaggcagttttaaagaattgtctgggcttgatcttactaaacaacagtttgcagatttttgtttatacagtgagtttggtcgccgccctaaaaatgcctggaccctcgaaagtatgggtctggtagccattcactatccatttattgataaagttacaacctgcccgcaggactggaagacattattacccgatcccgataagcaattagcggaatggcgtaatttattgaagattactcttgatttctttatacgtgaaaacagtgccgttttttacgaaaacgagcaataccctcgctggatgggggctcgtttcccggtaaaaatgctccagggtccagataaaaaaaacaaagggcagaaacgtgatcaactttggccacaaatacgcgatcgccattataaccgggtcattaagctattaattgcagtctttccggcaatacaacctgagcaggctcactggaaatcgttagttaaccacttaatgattgaggtctgggatgcaattcgaccctgcttacgtcagtttgagtcgggttatcagctggatattaaacaacaagctgaattttacagtccaaagcaagtgtggcgttgcccctatactcgacgtgcgttagacgtcacgttactgggatactctccgtatttgccgggtagcaaagaaattgcacctgaaaaagcagtgttgattgaaatgcctgagcttcctgtacgtcactggcgtttgtctggtggtggagaaatcgcccgagaagaacgtctggagtggctggaaagtaatgcgctgattcaacatgcccgcgaggaaggattatggtctactcgcagcgaccgactggccctgaaagatagctggtatcgtctggaggaacactctgcgcagagaacgcctgagcagaaccaatttaatgaaaaacaatttaagtcaggcaaagttaatgtgctgaactgctccacgaccatggagatgggggtggacattggtggtatgagtttggtggcaatgaacaacgttcctccagctccggcaaattatttgcagcgtgcaggccgcgcgggtcgacgtggagagagtgcatctgctgccattacgttatgtaaaaacacggcgcatggaatggaggtattcaaagaccccctctgggcgttcaacactactgccagtgcgccacgggttcgttttgggagcagcagtattgttcaacgacatgttaatgccctggttttaggtctgtttttacgagctgaagttcctgatgcgacaaaactgagttgcaaatggttctttgaaggtgatgagagccagtgtcttcgttttctccattggttaaataaccaggccgatcagctggcggataaacttaaacgccttactcagggaaccgtcctgatgtcattgacggcaacccagctcttgacccgcacacaagcaatgatgcagcaggttgatatccgctggagaagccaacttgcgatactgttggaaaatatcgaagcgttgaaggcggataacagcgcgtgggaagaaacgccagcaggtaaagccatcgcttatcagcttcgtgattatcgcggtgcatatctgttttctaaactcattagtgaagcgttcctgccggggcatggtttcccggttggcgtcgtcaatttcaattatctgacggcagatgagctggaaaaacgtcgcgcaataaaagctactcaggctgaccctaatgaagggggagaaagcttttctcgtcgtattgaaaaattgcccagccgtgatttgcctacagcattacgcgagtatgctccaggtgcagatgtggtattgggcggaaaagtatatcgttcctcgggcattatgcttggcaaggtacttgccagcgggcaggagctgtcaggcgatcatcatattccgtggttctggcattgtcgtaaatgtggtgcgggggcaaccagtactacccgtcctgtcgaatgtagtcactgcaaagcggatatacagcaacttgatgtgaagcgttatttacagcctgttggttttgcgacagatatccgttatcaggcgcataatgatgtatccatgcctgcacaacttccctggaaagatccacgtgttcttgtaccgtcttcggtgtgggtttctttacccgatgctgggctaggacgttaccgttttagccatagtggggaattgttccacttcagtgaaggggaatttgggcacggctacgcaatttgcctctcatgtggtcgggcagaatctcaaaatcaaccccagcgtacccctgaaaatcttaagaacccagagagggaaaatacgcattacctgttgcgagggggcagtaacgatcgtctgggtagcaataaattgtgccacggtcacgtgcataaagatctttggttggggtatagcagtcgtacagatatggttgagctgcaactcaatgatgataatggcctgttgatccgtgatgaggttgccgcgcgttcccttgcggtcgctttgcgtgaagggttagcgcataaattgggtatcgaaaatactgagctgggcgtgacgacgcagcaagcgcgcgatatcaatggctataccggatattccatcttcatttacgacaataatgcgggtggtgcaggttatgcagtgcaattgatcgaccattgggctgatgtctttaattacgccagaaaattgctcgattgcagttgcgataaattctgtcaccactgcttgctcagctacgacagtcagcattatgtcaacagattagatcgtcaccatgcattaaccctgcttaccaatgtacggttgcagcgacttaacctcgcgccagaatatcagtacttcggcgatggtagccgggttgaaactaaccctctgagtttacgtattgcgcaatgcctgaacagcgagatttatgactcctgctcgctggttcttgcggggccgcaggaacagtgggactttgcccaatggccattatttaaagagttgctccagtttgcctcctccggtgggaatgttgagttgctggtggccacgccgctggcaaacttaactgatagctccagacatcagctttccgcgttggcggcgatgccgggaggtcgcttacaagtgaaatccattgccactgcgcagctcatgcaaggaaaggggcgctggcttgcgcaggtgactcgcgaagggcaaagccaacagtgggccgcagacgacagcgctaccgttgcacctggtgaattatggggacaaagtgcgtcttcaccagtagtgacacttaaaggaacgtccggaaaaaccttctcgggtcagaccttaagtgcagaagatttactgcccgccttacccaccggggcggtgcgcatcaatctctgtgaacaactggacgggccgctggaaggttttggttcgcgtttctggtcgttagtcacgcaacaccccgcgggcgggaagcaggcttttccccgccacaaagagataacgcatgttgagtacagcgatcgttatcttaatagcccattcacggcgcgtttgttaggtgaaatcttaaccgagctggttgaacagggaatggcggaacgcgccagcctcactgtttgcgtcaaaaaattggattacaactctcgccaacacgacgctctctataacgcgtggcttaatgaggaagatcgtcagcaggttgtgaccactttacttgaagaaggatatctggggcctgcgtggccgggagcaattagctggttaacgggggataaccagagtacggagcatggacgagaactgacagtcaccttcagcgatggcagtcagcattatgtcctgctcgacatggggcttagctactggcgctgtattgaagacaccttctttgattttgctctgcgagtaccgcagcaagttgaacggctggcaaacacgcgagcgcgagctgttgcctcgggtaatgaccttaggagttatgttatcgctggataa

SEQ ID NO: 28647 - DNA, 3360 bp, Escherichia coli 1-110-08_S3_C1
ttgcttgtgaaaactccagttaacccacttttgcaatggcttaacatgttttttagtcgccgttcattatccggagctgatggacgggcgttatatgcttaccgttgtactgatacagagtacgaaagtttggcagaactactgcgtacatatgccccccgtagttatccaagaacgatattcatttcctatagcgatgttctatttagcatatatgccgcagagtttatccgccggactcatacggtcggacaccctaaatgggacacaattttagattctattgactggaaagttccgtatgttcatcgacagaagctggttaatgatggcattcgctactggaaaagaaagataagaaacctggggcaagcttcgggttatctgcatacactggcttgtgaaggtggtttacctatccgcatgattgaaaatgagagcggttatttgattacctatttcagaaggatatatcaggcgcttcgtgggcaagcatctcaatatcctgccgctaaaattgcacaagaattaggcgatacgattcctgtcacaatgcaaaacgaactggtctatgaaatagccggtgaattctgcgagactctctgccgattacttagtgagcatccacctcaaagcagtgatcccgtttctgcattacgtaagctctctccagactggcatcttcaacttccactcgttctccccgaagcgaatgctgcagagattgtaaggcgattactttctcaatcttctgaaatacgcagtgcaagtagtcttcaggttgaaagaatctgggtcgatgttgatgacagttggtattgtgatgcccggttccgattcccggccacaatgcgtacagaacagttaacctctttgtttgaatgcaatattcagccggagcagacccgactcatcatttcaggaaaatggagaaatggcggggcaaggttggcaatgctaagccgttatgagcagcaagattggcgggtcgagttattacctattgcgatgcaaaagctctctggtgcagatgcaatggccgaaatctcgttgtcgcttcatgaaggtccaattctgttaggccacacaattccaaaaggcggttatgaacttactgaagaactcccctgggtttttgaagcgatgaatgagagtgaatcgcagctaaaacttgtcggtatggggtctgtgagttccaggctaaatgctctgtttatttcgctaccgaaaaatagccatttagatattagtggagaaggtgagtttgatatcccaaggttgctgaaaaacagtgaacgcagcttaactaaaataagtggagtatttagcgttgttttacatgatggtgcagtttgtacaattcgcacccagcaactttatgattctgcgattgaatattatattaaatcgacagaagttgaactggttaaatcggattatcctgtccatcgagcctggccgaagatcggttggaaaaaggatctgcaatatggcattgtaccggagaaagaacttttttggcgttccattcgttcaggtaacaatgcctggcattctgtcgcatcagaaatgccaaaaggacagatagaagtcagacgaatagttaatgatgaggttttatttagcggtaaagttgtagttttaccagcagacttcgatattaatattatacctgagagtgttcagcaaggcatcataatgctttctggtataacggatactagaattgacaaatattcaaacaatgaaaaagtaacacttaagtccgattattcacaaaacgagtgtgctatttattataattcatcggagatgctggaaaataccgttgatttacgggtctcctggaaagatggttctaatcttaaactattattacctaagccggttagcggtggccgatttgtaactcatgatggttctgttcattttgatggtgtggcatctatagcgcatttgcatggaatagatgctgagttgttaaccatatcttgtgctggaagaggatatcttaatatcgagttgttggatgaaaatccagtagctgaaaaattccgttatttacatgccgaccttcctcttttatcaggatgcaatgacaaattaaaacaaatttcactttatgagaactataatttgctaaatgctatgctggcatgtgcatggaacagcaatagtacattatgtgttgatttttactctgacagatttggaaaggataaagcaacactcagtattaaacgctacgatggtagttttattgaacacgatcaagggttactggttgatataaaaaattctgttgtttttcctgcaaatagaatagacgagttggttgttgatgctatttctcttaaggatcctggcttacacatatcgttgctaaaaaaagatgaatttgcttatgatctttcagctctgaatgttcaggatagcccatggttaattgtggggaaacttgatggtacagctcgcattgcaccagtaattaaatgggggctacctgtattacagacaaatgatttattacttaatgctctatgcgaagcggattccgaacagcgaaaaaaatattttaatgagctaatttttgaaatagataacaatcctttgcaaaattattgctgtttattaacggagtatattaagaaatacaaaatgaataatggcttatccttgctggatctggatttgttcagaggtatttcgagtaattaccgcgtggttgttcagttgttaatatcatcatgtctttctggtgatagcgatacgatttatgatatacaggacgaattacccttttcatggggatggattcccgtttcaatctggaaagatgtttttcaaaagtgttgggcttatctggaaaaacagattaacgataaaacattagcattacatatattgcaaccctttattgcttttatgaaccatcgtgcacatatcgatcgtcggctggctcccattgcgaatatgttacttacatatagcgaactcctaccagccggttgtaatgtcttgccaactgttagtcgtgagcagtttaatgaagctaaacagatgctattaaggaaccccgacagctttgggcgtatcagtatcttccctaaagaactttggtctagtgctattactccagagttaaaatctgtttttaataagctttggattgaagataaatatcactcacggcttgaaaaacgttttaatttgatgttagtcgcagcgctgttaacccaaaaagataataacttgatatatcaactgtctgcgctttttgaattccactatcagcaagccccgcagcaattaggggtaatctatcaatattattttgaacaagcaggagtatgtcattga

SEQ ID NO: 28648 - DNA, 6315 bp, Escherichia coli 1-110-08_S3_C2
atggacgttcagcaactgcattatgcgccacttctaaatcagcttcatcagcgcgcggtgaggtcggtggtaagtcagttggcattgcggagcaagtcgttgactcattatctggaatcacaatatttccagcctcccggtcaggaggggtcactgcttgcagacccggtattcgaaagcacgttcggctggatgcctgcggatgaaacaatggaggatttgcgggacaagctaatttccagcccgctggttgatgcattgagcaaagcgccggtgccatttcgtcatcaacttacggcgtggcgaacgattctggaagacaaaaaatccttgttagtgagcagcggtacgggatccgggaaaacagaatgctttatggtaccggttctagaagatcttattcgtcagcaaaaatcgacccgtcagtcactaacagggacacaagctattttcttgtatccgttaaatgcattaattaacagccaacaggagcggcttcgtgaatggacgcgcggatttaaggggaaaatacgcttcgcgctatataatggcgaaacccggcataccaaatacgaagttcaggaagatcagttgaaagtacctgaacaagctttgagtcgggaagccatttacgaagcaccaccttccatcatggtgacgaataccaccatgctggaatatatgctgattcgtcgtaaagatgccccaatcatcgaaaagtctcaggggatattaaagtatatcgtcctggatgaagcccatagttatattggttctcaggctgctgagttagcgctgcttttacgtcgtgttatgcaggctttcaatgttggacctggcacagataaacctgtgcagattatcgcgacctctgccactattggtgaagactctcctgaaggtaataaggagcttgctaaatttgtcgctgatcttgcgggcgttacagaacgtgatgtcaaagtggttcgcggctatcgacaaataccgcgggtatcggagtcgctgattcgtcatgaatatcccacatctttaacttctcttaaatctttgagccctcaggatctttaccaacagctttgtcattaccgtgtagcccagcaattgcgtcaggcgttaactcatcccggacggcaggcagtacgtttgagtgagttgctcaatgttgccagaagaacctggccagatattaatcaccgtgagttactgcaactcctcgacctaatggcgagatcgcgagaaggtgaactggcttttacgccattacgtatgcatgggtttatcagaacactggcgggtctatgggcatgttcaaacaaacaatgcttacataaagcgcatgaattaaatcagagtgactggccatttggtcaggtatggtttgagcagcgccaatattgtgactgtggtgcgccggtatttgaagttttacgttgctccgggtgtggttcagcttatttgtctgccaaagaggaggtgcgcggtgatggaacgaactggttggtagcgcaacccgccgctgccgaattggatgaatttgctcttgatgtagatgtttattctgaagatgaagacaacgacgaattagacaataactctcaatttgatcgtctgattgcgatcgatggtgaaaaatatatcatttcactggaagaaacgacggcggggaaaattgatagtgaagcgcaaaagcactatgaaataaacctgttaagaccggaatctcgaggtgagggacgtaataattcctttgcttgtgtttgctgtggtgacacccaacgaaaaaataatcctttattccgtccgcttcgacttggcgcgcccttttttttaaatgaaattattcctactctgctggagttttcaccattaccgcagacaagagaagagcagttaggaccgtttaatggtcgacgtctgctcacctttacggattcacgtcagggcactgcccgcatttctgcccgcttacagcaggatgccgataaagcgacgttgcgagctctttgttaccaggagttggccaatattaatgagccatcagcaaagctcagcccggcacactgcgcattgttagagagttttattacccagttttctatccttcctttaaaaaactctattgacgcgctgaaaaaagcgatggttgctaatgaagagcttagcccggcggacattcaggcacttaaaattatcgagccgatggtgagttccttaagcccggatcatgctgaagcgatgcaaatactccaggctaactctggcaatcagcagaagaaaaccatgtcatggcaaacactgtctgaacagctggttggcagtgtggaccttgccgatagaatgagaggcagttttaaagaattgtctgggcttgatcttactaaacaacagtttgcagatttttgtttatacagtgagtttggtcgccgccctaaaaatgcctggaccctcgaaagtatgggtctggtagccattcactatccatttattgataaagttacaacctgcccgcaggactggaagacattattacccgatcccgataagcaattagcggaatggcgtaatttattgaagattactcttgatttctttatacgtgaaaacagtgccgttttttacgaaaacgagcaataccctcgctggatgggggctcgtttcccggtaaaaatgctccagggtccagataaaaaaaacaaagggcagaaacgtgatcaactttggccacaaatacgcgatcgccattataaccgggtcattaagctattaattgcagtctttccggcaatacaacctgagcaggctcactggaaatcgttagttaaccacttaatgattgaggtctgggatgcaattcgaccctgcttacgtcagtttgagtcgggttatcagctggatattaaacaacaagctgaattttacagtccaaagcaagtgtggcgttgcccctatactcgacgtgcgttagacgtcacgttactgggatactctccgtatttgccgggtagcaaagaaattgcacctgaaaaagcagtgttgattgaaatgcctgagcttcctgtacgtcactggcgtttgtctggtggtggagaaatcgcccgagaagaacgtctggagtggctggaaagtaatgcgctgattcaacatgcccgcgaggaaggattatggtctactcgcagcgaccgactggccctgaaagatagctggtatcgtctggaggaacactctgcgcagagaacgcctgagcagaaccaatttaatgaaaaacaatttaagtcaggcaaagttaatgtgctgaactgctccacgaccatggagatgggggtggacattggtggtatgagtttggtggcaatgaacaacgttcctccagctccggcaaattatttgcagcgtgcaggccgcgcgggtcgacgtggagagagtgcatctgctgccattacgttatgtaaaaacacggcgcatggaatggaggtattcaaagaccccctctgggcgttcaacactactgccagtgcgccacgggttcgttttgggagcagcagtattgttcaacgacatgttaatgccctggttttaggtctgtttttacgagctgaagttcctgatgcgacaaaactgagttgcaaatggttctttgaaggtgatgagagccagtgtcttcgttttctccattggttaaataaccaggccgatcagctggcggataaacttaaacgccttactcagggaaccgtcctgatgtcattgacggcaacccagctcttgacccgcacacaagcaatgatgcagcaggttgatatccgctggagaagccaacttgcgatactgttggaaaatatcgaagcgttgaaggcggataacagcgcgtgggaagaaacgccagcaggtaaagccatcgcttatcagcttcgtgattatcgcggtgcatatctgttttctaaactcattagtgaagcgttcctgccggggcatggtttcccggttggcgtcgtcaatttcaattatctgacggcagatgagctggaaaaacgtcgcgcaataaaagctactcaggctgaccctaatgaagggggagaaagcttttctcgtcgtattgaaaaattgcccagccgtgatttgcctacagcattacgcgagtatgctccaggtgcagatgtggtattgggcggaaaagtatatcgttcctcgggcattatgcttggcaaggtacttgccagcgggcaggagctgtcaggcgatcatcatattccgtggttctggcattgtcgtaaatgtggtgcgggggcaaccagtactacccgtcctgtcgaatgtagtcactgcaaagcggatatacagcaacttgatgtgaagcgttatttacagcctgttggttttgcgacagatatccgttatcaggcgcataatgatgtatccatgcctgcacaacttccctggaaagatccacgtgttcttgtaccgtcttcggtgtgggtttctttacccgatgctgggctaggacgttaccgttttagccatagtggggaattgttccacttcagtgaaggggaatttgggcacggctacgcaatttgcctctcatgtggtcgggcagaatctcaaaatcaaccccagcgtacccctgaaaatcttaagaacccagagagggaaaatacgcattacctgttgcgagggggcagtaacgatcgtctgggtagcaataaattgtgccacggtcacgtgcataaagatctttggttggggtatagcagtcgtacagatatggttgagctgcaactcaatgatgataatggcctgttgatccgtgatgaggttgccgcgcgttcccttgcggtcgctttgcgtgaagggttagcgcataaattgggtatcgaaaatactgagctgggcgtgacgacgcagcaagcgcgcgatatcaatggctataccggatattccatcttcatttacgacaataatgcgggtggtgcaggttatgcagtgcaattgatcgaccattgggctgatgtctttaattacgccagaaaattgctcgattgcagttgcgataaattctgtcaccactgcttgctcagctacgacagtcagcattatgtcaacagattagatcgtcaccatgcattaaccctgcttaccaatgtacggttgcagcgacttaacctcgcgccagaatatcagtacttcggcgatggtagccgggttgaaactaaccctctgagtttacgtattgcgcaatgcctgaacagcgagatttatgactcctgctcgctggttcttgcggggccgcaggaacagtgggactttgcccaatggccattatttaaagagttgctccagtttgcctcctccggtgggaatgttgagttgctggtggccacgccgctggcaaacttaactgatagctccagacatcagctttccgcgttggcggcgatgccgggaggtcgcttacaagtgaaatccattgccactgcgcagctcatgcaaggaaaggggcgctggcttgcgcaggtgactcgcgaagggcaaagccaacagtgggccgcagacgacagcgctaccgttgcacctggtgaattatggggacaaagtgcgtcttcaccagtagtgacacttaaaggaacgtccggaaaaaccttctcgggtcagaccttaagtgcagaagatttactgcccgccttacccaccggggcggtgcgcatcaatctctgtgaacaactggacgggccgctggaaggttttggttcgcgtttctggtcgttagtcacgcaacagcacgctggctggaagcaggcatttacccgccacaaagagataacgcatgttgagtacagcgatcgttatcttaatagcccattcacggcgcgtttgttaggtgaaatcttaaccgagctggttgaacagggaatggcggaacgcgccagcctcactgtttgcgtcaaaaaattggattacaactctcgccaacacgacgctctctataacgcgtggcttaatgaggaagatcgtcagcaggttgtgaccactttacttgaagaaggatatctggggcctgcgtggccgggagcaattagctggttaacgggggataaccagagtacggagcatggacgagaactgacagtcaccttcagcgatggcagtcagcattatgtcctgctcgacatggggcttagctactggcgctgtattgaagacaccttctttgattttgctctgcgagtaccgcagcaagttgaacggctggcaaacacgcgagcgcgagctgttgcctcgggtaatgaccttaggagttatgttatcgctggataa

SEQ ID NO: 28649 - DNA, 3360 bp, Escherichia coli 1-110-08_S3_C2
ttgcttgtgaaaactccagttaacccacttttgcaatggcttaacatgttttttagtcgccgttcattatccggagctgatggacgggcgttatatgcttaccgttgtactgatacagagtacgaaagtttggcagaactactgcgtacatatgccccccgtagttatccaagaacgatattcatttcctatagcgatgttctatttagcatatatgccgcagagtttatccgccggactcatacggtcggacaccctaaatgggacacaattttagattctattgactggaaagttccgtatgttcatcgacagaagctggttaatgatggcattcgctactggaaaagaaagataagaaacctggggcaagcttcgggttatctgcatacactggcttgtgaagggggtttacctatccgcatgattgaaaatgagagcggttatttgattacctatttcagaaggatatatcaggcgcttcgtgggcaagcatctcaatatcctgccgctaaaattgcacaagaattaggcgatacgattcctgtcacaatgcaaaacgaactggtctatgaaatagccggtgaattctgcgagactctctgccgattacttagtgagcatccacctcaaagcagtgatcccgtttctgcattacgtaagctctctccagactggcatcttcaacttccactcgttctccccgaagcgaatgctgcagagattgtaaggcgattactttctcaatcttctgaaatacgcagtgcaagtagtcttcaggttgaaagaatctgggtcgatgttgatgacagttggtattgtgatgcccggttccgattcccggccacaatgcgtacagaacagttaacctctttgtttgaatgcaatattcagccggagcagacccgactcatcatttcaggaaaatggagaaatggcggggcaaggttggcaatgctaagccgttatgagcagcaagattggcgggtcgagttattacctattgcgatgcaaaagctctctggtgcagatgcaatggccgaaatctcgttgtcgcttcatgaaggtccaattctgttaggccacacaattccaaaaggcggttatgaacttactgaagaactcccctgggtttttgaagcgatgaatgagagtgaatcgcagctaaaacttgtcggtatggggtctgtgagttccaggctaaatgctctgtttatttcgctaccgaaaaatagccatttagatattagtggagaaggtgagtttgatatcccaaggttgctgaaaaacagtgaacgcagcttaactaaaataagtggagtatttagcgttgttttacatgatggtgcagtttgtacaattcgcacccagcaactttatgattctgcgattgaatattatattaaatcgacagaagttgaactggttaaatcggattatcctgtccatcgagcctggccgaagatcggttggaaaaaggatctgcaatatggcattgtaccggagaaagaacttttttggcgttccattcgttcaggtaacaatgcctggcattctgtcgcatcagaaatgccaaaaggacagatagaagtcagacgaatagttaatgatgaggttttatttagcggtaaagttgtagttttaccagcagacttcgatattaatattatacctgagagtgttcagcaaggcatcataatgctttctggtataacggatactagaattgacaaatattcaaacaatgaaaaagtaacacttaagtccgattattcacaaaacgagtgtgctatttattataattcatcggagatgctggaaaataccgttgatttacgggtctcctggaaagatggttctaatcttaaactattattacctaagccggttagcggtggccgatttgtaactcatgatggttctgttcattttgatggtgtggcatctatagcgcatttgcatggaatagatgctgagttgttaaccatatcttgtgctggaagaggatatcttaatatcgagttgttggatgaaaatccagtagctgaaaaattccgttatttacatgccgaccttcctcttttatcaggatgcaatgacaaattaaaacaaatttcactttatgagaactataatttgctaaatgctatgctggcatgtgcatggaacagcaatagtacattatgtgttgatttttactctgacagatttggaaaggataaagcaacactcagtattaaacgctacgatggtagttttattgaacacgatcaagggttactggttgatataaaaaattctgttgtttttcctgcaaatagaatagacgagttggttgttgatgctatttctcttaaggatcctggcttacacatatcgttgctaaaaaaagatgaatttgcttatgatctttcagctctgaatgttcaggatagcccatggttaattgtggggaaacttgatggtacagctcgcattgcaccagtaattaaatgggggctacctgtattacagacaaatgatttattacttaatgctctatgcgaagcggattccgaacagcgaaaaaaatattttaatgagctaatttttgaaatagataacaatcctttgcaaaattattgctgtttattaacggagtatattaagaaatacaaaatgaataatggcttatccttgctggatctggatttgttcagaggtatttcgagtaattaccgcgtggttgttcagttgttaatatcatcatgtctttctggtgatagcgatacgatttatgatatacaggacgaattacccttttcatggggatggattcccgtttcaatctggaaagatgtttttcaaaagtgttgggcttatctggaaaaacagattaacgataaaacattagcattacatatattgcaaccctttattgcttttatgaaccatcgtgcacatatcgatcgtcggctggctcccattgcgaatatgttacttacatatagcgaactcctaccagccggttgtaatgtcttgccaactgttagtcgtgagcagtttaatgaagctaaacagatgctattaaggaaccccgacagctttgggcgtatcagtatcttccctaaagaactttggtctagtgctattactccagagttaaaatctgtttttaataagctttggattgaagataaatatcactcacggcttgaaaaacgttttaatttgatgttagtcgcagcgctgttaacccaaaaagataataacttgatatatcaactgtctgcgctttttgaattccactatcagcaagccccgcagcaattaggggtaatctatcaatattattttgaacaagcaggagtatgtcattga

SEQ ID NO: 28650 - DNA, 6315 bp, Escherichia coli 1-110-08_S3_C3; identical to SEQ ID NO: 28648

SEQ ID NO: 28651 - DNA, 3360 bp, Escherichia coli 1-110-08_S3_C3; identical to SEQ ID NO: 28647

SEQ ID NO: 28652 - DNA, 6273 bp, Escherichia coli 113290
atgggcgttaccaacccgcagctgcgtgaacatctcgcgcaacaaatgggggctgattgtgggaaaccgggctcattccttgcttctccggtattccagcaaatgtttggctggaaggagtcaaaccacacgatgcgcagcctgacggaaggcaacgcattgttgagcaaagcagtggttgattcactggatgatcagaataatggccggtaccggtttggtgctgactggaggccttttacgcaccagttagccagttggaaagctttgctggaaaagaaacattcagtggtggtaaccagtggtacgggttcaggtaaaacggaatgttttatggtaccggtgctggaagatctttaccgggaactgcatgaaaatggcaacaatccgttggtcggtgtccgagccctttttctctatccattgaacgccctgattaattcacagcgcgagcgtctggatgcctggacgcgtggttttggtacagggatccgctactgcctttacaacggcaacaccgaaaacctacacgcttcggtaaaaagcgaacaggcaaaaaggccgaatgaggtgctctcgcgcgaaaaaatgcgtgaagaacctgcgccgattctggtgaccaacggcacgatgctggaatatatgatggttcgccaggtcgacgccccgattatccagcaatctaaagcacaaaaatcactacgctggattgtactggatgaagcgcatacctatgtagggtcgcaggccgctgaactggcgctccagctgcgtcgtgtgatgaccgcgtttggcgtgacaccagatgacgtgcgctttgtcgcgacctctgcgaccattgccggcagcgacgctgaaaagcagctgaaaaaatttctctctgaattatccggtatcccgcaggagcgcatcgatgttctggacggaagtcgggtgattcctgaactggaaccatccaaaaacgtttctgttccgttagacgagatagagcaaatacctgatctggatctaagagataaaaatgataataaaattaaagggataagtcctgagcgcttttatgcgcttacgcattcccccgaagcgcgttacatacgtgagatgttggtcaaacagcccaatccgatgaagctggatgagataacagagcggttacacgtgctgacaaaacagcattacagccagcaggaagtactgcgttggatcgatgtctgttcagggactcaacctaatgcaaaggatcccgcatttcttaaagtcagggcgcatatcttccagcgtaatacccagggaatatgggcttgtgttgataaagattgcagattaaagcacggtacaccgctcgacaaaggctggccctttggctatgtgtatgtgaaccagcgacaaaattgtgactgtggaagccctgtatacgaagttgcattctgtaatgattgtaatgagcctcatcttctggcacgggacaaaaagggcaaactagtccagtgggaaaataaaggtggcgatgaattctctttgcaggatgaagtacctgttgaacatgacgctacagaagaaaaagtcgaaaaagagaacagttttcagcctccgttgattattgccgcaggagagaccagcgaggcaggttataccctacaacgcctcgaccgtcagacgcgccgtattggcgttattaacaatgacagcattccgctgattattaatgatattgaacaggtttgtagtgccagtggctgtggctacagaggcatgagtgggaaacagcccttccggcgtgcactattaggtgggccattttacgttactaatatcgtgcccaccgttctagagtattgtcaggactttaccagtgatgaaggcaaagagggcgtcggaccagattcgttgccaggacgaggtcgtcgactcatcacctttacagacagtcgacaagggacagcccgaatggcggtgcgtatgcagcaagaagcagaacgcagtcgcttacgcggaagcgtagtcgaaattctcagctggcatcaaaggacgcaaacgtctacagcgccgaatgccaatgccgatctggaaaaattagcggccagggcgaagcaagcccgtgagcaggcagaagaatatcgaagctggggaatgccagaccaggcgaaattgtcacaagcacaggctgaacagcttgaacaggcttatcaggctgcaaccggtgggaaagccgcgactatcctggtatcccgaacctggacggagatggttaacgagcttaaagagagagccgatatccgcgggccggttctgcaatataaccattatcttaagcctgaagtgtttaatgaaaacggcggcccccttaagctttctgaaatgttgttgttccgggaattcatgcgtcgccctaaacggactaacagcctggaaacacaggggctggttcaggttggttaccaggggctggagaaaatacataagagccccttgcactggcaggaaaaaggattaacgctggatgactggcgcgattttctcaaggttacgttggatcattacgttcgcgagagcaacttcacacagctggatgatgagctgaaaaactggattggtagccgtttttcatcaaaattcgtccgtaacccggaatcaaaagatcctgaagataatcagaacagacgctggcctcaaattcgtaatggcaacgtatcccatcgtttagcgaagttgctgatgctgggggctggattcaaaaccgtcaatgcggcaactattgatattatcaatacatggctgaaagaagcatgggcccaacttaccggaccgcttgcagtactgaaacccgatggcaaccgtttttatttaccgaaagagcatatgactttttctttaatcacggatgcctggatttgcccggtaaccaataaaatcctggatacggcttttaaaggcttaaccccttatctgcctacccatatttcgttcgagcatcttaccctggcgcaatatgacacttttgtcgcgcagaaagtcacaatgccggaaatctggaagctggatcgttcacaggaagactacgcagagggtctggcaaaagcacgcgactgggtcagccatgatccgctgatcgcacaattgcggtcggaaaacgtctggacagacattaacgatcgtgtcgtggaaggcggcttctactatcgtactgccgagcactctgcccagcagtcgtcagaacgtctgcaaagctatgaaaagatgttcaagaatgggcaactaaatgttctcaactgttccaccaccatggaaatgggggttgatatcgggggtattactgcggtggtaatgaacaacgtaccgccacatccggccaactatttacagcgcgccgggcgagccgggcgtagtaaagaatcacgcgcgatctcttacaccctatgtaaaggtaacccacacgaccagcaggtttttgccaacccgctctggccatttgaaaccatgatcccggcacccatggtcgcgatgaactccgcccgactggtgcaacgtcacgtcaatgcattattactgtccgactttttatgtaacgttattggcgaaaccgataaagaaaaaaccagcctcgatagcctctggtttttcggtgaagatgacgggcagtcaaaatgcgaacgctttaaaatctggctggaacgtccggttcttgatatcgacacggcgctggaacggctggtgaaaggtacggcgttgcatggtgcaagagccgaatatctgcgggataaaacaatcaacgcgatcaccttcctgcaacagcggtggctctccgtttatcgcgatctcgtgacacaggagcgtgagtcgcagccgcaaacgccttatcgtaagcgcatagagctggagaagaaacggcactgtggcgagtatctgctgcgcgatctggctgccagaaccttcctgccgggatacggtttcccgacagatgtagtgacgtttgataacttcacgatggaagattatatccgcgaaaaatcgcagaaaagtcgtgataaaaaggaccgtgaagataacgtttcccgttataaaggattaccttcccgtaacctcggtgttgccattcgtgaatatgcaccgggagcagagatcatccttgatggccgtgtcttccgctctgccggtgtctcactgcactggcacaacattaatgctgataccaatgaagcccagcgtctggattgcgcctggcgctgtcacaaatgcgggaccattggctatgaagaggggatgagcagttccgggatgctcttttgctccaatagcgcctgcggcgaaaaaataatcatggataatcgccgtcaggtgctgcagcctgccgggtttgtcaccgatgcacacgctccggtaacgaacaatattgaaaccatgaaattcgtcccggttgtccccgcgtgggtctttgttaaagcagagcccgtaccgttgcctaacccgctaatgggttatatggcttctggggctgatgggcatgttttccagcaaagtttgggggaaggtggacacggttatgcattgtgtctgagctgtggccgtgctgagtcgatgctgaatgaaaatgatgcgccgaaaagtatggaagctcactatccaccgcgtccgggtaaagcggatcgcgacagccagaatcatcgtctgatttgccccggttcgacggcactcatgaagaatgtcaccctgggcgcactggcgcgtaccgatgtctttgaaatggttctgcgcaaaccgcaaaacggcgagtatctgccagataacacagaggaggggcggattgttgccatgactctggcggttgctctgcgtcaggcgctggcgggcgttctgggtatctccgccgcagaactcggctattctgtacgtccggtcagactggaggatgggcaatcggtattagccgtacagctttatgatgtgatcagcggtggtgcaggttttgcctccagcgcaccggtacacattgaagctatattgcagggaatggtgaaacagttaggctgccgccattgtgagactgcatgtagtgaatgcctgcttgattcccagactcgccacgatcacgatttgctggatcgcaaagcggcgctggcctggcttggcgatgacttcacgtattacatcggtttaccggatgaagagacattctcgctgccggatgcccgctactgccctggcgccattggcgatacgattcgccgggcgattaacgaaggcgctgaaaagctcaccctgtggatgaccggcgcgcccaatgagtgggatttatacgcacgtcagttccgcgcggcggttcagaactatcggctaaaagacaacgtcgaggtcgatcttgttattcctacgggagtggatgacccggacctgttgcatgaactatcgcaatttactgcgctgggtgtgcggctgtgccatgttgaacaggatctgcaattaccgatcgttgcccaggtcacctttaccgatcgcgtgatgacgctggcctctcgcagccagcaggcaacgattccggggccggagtggcacctgaatgacgaactggtggtgcgtagtctcggttataaaacggtagaactgaacgagtttattctgccggctaaagccaccaacgctgtcgagcgggtcaaagacattcagatccacaaacagttgaatggaccactgtcgcagtttgggcaacgcttctgggacgtgctgtttaacgaccatgaagaagcgcagtcactgatgaataacacgcgaattaccggcgttcactataccgatcgctatctgcaaaacccggttgcgctggcgttgttgggatcaattctgagaccgctaaaaacaaagctgaccgatggcgctgaagtgacgctggatacgctatttaaagataaagatcgccccggtaaccggcctttccatgactggatgagcatagcggattttcaggatttcgctgatcagtggtttgctgctgcgctgggcaggccggtagaactgacggtgttcgactcgccgcgcgatatccctcaccatcgtaaactgacggtgacttttgaggatggtcaggtattgaagatccgcttcgatcaggggatgggctactggcgcatcaacttttcatcgcaatggcattactttgatttccgcgatgacgtttctttccagttagtcaaaatggctcaggcctgcaaggaagggaatgtcgccaacagcgaagagagttgggcaacggatgtgctggtggaggtgatcgcctcctga

SEQ ID NO: 28653 - DNA, 3339 bp, Escherichia coli 113290
atgttgtggggttttgtttttgtatcttttatctctaaggagcttgctttgggtcaatcagaatacatttcatgggtaaaatgtacttcctggctaagtaactttgtgaatcttagagggttgagacaaccggatggccgtcctctttatgaatatcatgcaaccaatgatgaatatacccaattaacgcagctactccgtgcagtcggtcaatcacaatctaatatatgtaatagggactttgctgcctgttttgttcttttttgctctgagtggtaccgcagggattatgaacggcaatgcggatggacgtgggaccctatatataaaaaaatagggatttcattcaccgccacagagcttggtactatcgtaccgaaagggatggaagattactggctgcgcccaattcgattttatgaatctgaacgacgcaattttctcggaacattattcagtgaaggtggtttacctttccggctactcaaagaatcagacagtcgctttctggctgttttctccaggatccttggacaatatgagcaagcaaagcagtcaggtttttctgccctttcgctggcaagagctgtcatagaaaaatcagcgctgccaactgtttttagcgaagatacctctgtagaacttatcagtcatatggctgataacctcaattccttagtacttactcacaacctaataaatcacaaagaaccagtacaacagcttgagaaggttcaccctacctggcgaagcgagtttccaataccgttagatgatgaaacaggaacgcattttttgaatggactgctatgcgcagcctctgtagaggctaagcctcgactacaaaaaaataagagtacgcgttgccaattctattggtcagaaaagcatccagatgagcttagggtgatagtatctcttccggacgaagtttcctttcctgtaacaagcgagccgtcaactacgcgctttgaacttgccatttgtgaagatggtgaggaagtctctggccttgggccagcctatgcttctctggaaaacagacaggcaacagttcgattacgtaaaagcgaagtgagatttggcaggcaaaatccatcggcaggtttgtcgttagtggctcgtgctggagggatgattgttgggagcattaaacttgatgacagtgaaattgccattggtgaggtgccgttaaccttcatcgttgatgcagatcaatggctgttacagggacaggcttcttgcagtgtgcgaagcagcgatgttctgattgtgctccctcgggataatagcaatgttgctggttttgatggccaatcgagggcagtaaacgtattaggactaaaagcactacctgtgaagggatgtcaggacgttacagttacagcaaatgaaacttatcggattcgcaccggaagagaacaaatcagcatcggaaggtttgctctaaatggaaagcgtgcaagctgggtttgtcatccagatgaaacatttattggtgtaccaaaagtcatttctacactaccggatattcaaagcattgatgtaacgcgttacctgagcggaatttcaattgagcaatgtcatatacaagagatgctgggggctcaatatctttctatccgtaatagtaagaatgaaacgctcttgcgtcgcaaaatcggtattttgcctgctgatttcagtattgagataaaaggtggaatacacgcaaatgaaggcactatcgtaatcaccacacagcatccttgtgtagcaaaacttaaagataaaacattggaggctacacgtaagcgtactgaggggcgaacagagatacaactcaaagcggaaggggtacctccggcatttattacattacaagttctgcctaatttggcggctgaccccatcgatattgagttaccttttcccgctaaaggctgtctcgctcttgatgtaaacggacgtcctctggataaaaacattacgctgcatgatctgctgggttccagagcgtttctgttctccagaaatggcgagccgacaagatatacattgcagttgcatttgcgctccgttagtggattacaggcatggcacgaatggtgttatacggcgttgagcgatcgtcctgttgaattgaatctctatagtctgcgcgaacatattgagaacctgatttcacttgaggcaggtattgaccaggttgttgagatgcgtattacgggggcgggtgtggtcatggcctggcaaattcgtcgctataaatacagtctgcgctatgattatgaaaaagaactattactcagccagtcagtgaaccatcgtgctggacagattccttcccccgttatcatgctgttaagtgaacccgagaggaaatccatccccttagcatcaagaatgagcgagggagtgcctgtcggtgaatatgagttgagctcaatcgttaacaaaaatggaccgtggttggttgtccctaaaccgggtgaagagatggcttttcgtccctgcttcattcgtggcgaatcttcgttaccggtagaagaaagcaacatccgctcattgcagaaagcgacccagctttttaatccacaggcagaagttaataccatcacactggttctcggacagatggctaacgatcctgcccattccggctggcaatttatgcgtagcctgtacgatcaatttggttatttaccactggcaacctttgaagtatggcgtgcactggtgcagcatccgcaggcattggcaatgtcgctcttcaaatttgaaatgtcagcagagtacctgagtcgtattgagaatgagttccctattctatgggagtttttccccatctttgagatcaaagcggcatctgagcgtttcaaattgttcctgagccaaaaaggtgcaccggaggaaacccagaaattactggttactaatatgtttcaacggctggggctcgtgttcccgacatatgccgatgaaattgagaaatggttaagtaacggacatctccccccgtctattcctgagtcttttgtccacgtgtggtatcaggagcttttacgtgagcatagtgaagctcaatggccagagtacggcagcaagcggctgcatagctggatggcatcacaaaaaaatccagtgattggtattaatcctgacgcaaatcaccgctattccgtggccttgttacccgtcttcgctgcagctgtggcaagcggaaatgcttcttttgaatctgtatttgaccgtaaaaccggtgccgtatttttcctgaggcaagtcagggatttcgattcccgctggtttaaggccatcttccagtgcagcctgttgcgttatgttgctaaaaaataa

SEQ ID NO: 28654 - DNA, 6315 bp, Escherichia coli 1-250-04_S3_C1
atggacgttcagcaactgcattatgcgccacttctaaatcagcttcatcagcgtgcggtgaggtcggtggtaagtcagttggcattgcggagcaagtcgttgactcattatctggaatcacaatattttcagcctcccggtcaggaggggtcactgcttgcagacccggtattcgaaagtacattcggctggatgcctgcggatgaaacaatggaggatttgcgggacaagctgatctccagcccgctggttgatgcattgagcaaagcgccagtgccatttcgtcatcaactcactgcgtggcgaacgattctggaagacaaaaaatccttgttagtgagcagcggtacgggatccgggaaaacagaatgctttatggtacctgttctggaagatcttattcgtcagcaaaaatcgccccgccagtcactaacagggacacaagctattttcttgtatccgttaaatgcattaattaacagccaacaggagcggcttcgcgaatggacgcgcggatttaaggggaaaatacgcttcgcgctatataatggcgaaacccggcataccaaatacgaaattcaggaagatcagttgaaagtacctgaacaagctttgagtcgggaagccatttatgaagcaccaccttccatcatggtgacgaataccaccatgctggaatatatgctgattcgtcgtaaagatgccccaatcatcgaaaagtctcaggggatgttaaagtatatcgtcctggatgaagcccatagttatattggttctcaggctgctgagttagcgctgcttttacgtcgtgttatgcaggctttcaatgttggacccggcacagataaacctgtgcagattatcgcgacctctgccactattggtgaagactctcctgaaggtaataaggagcttgctaaatttgtcgctgatctcgcgggcgttacagaacgtgatgtcaaagtggttcgcggttatcgacaaataccgcgggtatcggagtcgctgattcgtcatgaataccccacatctttaacttctcttaaatccctgagccctcaggatctttaccaacagctttgtcattaccgtgtggcccagcaattgcgtcaggcgttaactcatcccggacggcaggcagtacgtttgagtgagttgctcaatgttgccagaagaacctggccagatattaatcaccgtgagctactgcaactcctcgatctaatggcaagatcgcgagaaggtgaactggcttttacgccattacgtatgcatgggtttatcagaacactggcgggtctatgggcatgttcaaacaaacaatgctcacataaagcacatgaattaaatcagagtgactggccatttggtcaggtatggtttgagcagcgccaatattgtgactgtggtgcgccggtatttgaagttttacgttgctccgggtgtggttcagcttatttgtctgccaaagaggagatgcgcggtgatggaacgaactggttggtagcgcaaccagccgctgccgaagtggatgagtttgctcttgatgtagatgtttattctgaagatgaagacaacgacgaattagacaataactctcaatttgatcgtctgattgcgagcgatggtgaaaaatatatcatttcactggaagaaacgacggcggggaaaattgatagtgaagcgcaaaagcactatgaaataaacctgttaagaccggaatctcgaggtgagggacgcaataactcctttgcttgtgtttgctgtggtgacactcaacggaaaaataatcctttattccgtccgcttcggctcggtgcgcccttttttttaaatgaaattattcctactctgctggagttttctccattaccgcaaacaagagaagagcagttaggaccgtttaatggtcgacgcttgctcacctttacggattcgcgtcagggtaccgctcgcatttcagcccgcttacagcaggatgccgataaagcgacgttgcgagctctttgttaccaggagctggcaaatattacagagccttcagcaaaactcagcccggcacactgtgcactgttagagaaagttattagccagttttctgtcctccctttaaaaaattccatcgacgcgctgaaaaaagcgatggctgcgaatgaggagcttagcccgacggacattcaggcacttaaaattattgagccgatggtgagttccttaagcccggatcatgctgaagcgatgcaaatacttcaggctaactctggcaatcagcagaagaaaaccatgtcatggcaaacgctgtctgaacagctggttggcagtgtggaccttgccgatagaatgagaggcagttttaaagaattgtctgggcttgatcttactaaacaacagtttgcagatttttgtttatacagcgagtttggtcgccgccctaaaaatgcctggaccctcgaaagtcttggtctggtagccattcactatccatttattgataaagttacaacctgcccgcaggactggaagacattattacccgatcccgataagcaattagcggaatggcgtaatttattgaagattactcttgatttctttatccgtgaaaacagtgccgttttttacgaaaacgagcaataccctcgctggatgggggcacgtttcccggtaaaaatgctccaggggccagataaaaaaaacaaagggcagaaacgtgatcaactttggccacaaatacgcgatcgccattataaccgggtcattaagctattaatcgcagtctttccggcaatacaacctgagcaggctcactggaaatcgttagttaaccacttaatgattgaggtctgggatgcaattcgaccctgcttacgtcagtttgagtcgggttatcagctggatattaaacaacaagctgaattttacagtccaaagcaagtgtggcgttgcccctatactcgacgtgcgttagacgtcacgttgctgggatactctccgtatttgccgggtagcaaagaaattgcacctgaaaaagcagtgttgattgaaatgcctgagcttcctgtacgtcactggcgtttgtctggtggtggagaaatcgcccgagaagaacgtctggagtggctggaaagtaatgcgctgattcaacatgcccgcgaggaaggattatggtctactcgcagcgaccgactggccctgaaagatagctggtatcgtctggaggaacactctgcgcagagaacgcctgagcagaaccagtttaatgaaaaacaatttaagtcaggcaaagttaatgtgctgaactgttccacgaccatggagatgggggtggatattggtggtatgagtttggtggcaatgaacaacgttcctccagctccggcaaattatttgcagcgtgcaggccgcgcgggtcgacgtggagagagtgcatctgctgccattacgttatgtaaaaacacggcgcatggaatggaggtattcaaagaccccctctgggcgttcaacactactgccagtgcgccacgggttcgttttgggagcagcagtattgttcaacgacatgttaatgccctggttttaggtctgtttttacgagctgaagttcctgatgcgacaaaactgagttgcaaatggttctttgaaggtgatgagagccagtgttttcgttttctccattggttaaatcaccaggccgatcagctagcggataaacttaaacgccttactcagggaaccgtcctgatgtcattgacggcaacccagctcttgacccgcacacaagcaatgatgcagcaggttgatatccgctggagaagccaacttgcgatactgttggaaaatatcgaagcgttgaaggcggataacagcgcgtgggaagaaacgccagcaggtaaagccatcgcttatcagcttcgtgattatcgcggtgcatatctgttttctaaactcattagtgaagcgttcctgccggggcatggtttcccggttggcgtcgtcaatttcaattatctgacggcagatgagctggaaaaacgtcgcgcaataaaagctactcaggctgaccctaatgaagggggagaaagcttttctcgtcgtattgaaaaattgcccagccgtgatttgcctacagcattacgcgagtatgctccaggtgcagatgtggtattgggcggaaaagtatatcgttcctcgggcattatgcttggcaaggtacttgccagcgggcaggagctgtcaggcgatcatcatattccgtggttctggcattgtcgtaaatgtggtgcgggggcaaccagtactacccgtcctgtcgaatgtagtcactgcaaagcggatatacagcaacttgatgtgaagcgttatttacagcctgttggttttgcgacagatatccgttatcaggcgcataatgatgtatccatgcctgcacaacttccctggaaagatccacgtgttcttgtaccgtcttcggtgtgggtttctttacccgatgctgggctaggacgttaccgttttagccatagtggggaattgttccacttcagtgaaggggaatttgggcacggctacgcaatttgcctctcatgtggtcgggcagaatctcaaactcaaccccagcgtacccctgaaaatctaaagaaccaagagcgggaaaatacgcattacctgttgcgagggggcagtaacgatcgtcaggggagcagtaaattgtgccacggtcatgtgcataaagatctgtggttggggtatagcagtcgtacagatatggttgagctgcaactcaatgatgataatgggctgttgatccgtgatgaggttgccgcacggtcccttgcggtcgctttgcgtgaagggttagcgcataaattgggtatcgaaaatactgagctgggcgtgacgacgcagcaagcgcgcgatatcaatggctataccggattttccatcttcatttacgacaataatgcgggtggtgcaggttatgcagtgcaattgatcgaccattgggctgatgtctttaattacgccagaaaattgctcgattgcagttgcgataaattctgtcaccactgcttgctcagctatgacagtcagcattatgtcaacagattagatcgtcaccatgcactaaccctacttaccaatgtacggttgcagcgacttaacctcgcgccagaatatcagtacttcggcgaaggtagccgggttgaaactaaccctctgagtttacgtattgcgcaatgcctgaacagcgagatttatgactcctgctcgctggttcttgcggggccgcaggaacagtgggactttgcccaatggctattatttaaagagttaatccagtttgcttcctccggtgggaatgttgagttgctggtggccacgccgctggaaaacttaactgatagctccagacatcagctttccgcgttggcggcgatgccgggagggcgcttacaagtaaaatcccttgccactgcgcaactcatgcaaggaaaggggcgctggcttgcgcaggtgactcgcgaagggcaaagccgacagtgggccgcagacgacagcgctaccgttgcacctggtgaattatggggacaaagtgcgtcttcaccagtagtgacacttaaaggaacgtccagaaaaatcttctcgggtcagatcttaagtgcagaagacttactgcccgccttacccgccgggacggtgcgcatcaatctctgcgaacagctggacgggccgctggaaggttttggttcgcgtttctggtcgttagtcacgcaacagcacgctggctggaagcaggcatttaccctccacaaagagataacgcatgttgagtacagcgatcgttatcttaatagcccattcacagctcgtttgttaggtgaaatcttaaccgagctggttgaacagggaatggcggaacgcgccagcctcactgtttgcgtcaaaaaattggattacaactctcgccaacacgactccctctataacgcgtggcttaatgaggaagatcgtcagcaggttgtgaccactttacttgaagaaggatatctggggcctgcgtggccgggagcaattagctggttaacgggtgataaccagagtacggagcatggacgagaactgacagtcaccttcagcgatggcagtcagcattatgtcctgctcgacatggggcttagctactggcgctgtattgaagacaccttctttgattttgccctgcgagtaccgcagcaagttgaacggctggcaaacacgcgagcgcgagctgttgccccgggtaatgaccttaggagttatattatcgctggttaa

SEQ ID NO: 28655 - DNA, 3360 bp, Escherichia coli 1-250-04_S3_C1
ttgcttgtgaaaactccagttaacccacttttgcaatggcttaacatgttttttagtcgccgttcattatccggagctgatggacgggcgttatatgcttaccgttgtactgatacagagtacgaaagtttggcagagctactgcgtacatatgccccccgtagttatccaagaacgatattcatttcctatagcgatgttctatttagcatatatgccgcagagtttatccgccggactcatacggtcggacaccctaaatgggacacaattttagattctattaactggaaagttccgtatgttcatcgacagaagctggttaatgatggcattcgctactggaaaagaaagataagaaacctggggcaagcttcgggttatctccatacactggcttgtgaaggtggtttacctatccgcatgattgaaaatgagagcggttatttgattacctatttcagaaggatatatcaggcgcttcgtgggcaatcatctcaatatcctgccgctaaaattgcacaagaattaggcgatacgattcctgtcacaatgcaaaacgaactggtctatgaaatagccggtgaattctgcgagactctctgccgattacttagtgagcatcctcctcatagcagtgatcccgtttctgcattacgtaagctctctccagactggcatcttcaacttccactcgttctccccgaagcgaatgctgcagagattgtaaggcgattactttctcaatcttctgaaatacgcagtgcaagtagtcttcaggttgaaagaatctgggtcgatgttgatgacagttggtattgcgatgcccggttccgattcccggccacaatgcgtacagaacagttaacctctttgtttgaatgccatattcagccggagcagacccgactcatcatttcaggaaaatggaaaaatggcggggcaagggtggcaatgctaagccgttatgagcagcaagattggcggggcgagttattacctattgcgatgcaaaaactctctggtgcagatgcaatggccgaaatctcattgtcgcttcatgaaggtccaattctgttaggtcacacaattccaaaaggcggttatgaacttactgaagaacttccctgggtttttgaagcgatgaatgagagtgaatcgcagctaaaacttgttggtatggggtctgtgagttccaggctaaatgctctgtttatttcgctaccgaaaaatagccatttagatattagtggagaaggtgagtttgatatcccaaggttgctaaaaaacagtgaacgcagcttaactaaaataagtggagtatttagcgttgttttacatgatggtgctgtttgtacaattcgcacccagcaactttatgattctgcgattgaatattatattaaatcgacagaagttgaactggttaaatcggattatcctgtccatcgagcctggccgaagatcggttggaaaaaggatctgcaatatggcattgtaccggagaaagaacttttttggcgttccattcgttcaggtaataatgcctggtattctgtcgcatcagaaatgccaaaaggacagatagaagtccggcgaatagttaatgatgaggttttatttagcggtaaagttgtagttttaccagcagacttcgatattaatattatacctgagagtgctcagcaaggcattattatgctttctggtataacggatactagaattgataaatattcaaacaatgaaaaagtaacacttaagtccgattattcacaaaacgagtgtgctatttattataattcatcgctgatgctggaaaataccgttgatttacgggtctcctggaaagatggttctaatcttaaactattattacctaagccggttagcggtggccgatttgtaactaatgatggttctgttcattttgatggtgtggcatctatagcacatttgcatggaatagatgctgagttattaaccatatcatgtgctggaagaggatatcttaatatcgagttattggatgaaaatccagtagctgaaaaattccgttatttacatgccgaccttcctcttttatcaggacgcaatgacaaattacaacaaatttcactttatgagaactataatttgctaaatgctatgctggcatgtgcatggaacagcaatagtacattatgtgttgatttttactctgacagatttggaaaggataaagcaacactcaatattaaacgctacgatggtagttttattgaacacgatcaagggttactggttgatataaaaaattctgttgtttttcctgcaaatagaatagacgaactggttgttgatgctatttctcttaagaatcctggcttacacatatcattgttaaaaaaagatgagtttgcttatgatctttcagctctgaatgttcaggatagtccatggttaattgtgggaaaacttgatggtacagctcgcattgcaccagtaattaaatggatgctacctgtattgcagacaaatgatttattactaaatgctctatgcgaagcagacccagaacagcgcaaaaaaaattttaatgagctaatttttgaaatagataacaacccattgcaaaattattgctgtttattaacagagtatattaagaaatacaaaatgaataatggcttatccttgctggatctggacttgttcagatgtatttcgagtaattaccgcgtggttgttcaattgttaatatcatcatgtctttctggtgatagcgatacgatttatgatatacaggaagaattacccttttcatggggatggattcccgtttcaatctggaaagatgttttccaaaaatgttggacttatctggagaaacagattaacgataaaacattagcattacatatattgcaaccctttattgcttttatgaaccatcgtgcacatatcgatcgtcggctggctccgattgcgaatatgttacttacatatagtgagagcctaccaaccggttgtgatgtattgccaactgttagtcgtgagcagtttaatgaagctaaacagatgctattaaggaaccccgacagctttgggcgtatcagtatcttccctaaagaactttggtctagtgctattactccagagttaaaatctgtttttaataagctttggattgaagataaatatcactcacggcttgaaaaacgttttaatttgatgttagtcgcagcgctgttaacccaaaaagataataacctgatacatcaactgtctgcgctttttgaatttcactatcagcaagccccacagcaattaggggtaatctatcaatattattttgaacaagcaggagtatgtcattga

SEQ ID NO: 28656 - DNA, 6315 bp, Escherichia coli 1-250-04_S3_C2
atggacgttcagcaactgcattatgcgccacttctaaatcagcttcatcagcgtgcggtgaggtcggtggtaagtcagttggcattgcggagcaagtcgttgactcattatctggaatcacaatattttcagcctcccggtcaggaggggtcactgcttgcagacccggtattcgaaagtacattcggctggatgcctgcggatgaaacaatggaggatttgcgggacaagctgatctccagcccgctggttgatgcattgagcaaagcgccagtgccatttcgtcatcaactcactgcgtggcgaacgattctggaagacaaaaaatccttgttagtgagcagcggtacgggatccgggaaaacagaatgctttatggtacctgttctggaagatcttattcgtcagcaaaaatcgacccgccagtcactaacagggacacaagctattttcttgtatccgttaaatgcattaattaacagccaacaggagcggcttcgcgaatggacgcgcggatttaaggggaaaatacgcttcgcgctatataatggcgaaacccggcataccaaatacgaaattcaggaagatcagttgaaagtacctgaacaagctttgagtcgggaagccatttatgaagcaccaccttccatcatggtgacgaataccaccatgctggaatatatgctgattcgtcgtaaagatgccccaatcatcgaaaagtctcaggggatgttaaagtatatcgtcctggatgaagcccatagttatattggttctcaggctgctgagttagcgctgcttttacgtcgtgttatgcaggctttcaatgttggacccggcacagataaacctgtgcagattatcgcgacctctgccactattggtgaagactctcctgaaggtaataaggagcttgctaaatttgtcgctgatctcgcgggcgttacagaacgtgatgtcaaagtggttcgcggttatcgacaaataccgcgggtatcggagtcgctgattcgtcatgaataccccacatctttaacttctcttaaatccctgagccctcaggatctttaccaacagctttgtcattaccgtgtggcccagcaattgcgtcaggcgttaactcatcccggacggcaggcagtacgtttgagtgagttgctcaatgttgccagaagaacctggccagatattaatcaccgtgagctactgcaactcctcgatctaatggcaagatcgcgagaaggtgaactggcttttacgccattacgtatgcatgggtttatcagaacactggcgggtctatgggcatgttcaaacaaacaatgctcacataaagcacatgaattaaatcagagtgactggccatttggtcaggtatggtttgagcagcgccaatattgtgactgtggtgcgccggtatttgaagttttacgttgctccgggtgtggttcagcttatttgtctgccaaagaggagatgcgcggtgatggaacgaactggttggtagcgcaaccagccgctgccgaagtggatgagtttgctcttgatgtagatgtttattctgaagatgaagacaacgacgaattagacaataactctcaatttgatcgtctgattgcgagcgatggtgaaaaatatatcatttcactggaagaaacgacggcggggaaaattgatagtgaagcgcaaaagcactatgaaataaacctgttaagaccggaatctcgaggtgagggacgcaataactcctttgcttgtgtttgctgtggtgacactcaacggaaaaataatcctttattccgtccgcttcggctcggtgcgcccttttttttaaatgaaattattcctactctgctggagttttctccattaccgcaaacaagagaagagcagttaggaccgtttaatggtcgacgcttgctcacctttacggattcgcgtcagggtaccgctcgcatttcagcccgcttacagcaggatgccgataaagcgacgttgcgagctctttgttaccaggagctggcaaatattacagagccttcagcaaaactcagcccggcacactgtgcactgttagagaaagttattagccagttttctgtcctccctttaaaaaattccatcgacgcgctgaaaaaagcgatggctgcgaatgaggagcttagcccgacggacattcaggcacttaaaattattgagccgatggtgagttccttaagcccggatcatgctgaagcgatgcaaatacttcaggctaactctggcaatcagcagaagaaaaccatgtcatggcaaacgctgtctgaacagctggttggcagtgtggaccttgccgatagaatgagaggcagttttaaagaattgtctgggcttgatcttactaaacaacagtttgcagatttttgtttatacagcgagtttggtcgccgccctaaaaatgcctggaccctcgaaagtcttggtctggtagccattcactatccatttattgataaagttacaacctgcccgcaggactggaagacattattacccgatcccgataagcaattagcggaatggcgtaatttattgaagattactcttgatttctttatccgtgaaaacagtgccgttttttacgaaaacgagcaataccctcgctggatgggggcacgtttcccggtaaaaatgctccaggggccagataaaaaaaacaaagggcagaaacgtgatcaactttggccacaaatacgcgatcgccattataaccgggtcattaagctattaatcgcagtctttccggcaatacaacctgagcaggctcactggaaatcgttagttaaccacttaatgattgaggtctgggatgcaattcgaccctgcttacgtcagtttgagtcgggttatcagctggatattaaacaacaagctgaattttacagtccaaagcaagtgtggcgttgcccctatactcgacgtgcgttagacgtcacgttgctgggatactctccgtatttgccgggtagcaaagaaattgcacctgaaaaagcagtgttgattgaaatgcctgagcttcctgtacgtcactggcgtttgtctggtggtggagaaatcgcccgagaagaacgtctggagtggctggaaagtaatgcgctgattcaacatgcccgcgaggaaggattatggtctactcgcagcgaccgactggccctgaaagatagctggtatcgtctggaggaacactctgcgcagagaacgcctgagcagaaccagtttaatgaaaaacaatttaagtcaggcaaagttaatgtgctgaactgttccacgaccatggagatgggggtggatattggtggtatgagtttggtggcaatgaacaacgttcctccagctccggcaaattatttgcagcgtgcaggccgcgcgggtcgacgtggagagagtgcatctgctgccattacgttatgtaaaaacacggcgcatggaatggaggtattcaaagaccccctctgggcgttcaacactactgccagtgcgccacgggttcgttttgggagcagcagtattgttcaacgacatgttaatgccctggttttaggtctgtttttacgagctgaagttcctgatgcgacaaaactgagttgcaaatggttctttgaaggtgatgagagccagtgttttcgttttctccattggttaaatcaccaggccgatcagctagcggataaacttaaacgccttactcagggaaccgtcctgatgtcattgacggcaacccagctcttgacccgcacacaagcaatgatgcagcaggttgatatccgctggagaagccaacttgcgatactgttggaaaatatcgaagcgttgaaggcggataacagcgcgtgggaagaaacgccagcaggtaaagccatcgcttatcagcttcgtgattatcgcggtgcatatctgttttctaaactcattagtgaagcgttcctgccggggcatggtttcccggttggcgtcgtcaatttcaattatctgacggcagatgagctggaaaaacgtcgcgcaataaaagctactcaggctgaccctaatgaagggggagaaagcttttctcgtcgtattgaaaaattgcccagccgtgatttgcctacagcattacgcgagtatgctccaggtgcagatgtggtattgggcggaaaagtatatcgttcctcgggcattatgcttggcaaggtacttgccagcgggcaggagctgtcaggcgatcatcatattccgtggttctggcattgtcgtaaatgtggtgcgggggcaaccagtactacccgtcctgtcgaatgtagtcactgcaaagcggatatacagcaacttgatgtgaagcgttatttacagcctgttggttttgcgacagatatccgttatcaggcgcataatgatgtatccatgcctgcacaacttccctggaaagatccacgtgttcttgtaccgtcttcggtgtgggtttctttacccgatgctgggctaggacgttaccgttttagccatagtggggaattgttccacttcagtgaaggggaatttgggcacggctacgcaatttgcctctcatgtggtcgggcagaatctcaaactcaaccccagcgtacccctgaaaatctaaagaaccaagagcgggaaaatacgcattacctgttgcgagggggcagtaacgatcgtcaggggagcagtaaattgtgccacggtcatgtgcataaagatctgtggttggggtatagcagtcgtacagatatggttgagctgcaactcaatgatgataatgggctgttgatccgtgatgaggttgccgcacggtcccttgcggtcgctttgcgtgaagggttagcgcataaattgggtatcgaaaatactgagctgggcgtgacgacgcagcaagcgcgcgatatcaatggctataccggattttccatcttcatttacgacaataatgcgggtggtgcaggttatgcagtgcaattgatcgaccattgggctgatgtctttaattacgccagaaaattgctcgattgcagttgcgataaattctgtcaccactgcttgctcagctatgacagtcagcattatgtcaacagattagatcgtcaccatgcactaaccctacttaccaatgtacggttgcagcgacttaacctcgcgccagaatatcagtacttcggcgaaggtagccgggttgaaactaaccctctgagtttacgtattgcgcaatgcctgaacagcgagatttatgactcctgctcgctggttcttgcggggccgcaggaacagtgggactttgcccaatggctattatttaaagagttaatccagtttgcttcctccggtgggaatgttgagttgctggtggccacgccgctggaaaacttaactgatagctccagacatcagctttccgcgttggcggcgatgccgggagggcgcttacaagtaaaatcccttgccactgcgcaactcatgcaaggaaaggggcgctggcttgcgcaggtgactcgcgaagggcaaagccgacagtgggccgcagacgacagcgctaccgttgcacctggtgaattatggggacaaagtgcgtcttcaccagtagtgacacttaaaggaacgtccagaaaaatcttctcgggtcagatcttaagtgcagaagacttactgcccgccttacccgccgggacggtgcgcatcaatctctgcgaacagctggacgggccgctggaaggttttggttcgcgtttctggtcgttagtcacgcaacagcacgctggctggaagcaggcatttaccctccacaaagagataacgcatgttgagtacagcgatcgttatcttaatagcccattcacagctcgtttgttaggtgaaatcttaaccgagctggttgaacagggaatggcggaacgcgccagcctcactgtttgcgtcaaaaaattggattacaactctcgccaacacgactccctctataacgcgtggcttaatgaggaagatcgtcagcaggttgtgaccactttacttgaagaaggatatctggggcctgcgtggccgggagcaattagctggttaacgggtgataaccagagtacggagcatggacgagaactgacagtcaccttcagcgatggcagtcagcattatgtcctgctcgacatggggcttagctactggcgctgtattgaagacaccttctttgattttgccctgcgagtaccgcagcaagttgaacggctggcaaacacgcgagcgcgagctgttgccccgggtaatgaccttaggagttatattatcgctggttaa

SEQ ID NO: 28657 - DNA, 3360 bp, Escherichia coli 1-250-04_S3_C2
ttgcttgtgaaaactccagttaacccacttttgcaatggcttaacatgttttttagtcgccgttcattatccggagctgatggacgggcgttatatgcttaccgttgtactgatacagagtacgaaagtttggcagagctactgcgtacatatgccccccgtagttatccaagaacgatattcatttcctatagcgatgttctatttagcatatatgccgcagagtttatccgccggactcatacggtcggacaccctaaatgggacacaattttagattctattaactggaaagttccgtatgttcatcgacagaagctggttaatgatggcattcgctactggaaaagaaagataagaaacctggggcaagcttcgggttatctccatacactggcttgtgaagggggtttacctatccgcatgattgaaaatgagagcggttatttgattacctatttcagaaggatatatcaggcgcttcgtgggcaatcatctcaatatcctgccgctaaaattgcacaagaattaggcgatacgattcctgtcacaatgcaaaacgaactggtctatgaaatagccggtgaattctgcgagactctctgccgattacttagtgagcatcctcctcatagcagtgatcccgtttctgcattacgtaagctctctccagactggcatcttcaacttccactcgttctccccgaagcgaatgctgcagagattgtaaggcgattactttctcaatcttctgaaatacgcagtgcaagtagtcttcaggttgaaagaatctgggtcgatgttgatgacagttggtattgcgatgcccggttccgattcccggccacaatgcgtacagaacagttaacctctttgtttgaatgccatattcagccggagcagacccgactcatcatttcaggaaaatggaaaaatggcggggcaaggttggcaatgctaagccgttatgagcagcaagattggcggggcgagttattacctattgcgatgcaaaaactctctggtgcagatgcaatggccgaaatctcattgtcgcttcatgaaggtccaattctgttaggtcacacaattccaaaaggcggttatgaacttactgaagaacttccctgggtttttgaagcgatgaatgagagtgaatcgcagctaaaacttgttggtatggggtctgtgagttccaggctaaatgctctgtttatttcgctaccgaaaaatagccatttagatattagtggagaaggtgagtttgatatcccaaggttgctaaaaaacagtgaacgcagcttaactaaaataagtggagtatttagcgttgttttacatgatggtgctgtttgtacaattcgcacccagcaactttatgattctgcgattgaatattatattaaatcgacagaagttgaactggttaaatcggattatcctgtccatcgagcctggccgaagatcggttggaaaaaggatctgcaatatggcattgtaccggagaaagaacttttttggcgttccattcgttcaggtaataatgcctggtattctgtcgcatcagaaatgccaaaaggacagatagaagtccggcgaatagttaatgatgaggttttatttagcggtaaagttgtagttttaccagcagacttcgatattaatattatacctgagagtgctcagcaaggcattattatgctttctggtataacggatactagaattgataaatattcaaacaatgaaaaagtaacacttaagtccgattattcacaaaacgagtgtgctatttattataattcatcgctgatgctggaaaataccgttgatttacgggtctcctggaaagatggttctaatcttaaactattattacctaagccggttagcggtggccgatttgtaactaatgatggttctgttcattttgatggtgtggcatctatagcacatttgcatggaatagatgctgagttattaaccatatcatgtgctggaagaggatatcttaatatcgagttattggatgaaaatccagtagctgaaaaattccgttatttacatgccgaccttcctcttttatcaggacgcaatgacaaattacaacaaatttcactttatgagaactataatttgctaaatgctatgctggcatgtgcatggaacagcaatagtacattatgtgttgatttttactctgacagatttggaaaggataaagcaacactcaatattaaacgctacgatggtagttttattgaacacgatcaagggttactggttgatataaaaaattctgttgtttttcctgcaaatagaatagacgaactggttgttgatgctatttctcttaagaatcctggcttacacatatcattgttaaaaaaagatgagtttgcttatgatctttcagctctgaatgttcaggatagtccatggttaattgtgggaaaacttgatggtacagctcgcattgcaccagtaattaaatggatgctacctgtattgcagacaaatgatttattactaaatgctctatgcgaagcagacccagaacagcgcaaaaaaaattttaatgagctaatttttgaaatagataacaacccattgcaaaattattgctgtttattaacagagtatattaagaaatacaaaatgaataatggcttatccttgctggatctggacttgttcagatgtatttcgagtaattaccgcgtggttgttcaattgttaatatcatcatgtctttctggtgatagcgatacgatttatgatatacaggaagaattacccttttcatggggatggattcccgtttcaatctggaaagatgttttccaaaaatgttggacttatctggagaaacagattaacgataaaacattagcattacatatattgcaaccctttattgcttttatgaaccatcgtgcacatatcgatcgtcggctggctccgattgcgaatatgttacttacatatagtgagagcctaccaaccggttgtgatgtattgccaactgttagtcgtgagcagtttaatgaagctaaacagatgctattaaggaaccccgacagctttgggcgtatcagtatcttccctaaagaactttggtctagtgctattactccagagttaaaatctgtttttaataagctttggattgaagataaatatcactcacggcttgaaaaacgttttaatttgatgttagtcgcagcgctgttaacccaaaaagataataacctgatacatcaactgtctgcgctttttgaatttcactatcagcaagccccacagcaattaggggtaatctatcaatattattttgaacaagcaggagtatgtcattga

SEQ ID NO: 28658 - DNA, 6315 bp, Escherichia coli 2-005-03_S3_C2
atggacgttcagcaactgcattatgcgccacttctaaatcagcttcatcagcgcgcggtgaggtcggtggtaagtcagttggcattgcggagcaagtcgttgactcattatctggaatcacaatatttccagcctcccggtcaggaggggtcactgcttgcagacccggtattcgaaagcacgttcggctggatgcctgcggatgaaacaatggaggatttgcgggacaagctaatttccagcccgctggttgatgcattgagcaaagcgccggtgccatttcgtcatcaacttacggcgtggcgaacgattctggaagacaaaaaatccttgttagtgagcagcggtacgggatccgggaaaacagaatgctttatggtaccggttctagaagatcttattcgtcagcaaaaatcgacccgtcagtcactaacagggacacaagctattttcttgtatccgttaaatgcattaattaacagccaacaggagcggcttcgtgaatggacgcgcggatttaaggggaaaatacgcttcgcgctatataatggcgaaacccggcataccaaatacgaagttcaggaagatcagttgaaagtacctgaacaagctttgagtcgggaagccatttacgaagcaccaccttccatcatggtgacgaataccaccatgctggaatatatgctgattcgtcgtaaagatgccccaatcatcgaaaagtctcaggggatattaaagtatatcgtcctggatgaagcccatagttatattggttctcaggctgctgagttagcgctgcttttacgtcgtgttatgcaggctttcaatgttggacctggcacagataaacctgtgcagattatcgcgacctctgccactattggtgaagactctcctgaaggtaataaggagcttgctaaatttgtcgctgatcttgcgggcgttacagaacgtgatgtcaaagtggttcgcggctatcgacaaataccgcgggtatcggagtcgctgattcgtcatgaatatcccacatctttaacttctcttaaatctttgagccctcaggatctttaccaacagctttgtcattaccgtgtagcccagcaattgcgtcaggcgttaactcatcccggacggcaggcagtacgtttgagtgagttgctcaatgttgccagaagaacctggccagatattaatcaccgtgagttactgcaactcctcgacctaatggcgagatcgcgagaaggtgaactggcttttacgccattacgtatgcatgggtttatcagaacactggcgggtctatgggcatgttcaaacaaacaatgcttacataaagcgcatgaattaaatcagagtgactggccatttggtcaggtatggtttgagcagcgccaatattgtgactgtggtgcgccggtatttgaagttttacgttgctccgggtgtggttcagcttatttgtctgccaaagaggaggtgcgcggtgatggaacgaactggttggtagcgcaccccgccgctgccgaagtggatgaatttgctcttgatgtagatgtttattctgaagatgaagacaacgacgaattagacaataactctcaatttgatcgtctgattgcgatcgatggtgaaaaatatatcatttcactggaagaaacgacggcggggaaaattgatagtgaagcgcaaaagcactatgaaataaacctgttaagaccggaatctcgaggtgagggacgtaataattcctttgcttgtgtttgctgtggtgacacccaacgaaaaaataatcctttattccgtccgcttcgacttggcgcgcccttttttttaaatgaaattattcctactctgctggagttttcaccattaccgcagacaagagaagagcagttaggaccgtttaatggtcgacgtctgctcacctttacggattcacgtcagggcactgcccgcatttctgcccgcttacagcaggatgccgataaagcgacgttgcgagctctttgttaccaggagttggccaatattaatgagccatcagcaaagctcagcccggcacactgcgcattgttagagagttttattacccagttttctatccttcctttaaaaaactctattgacgcgctgaaaaaagcgatggttgctaatgaagagcttagcccggcggacattcaggcacttaaaattatcgagccgatggtgagttccttaagcccggatcatgctgaagcgatgcaaatactccaggctaactctggcaatcagcagaagaaaaccatgtcatggcaaacactgtctgaacagctggttggcagtgtggaccttgccgatagaatgagaggcagttttaaagaattgtctgggcttgatcttactaaacaacagtttgcagatttttgtttatacagtgagtttggtcgccgccctaaaaatgcctggaccctcgaaagtatgggtctggtagccattcactatccatttattgataaagttacaacctgcccgcaggactggaagacattattacccgatcccgataagcaattagcggaatggcgtaatttattgaagattactcttgatttctttatacgtgaaaacagtgccgttttttacgaaaacgagcaataccctcgctggatgggggctcgtttcccggtaaaaatgctccagggtccagataaaaaaaacaaagggcagaaacgtgatcaactttggccacaaatacgcgatcgccattataaccgggtcattaagctattaattgcagtctttccggcaatacaacctgagcaggctcactggaaatcgttagttaaccacttaatgattgaggtctgggatgcaattcgaccctgcttacgtcagtttgagtcgggttatcagctggatattaaacaacaagctgaattttacagtccaaagcaagtgtggcgttgcccctatactcgacgtgcgttagacgtcacgttactgggatactctccgtatttgccgggtagcaaagaaattgcacctgaaaaagcagtgttgattgaaatgcctgagcttcctgtacgtcactggcgtttgtctggtggtggagaaatcgcccgagaagaacgtctggagtggctggaaagtaatgcgctgattcaacatgcccgcgaggaaggattatggtctactcgcagcgaccgactggccctgaaagatagctggtatcgtctggaggaacactctgcgcagagaacgcctgagcagaaccaatttaatgaaaaacaatttaagtcaggcaaagttaatgtgctgaactgctccacgaccatggagatgggggtggacattggtggtatgagtttggtggcaatgaacaacgttcctccagctccggcaaattatttgcagcgtgcaggccgcgcgggtcgacgtggagagagtgcatctgctgccattacgttatgtaaaaacacggcgcatggaatggaggtattcaaagaccccctctgggcgttcaacactactgccagtgcgccacgggttcgttttgggagcagcagtattgttcaacgacatgttaatgccctggttttaggtctgtttttacgagctgaagttcctgatgcgacaaaactgagttgcaaatggttctttgaaggtgatgagagccagtgtcttcgttttctccattggttaaataaccaggccgatcagctggcggataaacttaaacgccttactcagggaaccgtcctgatgtcattgacggcaacccagctcttgacccgcacacaagcaatgatgcagcaggttgatatccgctggagaagccaacttgcgatactgttggaaaatatcgaagcgttgaaggcggataacagcgcgtgggaagaaacgccagcaggtaaagccatcgcttatcagcttcgtgattatcgcggtgcatatctgttttctaaactcattagtgaagcgttcctgccggggcatggtttcccggttggcgtcgtcaatttcaattatctgacggcagatgagctggaaaaacgtcgcgcaataaaagctactcaggctgaccctaatgaagggggagaaagcttttctcgtcgtattgaaaaattgcccagccgtgatttgcctacagcattacgcgagtatgctccaggtgcagatgtggtattgggcggaaaagtatatcgttcctcgggcattatgcttggcaaggtacttgccagcgggcaggagctgtcaggcgatcatcatattccgtggttctggcattgtcgtaaatgtggtgcgggggcaaccagtactacccgtcctgtcgaatgtagtcactgcaaagcggatatacagcaacttgatgtgaagcgttatttacagcctgttggttttgcgacagatatccgttatcaggcgcataatgatgtatccatgcctgcacaacttccctggaaagatccacgtgttcttgtaccgtcttcggtgtgggtttctttacccgatgctgggctaggacgttaccgttttagccatagtggggaattgttccacttcagtgaaggggaatttgggcacggctacgcaatttgcctctcatgtggtcgggcagaatctcaaaatcaaccccagcgtacccctgaaaatcttaagaacccagagagggaaaatacgcattacctgttgcgagggggcagtaacgatcgtctgggtagcaataaattgtgccacggtcacgtgcataaagatctttggttggggtatagcagtcgtacagatatggttgagctgcaactcaatgatgataatggcctgttgatccgtgatgaggttgccgcgcgttcccttgcggtcgctttgcgtgaagggttagcgcataaattgggtatcgaaaatactgagctgggcgtgacgacgcagcaagcgcgcgatatcaatggctataccggatattccatcttcatttacgacaataatgcgggtggtgcaggttatgcagtgcaattgatcgaccattgggctgatgtctttaattacgccagaaaattgctcgattgcagttgcgataaattctgtcaccactgcttgctcagctacgacagtcagcattatgtcaacagattagatcgtcaccatgcattaaccctgcttaccaatgtacggttgcagcgacttaacctcgcgccagaatatcagtacttcggcgatggtagccgggttgaaactaaccctctgagtttacgtattgcgcaatgcctgaacagcgagatttatgactcctgctcgctggttcttgcggggccgcaggaacagtgggactttgcccaatggccattatttaaagagttgctccagtttgcctcctccggtgggaatgttgagttgctggtggccacgccgctggcaaacttaactgatagctccagacatcagctttccgcgttggcggcgatgccgggaggtcgcttacaagtgaaatccattgccactgcgcagctcatgcaaggaaaggggcgctggcttgcgcaggtgactcgcgaagggcaaagccaacagtgggccgcagacgacagcgctaccgttgcacctggtgaattatggggacaaagtgcgtcttcaccagtagtgacacttaaaggaacgtccggaaaaaccttctcgggtcagaccttaagtgcagaagatttactgcccgccttacccaccggggcggtgcgcatcaatctctgtgaacaactggacgggccgctggaaggttttggttcgcgtttctggtcgttagtcacgcaacagcacgctggctggaagcaggcttttccccgccacaaagagataacgcatgttgagtacagcgatcgttatcttaatagcccattcacggcgcgtttgttaggtgaaatcttaaccgagctggttgaacagggaatggcggaacgcgccagcctcactgtttgcgtcaaaaaattggattacaactctcgccaacacgacgctctctataacgcgtggcttaatgaggaagatcgtcagcaggttgtgaccactttacttgaagaaggatatctggggcctgcgtggccgggagcaattagctggttaacgggggataaccagagtacggagcatggacgagaactgacagtcaccttcagcgatggcagtcagcattatgtcctgctcgacatggggcttagctactggcgctgtattgaagacaccttctttgattttgctctgcgagtaccgcagcaagttgaacggctggcaaacacgcgagcgcgagctgttgcctcgggtaatgaccttaggagttatgttatcgctggataa

SEQ ID NO: 28659 - DNA, 3360 bp, Escherichia coli 2-005-03_S3_C2
ttgcttgtgaaaactccagttaacccacttttgcaatggcttaacatgttttttagtcgccgttcattatccggagctgatggacgggcgttatatgcttaccgttgtactgatacagagtacgaaagtttggcagaactactgcgtacatatgccccccgtagttatccaagaacgatattcatttcctatagcgatgttctatttagcatatatgccgcagagtttatccgccggactcatacggtcggacaccctaaatgggacacaattttagattctattgactggaaagttccgtatgttcatcgacagaagctggttaatgatggcattcgctactggaaaagaaagataagaaacctggggcaagcttcgggttatctgcatacactggcttgtgaaggtggtttacctatccgcatgattgaaaatgagagcggttatttgattacctatttcagaaggatatatcaggcgcttcgtgggcaagcatctcaatatcctgccgctaaaattgcacaagaattaggcgatacgattcctgtcacaatgcaaaacgaactggtctatgaaatagccggtgaattctgcgagactctctgccgattacttagtgagcatccacctcaaagcagtgatcccgtttctgcattacgtaagctctctccagactggcatcttcaacttccactcgttctccccgaagcgaatgctgcagagattgtaaggcgattactttctcaatcttctgaaatacgcagtgcaagtagtcttcaggttgaaagaatctgggtcgatgttgatgacagttggtattgtgatgcccggttccgattcccggccacaatgcgtacagaacagttaacctctttgtttgaatgcaatattcagccggagcagacccgactcatcatttcaggaaaatggagaaatggcgggggaagggtggcaatgctaagccgttatgagcagcaagattggcgggtcgagttattacctattgcgatgcaaaagctctctggtgcagatgcaatggccgaaatctcgttgtcgcttcatgaaggtccaattctgttaggccacacaattccaaaaggcggttatgaacttactgaagaactcccctgggtttttgaagcgatgaatgagagtgaatcgcagctaaaacttgtcggtatggggtctgtgagttccaggctaaatgctctgtttatttcgctaccgaaaaatagccatttagatattagtggagaaggtgagtttgatatcccaaggttgctgaaaaacagtgaacgcagcttaactaaaataagtggagtatttagcgttgttttacatgatggtgcagtttgtacaattcgcacccagcaactttatgattctgcgattgaatattatattaaatcgacagaagttgaactggttaaatcggattatcctgtccatcgagcctggccgaagatcggttggaaaaaggatctgcaatatggcattgtaccggagaaagaacttttttggcgttccattcgttcaggtaacaatgcctggcattctgtcgcatcagaaatgccaaaaggacagatagaagtcagacgaatagttaatgatgaggttttatttagcggtaaagttgtagttttaccagcagacttcgatattaatattatacctgagagtgttcagcaaggcatcataatgctttctggtataacggatactagaattgacaaatattcaaacaatgaaaaagtaacacttaagtccgattattcacaaaacgagtgtgctatttattataattcatcggagatgctggaaaataccgttgatttacgggtctcctggaaagatggttctaatcttaaactattattacctaagccggttagcggtggccgatttgtaactcatgatggttctgttcattttgatggtgtggcatctatagcgcatttgcatggaatagatgctgagttgttaaccatatcttgtgctggaagaggatatcttaatatcgagttgttggatgaaaatccagtagctgaaaaattccgttatttacatgccgaccttcctcttttatcaggatgcaatgacaaattaaaacaaatttcactttatgagaactataatttgctaaatgctatgctggcatgtgcatggaacagcaatagtacattatgtgttgatttttactctgacagatttggaaaggataaagcaacactcagtattaaacgctacgatggtagttttattgaacacgatcaagggttactggttgatataaaaaattctgttgtttttcctgcaaatagaatagacgagttggttgttgatgctatttctcttaaggatcctggcttacacatatcgttgctaaaaaaagatgaatttgcttatgatctttcagctctgaatgttcaggatagcccatggttaattgtggggaaacttgatggtacagctcgcattgcaccagtaattaaatgggggctacctgtattacagacaaatgatttattacttaatgctctatgcgaagcggattccgaacagcgaaaaaaatattttaatgagctaatttttgaaatagataacaatcctttgcaaaattattgctgtttattaacggagtatattaagaaatacaaaatgaataatggcttatccttgctggatctggatttgttcagaggtatttcgagtaattaccgcgtggttgttcagttgttaatatcatcatgtctttctggtgatagcgatacgatttatgatatacaggacgaattacccttttcatggggatggattcccgtttcaatctggaaagatgtttttcaaaagtgttgggcttatctggaaaaacagattaacgataaaacattagcattacatatattgcaaccctttattgcttttatgaaccatcgtgcacatatcgatcgtcggctggctcccattgcgaatatgttacttacatatagcgaactcctaccagccggttgtaatgtcttgccaactgttagtcgtgagcagtttaatgaagctaaacagatgctattaaggaaccccgacagctttgggcgtatcagtatcttccctaaagaactttggtctagtgctattactccagagttaaaatctgtttttaataagctttggattgaagataaatatcactcacggcttgaaaaacgttttaatttgatgttagtcgcagcgctgttaacccaaaaagataataacttgatatatcaactgtctgcgctttttgaattccactatcagcaagccccgcagcaattaggggtaatctatcaatattattttgaacaagcaggagtatgtcattga

SEQ ID NO: 28660 - DNA, 6345 bp, Escherichia coli 2-011-08_S1_C3
atgactacacgctatttttcgtcacttattgaacaatcgttgtctcgttcaactgaagcaacgctcagtatcatgggcgttacaaatccgcagttgcgtgaacatctcgcgcaacaaatgggggctgattgtgggaaaccgggctcattccttgcttctccggtattccagcaaatgtttggatggaaggagtcaaatcacacgatgcgcagcctgacggaaggcaacgcattgttgagcaaagcagtggttgattcactggataatcagagtaatggccggtaccgatttggtgctgactggaagccttttacacaccagttagccagttggaaagctttgctggaaaagaaacattcagtggtggtaaccagtggtacgggttcaggtaaaacggaatgttttatggttccggtgctggaagatctataccgggaactgcatgaaaatggcaacaatccgttggtcggtgtccgagccctttttctctatccattgaacgccttgattaattcacagcgcgagcgtctggatgcctggacgcgtggttttggtaccgggatccgctactgcctttacaacggcaacaccgaaaacctacacgcttcggtaaaaagtgaacaggcaaaaaggccgaatgaagtgctctcgcgcgaaaaaatgcgtgaagaacctgccccgattctggtgaccaacggcacgatgctggaatatatgatggttcgccaggtcgacgccccgattatccagcaatccaaagcacaaaaatcactacgctggattgtactggatgaagcgcatacctatgtcgggtcgcaggccgctgaactggcactccagctgcgtcgtgtgatgacagcgtttggcgtgacgccagatgatgtgcgctttgtagcgacctctgcgaccattgccggcagcgacgccgaaaagcagctgaaaaaatttctctctgaattatccggtatcccgcaggagcgcatcgatgttctggacggaagtcgggtgattcctgaactggaaccatccaaaaacgtttctgctccgttagacgaaatagagcaaatacctgatctggatctaaaagataaaaatgataataaaattaaagggataagtcctgagcgcttttatgcgcttacgcattcccctgaagcgcgttacatacgtgagatgttggtcaaacatcccaatccgatgaagctggatgagatgacagatcggttaaacgtgctgacaaaacagcattacagccagcaggaagtactgcgttggatcgatgtctgttcagggactcaacctaatgcaaaggatcccgcatttcttaaagtcagggcgcatatcttccagcgtaatacccagggaatatgggcttgtgttgataaagattgcagattaaagcacggtacaccgctcgaaaaaggctggccctttggctatgtatatgtgaaccagcgacaaaattgcgattgtggaagccctgtttacgaagtggcgttctgtaatgattgtaatgagcctcatcttctggcacgggacaaaaagggcaaactagtccagtgggaaaataaaggtggcgatgaattctctttgcaggatgaagtacctgttgaacatgacgctacagaagaaaaagtcgaaaaagagaacagttttcagcctccgttgattattgccgcaggagagaccagcgaggccggttataccctacaacgcctcgaccgccagacgcgccgtattggcgttattaacaatgacagcattccgctgattattaatgatgttgaacaggtttgtagtgccagtggctgtggctacagaggcatgagtgggaaacagcccttccggcgtgcactattaggtgggccattttacgttactaatatcgtgcccaccgttctagagtattgtcaggactttaccagtgatgaaggcaaagagggcgtcggaccagattcgttgccaggacgaggtcgtcgactcatcacctttacagacagtcgacaagggacagcccgaatggcggtgcgtatgcagcaagaagcagaacgcagtcgcttacgcggaagcgtagtcgaaattctcagctggcatcaaaggacgcaaacgtctacagcgccgaatgccaatgccgatctggaaaaattagcggccagggcgaagcaagcccgtgagcaggcagaagaatatcgaagctggggaatgccagaccaggcgaaattgtcacaagcgcaggctgaacagcttgaacaggcttatcagtttgcaatcggcggaaaagcagcaaccaccctggtatcccgcacctggactgaaatggttaacgagcttaaagataaagccgatatccgtggcccggttctgaaatataactactatttgaagcctgaagtgtttaatgaaaacggcgggcctctaaagctttctgaaatgttgttgttccgggaattcatgcgtcgccctaaacggactaacagcctggaaacacaggggctggttcaggttggttacctgggactggagaaaatacataagctccctatgcactggcaggaaagggaattaacgctggatgactggcgcgattttctcaaggttacgttggatcattacgttcgcgagagcaacttcacacagctggatgatgagctgaaaaactggattggtagccgcttttcatcaaaattcgtccgtaacccggaatcaaaagatcctgaagataatcagaatagacgctggcctcaaattcgtaatggcaacgtatcccatcgtttagcgaagttactgatgctgggggctggattcaaaaccgtcaatacggcgactattgatattatcaatacatggctgaaagaagcatgggcccaacttaccggaccgcttgcagtactgaaacccgatggcaaccgtttttatttaccgaaagagcatatgactttttctttaatcacggatgcctggatttgcccggtaaccaataaaatcctggatacggcttttaaaggcttaaccccttatctgcctacccatatttcgttcgagcatcttacccaggcgcaatatgacacttttgtcgcgcagaaagtcaccatgccggaaatctggaagctggatcgttcacaggaagactacgcagagggtctggcaaaagcacgcgactgggtcagcaatgatccgctgatcgcacaattgcggtcagaaaacgtctggacagacatcaacgatcgtgtcgtggaaggcggtttctactatcgcactgccgagcactctgcccagcagtcgtcagaacgcctgcaaagctatgaaaagatgttcaagaacgggcaactaaatgttctcaactgttccaccaccatggaaatgggggttgatattgggggcattactgcggtggtaatgaacaacgttccgccacatccggccaactatttacagcgcgccgggcgagccgggcgtagtaaagaatcacgcgcaatctcttataccctatgcaaaggtaacccacacgaccaacaagtttttgccaacccgctctggccgtttgaaaccatgatcccggcacccatggtcgcgatgaactccgcccgactggtgcaacgtcacgtcaatgcattattactgtctgactttttatgtaacgttattggcgaaaccgataaagagaaaaccagcctcgatagcctctggtttttcggtgaagatgacgggcagtcaaaatgcgaacgctttaaagtctggctggaacgcccggttcttgatatcgacacggcgctggaacggctggtgaaaggtacggcgttgcatggcgcaagagccgaacatctgcgggataaaacaatcaatgcgatcaccttcctgcaacagcggtggctctccgtttatcgcgatctcgtgacccaggagcgtgagtcgcagccgcaaacgccttatcgtaagcgcatagagctggagaagaaacggcactgtggcgagtatctgctgcgcgatctggctgccagaaccttcctgccgggatacggtttcccgacagatgtagtgacgtttgataacttcacgatggaagattatatccgcgaaaaatcgcagaaaagtcgtgataaaaaggaccgtgaagataacgtctcccgttataaaggattaccttcccgtaacctcggtgttgccattcgtgaatatgcaccgggagcagagatcattcttgatggccgtgtcttccgctctgccggtgtctcactgcactggcacaacattaatgctgataccaatgaagcccagcgtctggattgcgcctggcgctgtcacaaatgcgggaccattggctatgaagaggggatgagcagttccgggatgctcttttgctccaacagcgcctgcggcgaaaaaataaccatggataatcgccgtcaggtgttgcagcctgccgggtttgtcaccgatgcacacgctccggtaacgaacaatattgaaaccatgaaattcgtcccggttgtccccgcctgggtctttgttaaagcagagcccgtaccgttgcctaacccgctaatgggttatatggcttctggggctgatgggcatgttttccagcaaagtctgggggaaggtggacacggttatgcattgtgtctgagctgtggccgtgcggagtcgatgctgaatgaaaatgatgctccgaaaagtatggaagctcactatccaccgcgtccgggtaaagcggaccgcgacagccagaatcatcgtctgatttgcccaggttcgacggccctcgtgaagaaagtcaccctgggcgcactggcgcgcaccgatgtctttgaaatggttctgcgcaaaccacaaaatggcgagtatctgccagataacacagaagaggggcggattgtcgccatgactctggcggttgctctgcgtcaggcgctggcgggcgttctgggtatctccaccgcagaactcggctattctgtacgtccggtcagactggaggatgggcaatcggttttagccgttcagctttatgatgtgatcagcggtggtgcaggttttgcctccagcgcaccggtacacattgaagctattttacagggaatggtgaaacagttaggctgccgccattgtgatactgcatgtagtgaatgcctgcttgattcccagactcgccacgatcacgatttgctggatcgcaaagcggcgctggcctggcttggcgatgacttcacgtattacatcggtttaccggatgaagagacattctcgctgccggatgcccgctactgccctggcgctattggcgatacgattcgccgggcgattaacgaaggcgctgaaaagctcaccctgtggatgaccggtgcgcccaatgagtgggatttatacgcccgtcagttccgcgcggctattcagagctatcggctaaaagacaacgtcgaggtcgatcttgttattcctgcgggagtggatgatccggacctgttgcatgaactatcgcaatttactgcactgggtgtgcgactgtgccatgttgaacaagatctgcaattaccgattgttgcccaggttacctttgccgatcgcgtgatgacgctggcctctcgcagccagcaggcaacgattccggggccggagtggcacctgaatgacgaactggtggtgcgtagtctcggttataaaacggtagaactgaacgagtttattctgccggctaaagccgccaacgctgtcgagcgggtcaaagacattcagatccacaaacagttgaatggaccactttcgcagtttggacaacgcttctgggacgtgctgtttaacgaccatgaagaagcacagtcactgatgaataacacgcgaattaccggcgttcactataccgatcgctatctgcaaaacccggttgcgctggcgttgttggggtcaattctgaaaccgctaaaaacaaagctgaccgatggcgttgaagtggcgctggatacgttgtttaaagataaagatcgccccggtaaccggcctttccatgactggatgagcatagcggattttcaggatttcgctgatcagtggtttgctgctgcgctgggcaggccggtagaactgacggtgttcgactcgccgcgcgatatccctcaccatcgtaaactgacggtgacttttgaggatggtcaggtattgaagatccgcttcgatcaggggatgggctactggcgtatcaactttgcatcgaaatggcattactttgacttcagcgatgacgtttctttccagttagtcaaaatggctcaggcctgtcaggaagggaatgtggctaacagcgaagatagctgggcaacggatgtactggtggaggtgatcgcctcctga

SEQ ID NO: 28661 - DNA, 2433 bp, Escherichia coli 2-011-08_S1_C3
gtgatagtatctcttccggacgaagtttcctttcctgtaacaagcgagccgtcaactacgcgctttgaacttgccatttgtgaagatggtgaggaagtctctggccttgggccagcctatgcttccctggaaaacagacaggcaacagttcgattacgtaaaagcgaagtgagatttgtcaggcaaaatccatcggcaggtttgtcgttagtggctcgtgctggggggatgattgttgggagtattaaacttgatgacagtgaaattgccattggtgaggtgccgttaaccttcatcgttgatgcagatcaatggctgttacagggacaggcttcttgcagtgtacgaagcagcgatgttctgattgtactccctcgggataatagcaatgttgctggttttgatggccaatcgagcgcagtaaacgtattaggactaaaagcactacctgtgaagggatatcaggacgttacagttacagcaaatgaaacttatcggattcgcaccggaagagaacaaatcagcatcggaaggtttgctctaaatggaaagcgtgcaagctgggtttgtcatccagatgagacatttattggtgtaccaaaagtcatttctacactaccagatattcaaagcattgatgtaacgcgttacctgagcggaatttcaattgagcaatgtcatatacaagagatgctaggggctcaatatctttctatccgtaatagtaataatgaaacgctcttgcgtcgcaaaatcggtatcttgcctgctgatttcagtattgagataaaaggtggaatgcacgcaaatgaaggcactatcgtaatcaccacacagcatccttgtgtagcaacacttaaagataaaacattggaggctacacgtaagcgtactgaggggcgaacagagatacaacttaaagcggaaggggtacctccggcatttattacattacaagttctgcctaatttggcggctgaccccatcgacattgagttaccttttcccgctaaaggctgtctcgctcttgatgtaaacggacgtcctctggataaaaacattacgctgcatgatctgctgggttccagagcgtttctgtactccagaaatggtgagccgacaaaatatacattgcagttgtatttgcgctccgttagtggattacaggcatggcatgaatggtgttatacggcgttgagcgatcgtcctgttgaattgaatctctatagtctgcgcgaacatattgagaacctgatttcacttgaggcaggtattgatcaggttgttgagatgcgtattacgggggcaggtgtggtcatggcctggcaaattcgtcgctataaatacagcctgcgctatgattatgaaaaagaactattactcagccagtcagtgaaccatcgtgctgggcagattccttcccccgttatcatgctgttaagtgaacccgagaggaaatccattcccttagcatctagaatgagcgagggagtgcctgtcggtgaatatgagttgagctcaatcgttaacaaaaacggaccatggttggttgttcctaaaccgggtgaagagatggcttttcgcccctgcttcattcgtggcgaatcttcgttaccggtagaagaaagcaacatccgctcattgcagaaagcgacccagctttttaatccacaggcagaagttaataccatcacacgggttctcggacagatggctaacgatcctgcccattccggctggcaatttatgcgtagcctgtacgatcaatttggttatttaccgctggcaacctttgaagtatggcgtgcactagtgcagcatccgcaggcattggcgatgtcgctcttcaaattcgaaatgtcagcagagtatctgagtcgtattgagaatgagttccctattctatgggagtttttccccatctttgagatcaaagctgcatctgagcgtttcaaattgttcctgagccaaaaaggtgcaccggaggaaacccagaaattactggttactaatatgtttcaacggctggggctcgtgttcccgacatatgccgatgaaattgagaaatggttaagtaatggatatctccccccgtctattcctgagtcttttgtccacgtgtggtatcaggagcttttacgtgagcacagtgaggctcgctggcctgaatatggctgcaagcgtctgtataaatggatgatgtcgcaaaaaaatccagtgattggtattaatcctgacgcaaatcaccgctattccgtggcctggttacccgtcttcgctgcagctgtggcaagcggaaatgcttcttttgaatctgtatttgaccgtaaacccggtgccgtatttttcctgaggcaagtcagggatttcgattcccgctggtttaaggccatcttccagtgcagcctgttgcgttatgttgctaaaaaataa

SEQ ID NO: 28662 - DNA, 6345 bp, Escherichia coli 2-052-05_S3_C1
atgactacacgctatttttcgtcacttattgaacaatcgttgtctcgttcaactgaagcaacgctcagtatcatgggtgttacaaacccgcagttgcgtgaacatctcgcgcagcaaatgggggctgattgcgggaaaccgggctcattccttgcctctccggtattccagcaaatgtttggctggaaggagtcaaaccacacgatgcgcagcctgacggaaggcaacgcattgttgagcaaagcagtggttgattcactggatgatcagagtaatggccggtaccggtttggtgctgactggaggccttttacgcaccagttagccagttggaaagctttgctggaaaagaaacattcagtggtggtaaccagtggtacgggttcaggtaaaacggaatgttttatggtaccggtgctggaagatctttaccgggaactgcatgaaaatggcaacaatccgttggtcggtgtccgagccctttttctctatccattgaacgccctgattaattcacagcgcgagcgtctggatgcctggacgcgtggttttggtactgggatccgctactgcctttacaacggcaacaccgaaaacctacacgcttcggtaaaaagtgaacaggcaaaaaggccgaatgaggtgctttcgcgcgaaaaaatgcgtgaagaacctgccccgattctggtgaccaacggcacgatgctggaatatatgatggttcgccagatcgatgccccgattatccagcaatccaaagcacaaaaatcactacgctggattgtactggatgaagcgcatacctatgtcgggtcgcaggccgctgaactggcgctccagctgcgtcgtgtgatgacagcgtttggcgtgacgccagatgatgtgcgctttgtagcgacctctgcgaccattgccggcagcgacgccgaaaagcagctgaaaaaatttctctctgaattatccggtatcccgcaggagcgcatcgatgttctggacggaagtcgggtgattcctgaactggaaccatccaaaaacgtttctcttccgttagacgaaatagagcaaatacccgatctggatctaagagataaaaatgataataaaattaaaggtataagtcctgagcgcttttatgcgcttacgcattcccccgaagcgcgttacatacgtgagatgttggtcaaacagcccaatccgatgaagctggatgagataacagagcggttaaatacgctgacaaaacagcattacagccagcaggaagtactgcgttggatcgatgtctgttcagggactcaacctaatgcaaaggatcccgcatttcttaaagtcagggcgcatatcttccagcgtaatacccagggaatatgggcttgtgttgataaagattgcagattaaagcacggtacaccgctcgaaaaaggctggccctttggctatgtgtatgtgaaccagcgacaaaattgcgactgtggaagccctgtctacgaagtggcgttctgtaatgattgtaatgagcctcatcttctggcacgggacaaaaagggcaaactagtccagtgggaaaataaaggtggcgatgaattctctttgcaggatgaagtacctgttgaacatgacgctacagaagaaaaagtcgaaaaagagaacagttttcagcctccgttgattattgccgcaggagagaccagcgaggcaggttataccctacaacgcctcgaccgtcagacgcgccgtattggcgttattaacaatgacagcattccgctgattattaatgatattgaacaggtttgtagcgccagcggctgtggcttcagaggcatgagcgggaaacagcccttccggcgtgcactattaggtgggccattttacgttactaatatcgtgcccaccgttctagagtattgtcaggactttaccagtgatgaaggcaaagagggcgtcggaccagattcgttgccaggacgaggtcgtcgactcatcacctttacagacagtcgacaagggacagcccgaatggcggtgcgtatgcagcaagaagcagaacgcagtcgcttacgaggaagcgtagtcgaaattctcagctggcatcaaaggacgcaaacgtctacagcgccgaatgccaatgccgatctggaaaaattagcggccagggcgaagcaagcccgtgagcaggcagaagaatatcgaagctggggaatgccagaccaggcgaaattgtcacaagcacaggctgaacagcttgaacaggcttatcaggctgcaaccggtgggaaagccgcgactatcctggtatcccgaacctggacggagatggttaacgagcttaaagagagagccgatatccgcgggccggttctgcaatataaccattatcttaagcctgaagtgtttaatgaaaacggcggcccccttaagctttctgaaatgttgttgttccgggaattcatgcgtcgccctaaacggactaacagcctggaaacacaggggctggttcaggttggttaccaggggctggagaaaatacataagagccccttgcactggcaggaaaaaggattaacgctggatgactggcgcgattttctcaaggttacgttggatcattacgttcgcgagagcaacttcacacagttggatgatgagctgaaaaactggattggtagccgtttttcatcaaaattcgtccgtaacccggaatcaaaagatcctgaagataatcagaacagacgctggcctcaaattcgtaatggcaacgtatcccatcgtttagcgaagttgctgatgctgggggctggattcaaaaccgtcaatgcggcaactattgatattatcaatacatggctgaaagaagcatgggcccaacttaccggaccgcttgcagtactgaaacccgatggcaaccgtttttatttaccgaaagagcatatgactttttctttaatcacggatgcctggatttgcccggtaaccaataaaatcctggatacgacttttaaaggcttaaccccttatctgcctacccatatttcgttcgagcatcttacccaggcgcaatatgacacttttgtcgcgcagaaagtcaccatgccggaaatctggaagctggatcgttcacaggaagactacgcagagggtctggcaaaagcacgcgactgggtcagccatgatccgctgatcgcacaattgcggtcggaaaacgtctggacagacatcaacgatcgtgtcgtggaaggcggtttctactatcgtactgccgagcactctgcccagcagtcgtcagaacgtctgcaaagctatgaaaagatgttcaagaatgggcaactaaatgttctcaactgttccaccaccatggaaatgggggttgatatcgggggcattactgcggtggtaatgaacaacgtaccgccacatccggccaactatttacagcgcgccgggcgagccgggcgtagtaaagaatcacgtgcgatctcttacaccctatgtaaaggtaacccacacgaccagcaggtttttgccaacccgctctggccatttgaaaccatgatcccggcacccatggtcgcgatgaattccgcccgactggtgcaacgtcacgtcaatgcattattactgtccgactttttatgtaacgttattggcgaaaccgataaagaaaaaaccagcctcgatagcctctggtttttcggtgaagatgacgggcagtcaaaatgcgaacgctttaaaatctggttggaacgtccggttcttgatatcgacacggcgctggaacggctggtgaaaggtacggcgttgcatggtgcaagagccgaatatctgcgggataaaacaatcaacgcgatcaccttcctgcaacagcggtggctctccgtttatcgcgatctcgtgacccaggagcgtgagtcgcagccgcaaacgccttatcgtaagcgcatagagctggagaagaaacggcactgtggcgagtatctgctgcgcgatctggctgccagaaccttcctgccgggatacggtttcccgacagatgtagtgacgtttgataacttcacaatggaagattatatccgcgaaaaatcgcagaaaagtcgtgataaaaaggaccgtgaagataacgtctcccgttataaaggattaccttcccgtaacctcggtgttgccattcgtgaatatgcaccgggagcagagatcatccttgatggccgtgtcttccgctctgccggtgtctcactgcactggcacaatattaatgccgataccaatgaagcccagcgtctggattgcgcctggcgctgtcacaaatgcgggaccattggctatgaagaggggatgagcagttccgggatgctcttttgctccaatagcgcctgcggcgaaaaaataatcatggataatcgccgtcaggtgctgcagcctgccgggtttgtcaccgatgcacacgctccggtaacgaacaatattgaaaccatgaaattcgtcccggttgtccccgcctgggtctttgttaaagcagagcccgtaccgttgcctaacccgttaatgggttatatggcttctggggctgatgggcatgttttccagcaaagtctgggggaaggtggacacggttatgcattgtgtctgagctgtggccgtgcggagtcgatgctaaatgaaaatgatgcaccgaaaagtatggaagctcactatccaccgcgtccgggtaaagcggaccgcgacagccagaatcatcgtctgatttgccccggttcgacggcactcatgaagaacgtcaccctgggcgcactggcgcgcaccgatgtctttgaaatggttctgcgcaaaccgcaaaacggcgagtatctgccagataacacagaggaggggcggattgttgccatgactctggcggttgctctgcgtcaggcgctggcgggcgttctgggcatctccgccgcagaactcggctattctgtacgtccggtcagactggaggatgggcaatcggtattagccgtacagctttatgatgtgatcagcggtggtgcaggttttgcctccagcgcaccggtacacattgaagctatattgcagggaatggtgaaacagttaggctgccgccattgtgatactgcatgcagtgaatgtctgcttgattcccagactcgccacgatcacgatttgctggatcgcaaagcggcgctggcctggcttggcgatgacttcacgtattacatcggtttaccggatgaagagacattctcgctgccggatgcccgctactgccctggcgccattggcgatacgattcgccgggcgattaacgaaggcgctgaaaagctcaccctgtggatgaccggcgcgcccaatgagtgggatttatacgcacgtcagttccgcgcggcggttcagaactatcggctaaaagacaacgtcgaggtcgatcttgttattcctgcgggagtggatgacccggacctgttgcatgaactatcgcaatttactgcgttgggtgtgcggctatgccatgttgaacaggatctgcaatcgccgattgttgcccaggttacctttgccgatcgcgtgatgacgctggcctctcgcagccagcaggcaacgattccggggccggagtggcacctgaatgacgaactggtggtgcgtagtctcggttataaaacggtagaactgaacgaatttattctgccagctaaagccgccaacgctgtcgagcgggtcaaagacattcagatccacaaacagttgaatggaccactgtcgcagtttgggcaacgcttctgggacgtgctgtttaacgaccatgaagaagcgcagtcactgatgaaaaacacgcgaattaccggcgttcactataccgatcgctatctgcaaaacccggttgcgctggcgttgttggggtcaattctgaaaccgctaaaaacaaagctgaccgatggtgctgaagtggcgctggatacgctgtttaaagataaagatcgccccggtaaccggcctttccatgactggatgagcatagcggattttcaggatttcgctgatcagtggtttgcagctgcgctgggcaggccggtagagctgacggtgttcgactcgccgcgcgatatccctcaccatcgtaaactgacggtgacttttgaagatggtcaggtattgaagatccgcttcgatcaggggatgggctactggcgtatcaactttgcatcgaaatggcattactttgacttcagcgatgacgtttctttccagttagtcaaaatggctcaggcctgtcaggaagggaatgtcgccaacagcgaagagagctgggcaacggatgtgctggtggaggtgatcgcctcctga

SEQ ID NO: 28663 - DNA, 3291 bp, Escherichia coli 2-052-05_S3_C1
ttgggtcaatcagaatacatttcatgggtaaaatgtacttcctggctaagtaactttgtgaatcttagagggttgagacaaccggatggccgtcctctttatgaatatcatgcaaccaatgatgaatatacccaattaacgcagctactccgtgcagtcggtcaatcacaatctaatatatgtaatagggactttgctgcctgttttgttcttttttgctctgagtggtaccgcagggattatgaacggcaatgcggatggacgtgggaccctatatataaaaaaatagggatttcattcaccgccacagagcttggcactatcgtaccgaaagggatggaagattactggctgcgcccaattcgattttatgaatctgaacgacgcaattttctcggaacattattcagtgaaggtggtttacctttccggctactcaaagaatcagacagtcgctttctggctgttttctccaggatccttggacaatatgagcaagcaaagcagtcaggtttttcagccctttcgctggcaagagctgtcatagaaaaatcagcgctgcctactgtttttagcgaagatacctctgtagaacttatcagtcatatggctgataacctcaattccttagtacttactcacaacctaataaatcacaaagaaccagtacaacagcttgataaggttcaccctacctggcgaagcgagtttccaataccgttagatgatgaaacaggaacgcattttttgaatggactgctatgcgcagcctctgtagaggctaagcctcgactacaaaaaaataagagtacgcgttgccaattctattggtcagaaaagcatccagatgagcttagggcgatagtatctcttcctgacgaagtttcctttcctgtaacaagcgagccgtcaactacgcgctttgaacttgccatttgtgaagatggtgaggaagtctctggccttgggccagcctatgcttctctggaaaacagacaggcaacagttcgattacgtaaaagcgaagtgagatttggcaggcaaaatccatcggcaggtttgtcgttagtggctcgtgctggaggggtgattgttgggggcattaaacttgatgacagtgaaattgccattggtgaggtgccgttaaccttcgtcgttgatgcagatcaatggctgttacagggacaggcttcttgcagtgtgcgaagcagcgatgttctgattgtgctccctcgggataatagcaatgttgctggtttcgatggccaatcgagcgcagtaaacgtattaggactaaaagcattacctgttaagggatgtcaggacgttacagttacagccaatgaaacttatcggattcgcaccggaagagaacaaatcagcatcggaaggtttgctctaaatggaaagcgtgcaagctgggtttgtcatccagatgaaacatttattggtgtaccaaaagtcatttctacattgacagatattcaaagcattgatgtaacgcgttacctgagcggaatttcaattgagcaatgtcatatccaggagatgctgggggctcaatatctttctatccggaatagtaataatgaaacgctcttgcgtcgcaaaatcggtatcctgccagtagatttcagtgttgagataaaaggcggtgagcgcgcaaatgaaggttctatcgtaatcaccacacagcatccttgtgtagcaaaacttaaagataaaacattggaggctacacgtaagcgtactgaggggcgaacagagatacaactcaaagcggaaggggtacctccggcatttattacattacaagttctgcctaatttggcggctgaccccatcgatattgagttaccttttcccgctaaaggctgtctcgctcttgatgtaaacggacgtcctctggataaaaacattacgctgcatgatctgctgggttccagagcgtttctgttctccagaaatggcgagccgacaagatatacattgcagttgcatttgcgctccgttagtggattacaggcatggcacgaatggtgttatacggcgttgagcgatcgtcctgttgaattgaatctctatagtctgcgcgaacatattgagaacctgatttcacttgaggcaggtattgatcaggttgttgagatgcgtattacgggggcgggtgtggtcatggcctggcaaattcgtcgctataaatacagtctgcgctatgattatgaaaaagaactattactcagccagtcagtgaaccatcgtgctggacagattccttcccccgttatcatgctgttaagtgaacccgagaggaaatccatccccttagcatcaagaatgagcgagggagtgcctgtcggtgaatatgagttgagctcaatcgttaacaaaaatggaccatggttggttgttcctaaaccgggtgaggagatggcttttcgcccctgcttcattcgtggcgaatcttcgttaccggtagaagaaagcaacatccgctcattgcagaaagcgacccagctttttaatccacaggcagaagttaataccatcacactggttctcggacagatggctaacgatcctgcccattccggctggcaatttatgcgtagcctgtacgatcaatttggttatttaccgctggcaacctttgaagtatggcgtgcactagtgcagcatccgcaggcattggcgatgtcgctcttcaaattcgaaatgtcagcagagtatctgagtcgtattgagaatgagttccctattctatgggagtttttccccatctttgagatcaaagctgcatctgagcgtttcaaattgttcctgagccaaaaaggtgcaccggaggaaacccagaaattactggttactaatatgtttcaacggctggggctagtgttcccgacatatgccgatgaaattgagaaatggttaagtaacggatatctccctccgtctattcctgaatcttgtgtccacgggtggtatcaggagcttttacgtgagcacagtgaagctcgctggcctgaatatggctgcaagcgtctgtataaatggatgatgtcacaaaaaaatccagtgattggtattaatcctgacgcagactaccgttattccgtggcctggttacccgtcttcgctgcagctgtggcaagcggaaatacttcttttgaagctgtatttgaccgtaaacccggtgccgtatttttcctgaggcaagtcagggacttcgattcccgctggtttaagactatcttccagtgcagcctgttgcgttatgttgctaaaaaataa

SEQ ID NO: 28664 - DNA, 6345 bp, Escherichia coli 2-052-05_S3_C2; identical to SEQ ID NO: 28662

SEQ ID NO: 28665 - DNA, 3291 bp, Escherichia coli 2-052-05_S3_C2
ttgggtcaatcagaatacatttcatgggtaaaatgtacttcctggctaagtaactttgtgaatcttagagggttgagacaaccggatggccgtcctctttatgaatatcatgcaaccaatgatgaatatacccaattaacgcagctactccgtgcagtcggtcaatcacaatctaatatatgtaatagggactttgctgcctgttttgttcttttttgctctgagtggtaccgcagggattatgaacggcaatgcggatggacgtgggaccctatatataaaaaaatagggatttcattcaccgccacagagcttggcactatcgtaccgaaagggatggaagattactggctgcgcccaattcgattttatgaatctgaacgacgcaattttctcggaacattattcagtgaaggtggtttacctttccggctactcaaagaatcagacagtcgctttctggctgttttctccaggatccttggacaatatgagcaagcaaagcagtcaggtttttcagccctttcgctggcaagagctgtcatagaaaaatcagcgctgcctactgtttttagcgaagatacctctgtagaacttatcagtcatatggctgataacctcaattccttagtacttactcacaacctaataaatcacaaagaaccagtacaacagcttgataaggttcaccctacctggcgaagcgagtttccaataccgttagatgatgaaacaggaacgcattttttgaatggactgctatgcgcagcctctgtagaggctaagcctcgactacaaaaaaataagagtacgcgttgccaattctattggtcagaaaagcatccagatgagcttagggcgatagtatctcttcctgacgaagtttcctttcctgtaacaagcgagccgtcaactacgcgctttgaacttgccatttgtgaagatggtgaggaagtctctggccttgggccagcctatgcttctctggaaaacagacaggcaacagttcgattacgtaaaagcgaagtgagatttggcaggcaaaatccatcggcaggtttgtcgttagtggctcgtgctgggggggtgattgttgggagcattaaacttgatgacagtgaaattgccattggtgaggtgccgttaaccttcgtcgttgatgcagatcaatggctgttacagggacaggcttcttgcagtgtgcgaagcagcgatgttctgattgtgctccctcgggataatagcaatgttgctggtttcgatggccaatcgagcgcagtaaacgtattaggactaaaagcattacctgttaagggatgtcaggacgttacagttacagccaatgaaacttatcggattcgcaccggaagagaacaaatcagcatcggaaggtttgctctaaatggaaagcgtgcaagctgggtttgtcatccagatgaaacatttattggtgtaccaaaagtcatttctacattgacagatattcaaagcattgatgtaacgcgttacctgagcggaatttcaattgagcaatgtcatatccaggagatgctgggggctcaatatctttctatccggaatagtaataatgaaacgctcttgcgtcgcaaaatcggtatcctgccagtagatttcagtgttgagataaaaggcggtgagcgcgcaaatgaaggttctatcgtaatcaccacacagcatccttgtgtagcaaaacttaaagataaaacattggaggctacacgtaagcgtactgaggggcgaacagagatacaactcaaagcggaaggggtacctccggcatttattacattacaagttctgcctaatttggcggctgaccccatcgatattgagttaccttttcccgctaaaggctgtctcgctcttgatgtaaacggacgtcctctggataaaaacattacgctgcatgatctgctgggttccagagcgtttctgttctccagaaatggcgagccgacaagatatacattgcagttgcatttgcgctccgttagtggattacaggcatggcacgaatggtgttatacggcgttgagcgatcgtcctgttgaattgaatctctatagtctgcgcgaacatattgagaacctgatttcacttgaggcaggtattgatcaggttgttgagatgcgtattacgggggcgggtgtggtcatggcctggcaaattcgtcgctataaatacagtctgcgctatgattatgaaaaagaactattactcagccagtcagtgaaccatcgtgctggacagattccttcccccgttatcatgctgttaagtgaacccgagaggaaatccatccccttagcatcaagaatgagcgagggagtgcctgtcggtgaatatgagttgagctcaatcgttaacaaaaatggaccatggttggttgttcctaaaccgggtgaggagatggcttttcgcccctgcttcattcgtggcgaatcttcgttaccggtagaagaaagcaacatccgctcattgcagaaagcgacccagctttttaatccacaggcagaagttaataccatcacactggttctcggacagatggctaacgatcctgcccattccggctggcaatttatgcgtagcctgtacgatcaatttggttatttaccgctggcaacctttgaagtatggcgtgcactagtgcagcatccgcaggcattggcgatgtcgctcttcaaattcgaaatgtcagcagagtatctgagtcgtattgagaatgagttccctattctatgggagtttttccccatctttgagatcaaagctgcatctgagcgtttcaaattgttcctgagccaaaaaggtgcaccggaggaaacccagaaattactggttactaatatgtttcaacggctggggctagtgttcccgacatatgccgatgaaattgagaaatggttaagtaacggatatctccctccgtctattcctgaatcttgtgtccacgggtggtatcaggagcttttacgtgagcacagtgaagctcgctggcctgaatatggctgcaagcgtctgtataaatggatgatgtcacaaaaaaatccagtgattggtattaatcctgacgcagactaccgttattccgtggcctggttacccgtcttcgctgcagctgtggcaagcggaaatacttcttttgaagctgtatttgaccgtaaacccggtgccgtatttttcctgaggcaagtcagggacttcgattcccgctggtttaagactatcttccagtgcagcctgttgcgttatgttgctaaaaaataa

SEQ ID NO: 28666 - DNA, 6345 bp, Escherichia coli 2-052-05_S3_C3; identical to SEQ ID NO: 28662

SEQ ID NO: 28667 - DNA, 3291 bp, Escherichia coli 2-052-05_S3_C3
ttgggtcaatcagaatacatttcatgggtaaaatgtacttcctggctaagtaactttgtgaatcttagagggttgagacaaccggatggccgtcctctttatgaatatcatgcaaccaatgatgaatatacccaattaacgcagctactccgtgcagtcggtcaatcacaatctaatatatgtaatagggactttgctgcctgttttgttcttttttgctctgagtggtaccgcagggattatgaacggcaatgcggatggacgtgggaccctatatataaaaaaatagggatttcattcaccgccacagagcttggcactatcgtaccgaaagggatggaagattactggctgcgcccaattcgattttatgaatctgaacgacgcaattttctcggaacattattcagtgaaggtggtttacctttccggctactcaaagaatcagacagtcgctttctggctgttttctccaggatccttggacaatatgagcaagcaaagcagtcaggtttttcagccctttcgctggcaagagctgtcatagaaaaatcagcgctgcctactgtttttagcgaagatacctctgtagaacttatcagtcatatggctgataacctcaattccttagtacttactcacaacctaataaatcacaaagaaccagtacaacagcttgataaggttcaccctacctggcgaagcgagtttccaataccgttagatgatgaaacaggaacgcattttttgaatggactgctatgcgcagcctctgtagaggctaagcctcgactacaaaaaaataagagtacgcgttgccaattctattggtcagaaaagcatccagatgagcttagggcgatagtatctcttcctgacgaagtttcctttcctgtaacaagcgagccgtcaactacgcgctttgaacttgccatttgtgaagatggtgaggaagtctctggccttgggccagcctatgcttctctggaaaacagacaggcaacagttcgattacgtaaaagcgaagtgagatttggcaggcaaaatccatcggcaggtttgtcgttagtggctcgtgctggagggatgattgttgggagcattaaacttgatgacagtgaaattgccattggtgaggtgccgttaaccttcgtcgttgatgcagatcaatggctgttacagggacaggcttcttgcagtgtgcgaagcagcgatgttctgattgtgctccctcgggataatagcaatgttgctggtttcgatggccaatcgagcgcagtaaacgtattaggactaaaagcattacctgttaagggatgtcaggacgttacagttacagccaatgaaacttatcggattcgcaccggaagagaacaaatcagcatcggaaggtttgctctaaatggaaagcgtgcaagctgggtttgtcatccagatgaaacatttattggtgtaccaaaagtcatttctacattgacagatattcaaagcattgatgtaacgcgttacctgagcggaatttcaattgagcaatgtcatatccaggagatgctgggggctcaatatctttctatccggaatagtaataatgaaacgctcttgcgtcgcaaaatcggtatcctgccagtagatttcagtgttgagataaaaggcggtgagcgcgcaaatgaaggttctatcgtaatcaccacacagcatccttgtgtagcaaaacttaaagataaaacattggaggctacacgtaagcgtactgaggggcgaacagagatacaactcaaagcggaaggggtacctccggcatttattacattacaagttctgcctaatttggcggctgaccccatcgatattgagttaccttttcccgctaaaggctgtctcgctcttgatgtaaacggacgtcctctggataaaaacattacgctgcatgatctgctgggttccagagcgtttctgttctccagaaatggcgagccgacaagatatacattgcagttgcatttgcgctccgttagtggattacaggcatggcacgaatggtgttatacggcgttgagcgatcgtcctgttgaattgaatctctatagtctgcgcgaacatattgagaacctgatttcacttgaggcaggtattgatcaggttgttgagatgcgtattacgggggcgggtgtggtcatggcctggcaaattcgtcgctataaatacagtctgcgctatgattatgaaaaagaactattactcagccagtcagtgaaccatcgtgctggacagattccttcccccgttatcatgctgttaagtgaacccgagaggaaatccatccccttagcatcaagaatgagcgagggagtgcctgtcggtgaatatgagttgagctcaatcgttaacaaaaatggaccatggttggttgttcctaaaccgggtgaggagatggcttttcgcccctgcttcattcgtggcgaatcttcgttaccggtagaagaaagcaacatccgctcattgcagaaagcgacccagctttttaatccacaggcagaagttaataccatcacactggttctcggacagatggctaacgatcctgcccattccggctggcaatttatgcgtagcctgtacgatcaatttggttatttaccgctggcaacctttgaagtatggcgtgcactagtgcagcatccgcaggcattggcgatgtcgctcttcaaattcgaaatgtcagcagagtatctgagtcgtattgagaatgagttccctattctatgggagtttttccccatctttgagatcaaagctgcatctgagcgtttcaaattgttcctgagccaaaaaggtgcaccggaggaaacccagaaattactggttactaatatgtttcaacggctggggctagtgttcccgacatatgccgatgaaattgagaaatggttaagtaacggatatctccctccgtctattcctgaatcttgtgtccacgggtggtatcaggagcttttacgtgagcacagtgaagctcgctggcctgaatatggctgcaagcgtctgtataaatggatgatgtcacaaaaaaatccagtgattggtattaatcctgacgcagactaccgttattccgtggcctggttacccgtcttcgctgcagctgtggcaagcggaaatacttcttttgaagctgtatttgaccgtaaacccggtgccgtatttttcctgaggcaagtcagggacttcgattcccgctggtttaagactatcttccagtgcagcctgttgcgttatgttgctaaaaaataa

SEQ ID NO: 28668 - DNA, 6345 bp, Escherichia coli 2-156-04_S3_C2
atgactacacgctatttttcgtcacttattgaacaatcgttgtctcgttcaactgaagcaacgctcagtatcatgggcgttaccaacccgcagctgcgtgaacatctcgcgcaacaaatgggggctgattgtgggaaaccgggctcattccttgcttctccggtattccagcaaatgtttggctggaaggagtcaaaccacacgatgcgcagcctgacggaaggcaacgcattgttgagcaaagcagtggttgattcactggatgatcagaataatggccggtaccggtttggtgctgactggaggccttttacgcaccagttagccagttggaaagctttgctggaaaagaaacattcagtggtggtaaccagtggtacgggttcaggtaaaacggaatgttttatggtaccggtgctggaagatctttaccgggaactgcatgaaaatggcaacaatccgttggtcggtgtccgagccctttttctctatccattgaacgccctgattaattcacagcgcgagcgtctggatgcctggacgcgtggttttggtacagggatccgctactgcctttacaacggcaacaccgaaaacctacacgcttcggtaaaaagcgaacaggcaaaaaggccgaatgaggtgctctcgcgcgaaaaaatgcgtgaagaacctgcgccgattctggtgaccaacggcacgatgctggaatatatgatggttcgccaggtcgacgccccgattatccagcaatctaaagcacaaaaatcactacgctggattgtactggatgaagcgcatacctatgtagggtcgcaggccgctgaactggcgctccagctgcgtcgtgtgatgaccgcgtttggcgtgacaccagatgacgtgcgctttgtcgcgacctctgcgaccattgccggcagcgacgctgaaaagcagctgaaaaaatttctctctgaattatccggtatcccgcaggagcgcatcgatgttctggacggaattcgggtgattcctgaactggaaccatccaaaaacgtttctgttccgttagacgagatagagcaaatacctgatctggatctaagagataaaaatgataataaatttaaagggataagtcctgagcgcttttatgcgcttacgcattcccccgaagcgcgttacatacgtgagatgttggtcaaacagcccaatccgatgaagctggatgagataacagagcggttaaacgtgctgacaaaacagcattacagccagcaggaagtactgcgttggatcgatgtctgttcagggactcaacctaatgcaaaggatcccgcatttcttaaagtcagggcgcatatcttccagcgtaatacccagggaatatgggcttgtgttgataaagattgcagattaaagcacggtacaccgctcgacaaaggctggccctttggctatgtgtatgtgaaccagcgacaaaattgtgactgtggaagccctgtatacgaagttgcattctgtaatgattgtaatgagcctcatcttctggcacgggacaaaaagggcaaactagtccagtgggaaaataaaggtggcgatgagttctccttgcaggatgaagtacctgttgaacatgacgctacagaagaaaaagtcgaaaaagagaacagttttcagcctccgttgattattgccgcaggagagaccagcgaggcaggttataccctacaacgcctcgaccgtcagacgcgccgtattggcgttattaacaatgacagcattccgctgattattaatgatattgaacaggtttgtagtgccagtggctgtggctacagaggcatgagtgggaaacagcccttccggcgtgcactattaggtgggccattttacgttactaatatcgtgcccaccgttctagagtattgtcaggactttaccagtgatgaaggcaaagagggcgtcggaccagattcgttgccaggacgaggtcgtcgactcatcacctttacagacagtcgacaagggacagcccgaatggcggtgcgtatgcagcaagaagcagaacgcagtcgcttacgcggaagcgtagtcgaaattctcagctggcatcaaaggacgcaaacgtctacagcgccgaatgccaatgccgatctggaaaaattagcggccagggcgaagcaagcccgtgagcaggcagaagaatatcgaagctggggaatgccagaccaggcgaaattgtcacaagcacaggctgaacagcttgaacaggcttatcaggctgcaaccggtgggaaagccgcgactatcctggtatcccgaacctggacggagatggttaacgagcttaaagagagagccgatatccgcgggccggttctgcaatataaccattatcttaagcctgaagtgtttaatgaaaacggcggcccccttaagctttctgaaatgttgttgttccgggaattcatgcgtcgccctaaacggactaacagcctggaaacacaggggctggttcaggttggttaccaggggctggagaaaatacataagagccccttgcactggcaggaaaaaggattaacgctggatgactggcgcgattttctcaaggttacgttggatcattacgttcgcgagagcaacttcacacagctggatgatgagctgaaaaactggattggtagccgtttttcatcaaaattcgtccgtaacccggaatcaaaagatcctgaagataatcagaacagacgctggcctcaaattcgtaatggcaacgtatcccatcgtttagcgaagttgctgatgctgggggctggattcaaaaccgtcaatgcggcaactattgatattatcaatacatggctgaaagaagcatgggcccaacttaccggaccgcttgcagtactgaaacccgatggcaaccgtttttatttaccgaaagagcatatgactttttctttaatcacggatgcctggatttgcccggtaaccaataaaatcctggatacggcttttaaaggcttaaccccttatctgcctacccatatttcgttcgagcatcttaccctggcgcaatatgacacttttgtcgcgcagaaagtcacaatgccggaaatctggaagctggatcgttcacaggaagactacgcagagggtctggcaaaagcacgcgactgggtcagccatgatccgctgatcgcacaattgcggtcggaaaacgtctggacagacattaacgatcgtgtcgtggaaggcggcttctactatcgtactgccgagcactctgcccagcagtcgtcagaacgtctgcaaagctatgaaaagatgttcaagaatgggcaactaaatgttctcaactgttccaccaccatggaaatgggggttgatatcgggggtattactgcggtggtaatgaacaacgtaccgccacatccggccaactatttacagcgcgccgggcgagccgggcgtagtaaagaatcacgcgcgatctcttacaccctatgtaaaggtaacccacacgaccagcaggtttttgccaacccgctctggccatttgaaaccatgatcccggcacccatggtcgcgatgaactccgcccgactggtgcaacgtcacgtcaatgcattattactgtccgactttttatgtaacgttattggcgaaaccgataaagaaaaaaccagcctcgatagcctctggtttttcggtgaagatgacgggcagtcaaaatgcgaacgctttaaaatctggctggaacgtccggttcttgatatcgacacggcgctggaacggctggtgaaaggtacggcgttgcatggtgcaagagccgaatatctgcgggataaaacaatcaacgcgatcaccttcctgcaacagcggtggctctccgtttatcgcgatctcgtgacacaggagcgtgagtcgcagccgcaaacgccttatcgtaagcgcatagagctggagaagaaacggcactgtggcgagtatctgctgcgcgatctggctgccagaaccttcctgccgggatacggtttcccgacagatgtagtgacgtttgataacttcacgatggaagattatatccgcgaaaaatcgcagaaaagtcgtgataaaaaggaccgtgaagataacgtttcccgttataaaggattaccttcccgtaacctcggtgttgccattcgtgaatatgcaccgggagcagagatcatacttgatggccgtgtcttccgctctgccggtgtctcactgcactggcacaacattaatgctgataccaatgaagcccagcgtctggattgcgcctggcgctgtcacaaatgcgggaccattggctatgaagaggggatgagcagttccgggatgctcttttgctccaatagcgcctgcggcgaaaaaataatcatggataatcgccgtcaggtgctgcagcctgccgggtttgtcaccgatgcacacgctccggtaacgaacaatattgaaaccatgaaattcgtcccggttgtccccgcgtgggtctttgttaaagcagagcccgtaccgttgcctaacccgctaatgggttatatggcttctggggctgatgggcatgttttccagcaaagtttgggggaaggtggacacggttatgcattgtgtctgagctgtggccgtgctgagtcgatgctgaatgaaaatgatgcgccgaaaagtatggaagctcactatccaccgcgtccgggtaaagcggatcgcgacagccagaatcatcgtctgatttgccccggttcgacggcactcatgaagaaagtcaccctgggtgcactggcgcgcaccgatgtctttgaaatggttctacgcaaaccgcaaagcggcgagtatctgccagataacacagaggaggggcggattgttgccatgactctggcggttgctctgcgtcaggcgctggcgggcgttctgggtatctccgccgcagaactcggctattctgtacgtccggtcagactggaggatgggcaatcggtattagccgtacagctttatgatgtgatcagcggtggtgcaggttttgcctccagcgcaccggtacacattgaagctatattgcagggaatggtgaaacagttaggctgccgccattgtgagactgcatgtagtgaatgcctgcttgattcccagactcgccacgatcacgatttgctggatcgcaaagcggcgctggcctggcttggcgatgacttcacgtattacatcggtttaccggatgaagagacattctcgctgccggatgcccgctactgtcctggcgccattggcgatacgattcgccgggtgattaacgaaggcgctgaaaagctcaccctgtggatgaccggtgcgcccaatgagtgggatttatacgcccgtcagttccgcgcggcggttcagaactatcggctaaaagacaacgtcgaggtcgatcttgttattcctgtgggagtggatgacccgaacctgttgcatgaactatcgcaatttactgcgctgggggtgcggctgtgccatgttgaacaggatctgcaattaccgatcgttgcccaggtcacctttgccgatcgcgtgatgacgctggcctctcgcagccagcaggcaacgattccggggccggagtggcacctgaatgacgaactggtggtgcgtagtctcggttataaaacggtagaactgaacgagtttattctgccggctaaagccgccaacgctgtcgagcgggtcaaagacattcagatccacaaacagttgaatggaccactgtcgcagtttgggcaacgcttctgggacgtgctgtttaacgaccatgaagaagcgcagtcactgatgaataacacgcgaattaccggcgttcactataccgatcgctatctgcaaaacccggttgcgctggcgttgttgggatcaattctgagaccgctaaaaacaaagctgaccgatggcgctgaagtgacgctggatacgctatttaaagataaagatcgccccggtaaccggcctttccatgactggatgagcatagcggattttcaggatttcgctgatcagtggtttgctgctgcgctgggcaggccggtagaactgacggtgttcgactcgccgcgcgatatccctcaccatcgtaaactgacggtgacttttgaggatggtcaggtattgaagatccgcttcgatcaggggatgggctactggcgcatcaacttttcatcgcaatggcattactttgatttccgcgatgacgtttctttccagttagtcaaaatggatcaagcttgtcaggaagggaatgtggtcaacagtgaagagagctgggcaacggatgtgctggtggaggtgatcgcctcctga

SEQ ID NO: 28669 - DNA, 3291 bp, Escherichia coli 2-156-04_S3_C2
ttgggtcaatcagaatacatttcatgggtaaaatgtacttcctggctaagtaactttgtgaatcttagagggttgagacaaccggatggccgtcctctttatgaatatcatgcaaccaatgatgaatatacccaattaacgcagctactccgtgcagtcggtcaatcacaatctaatatatgtaatagggactttgctgcctgttttgttcttttttgctctgagtggtaccgcagggattatgaacggcaatgcggatggacgtgggaccctatatataaaaaaatagggatttcattcaccgccacagagcttggtactatcgtaccgaaagggatggaagattactggctgcgcccaattcgattttatgaatctgaacgacgcaattttctcggaacattattcagtgaaggtggtttacctttccggctactcaaagaatcagacagtcgctttctggctgttttctccaggatccttggacaatatgagcaagcaaagcagtcaggtttttcagccctttcgctggcaagagctgtcatagaaaaatcagcgctgcctactgtttttagcgaagatacctctgtagaacttatcagtcatatggctgataacctcaattccttagtacttactcacaacctaataaatcacaaagaaccagtacaacagcttgataaggttcaccctacctggcgaagcgagtttccaataccgttagatgatgaaacaggaacgcattttttgaatggactgctatgcgcagcctctgtagaggctaagcctcgactacaaaaaaataagagtatgcgttgccaattttattggtcagaaaagcatccagatgagcttagggcgatagtatctcttcctgacgaagtttcctttcctgtaacaagcgagccgtcaactacgcgctttgaacttgccatttgtgaagatggtgaggaagtctctggccttgggccagcctatgcttccctggaaaatagacaggcaacagttcgattacgtaaaagcgaagtgagatttgtcaggcaaaatccatcggcaggtttgtcgttagtggctcgtgctggagggatgattgttgggagcattaaacttgatgacagtgaaattgccattggtgaggtgccgttaaccttcatcgttgatgcagatcaatggctgttacagggacaggcttcttgcagtgtgcgaagcagcgatgttctgattgtgctccctcgggataatagcaatgttgctggttttgatggccaatcgagggcagtaaacgtattaggactaaaagcactacctgtgaagggatgtcaggacgttacagttacagcaaatgaaacttatcggattcgcaccggaagagaacaaatcagcatcggaaggtttgctctaaatggaaagcgtgcaagctgggtttgtcatccagatgaaacatttattggtgtaccaaaagtcatttctacactaccagatattcaaagcattgatgtaacgcgttacctgagcggaatttcaattgagcaatgtcatatacaagagatgctgggggctcaatatctttctatccgtaatagtaagaatgaaacgctcttgcgtcgcaaaatcggtattttgcctgctgatttcagtattgagataaaaggtggaatacacgcaaatgaaggcactatcgtaatcaccacacagcatccttgtgtagcaaaacttaaagataaaacattggaggctacacgtaagcgtactgaggggcgaacagagatacaactcaaagcggaaggggtacctccggcatttattacattacaagttctgcctaatttggcggctgaccccatcgatattgagttaccttttcccgctaaaggctgtctcgctcttgatgtaaacggacgtcctctggataaaaacattacgctgcatgatctgctgggttccagagcgtttctgttctccagaaatggcgagccgacaaaatatacattgcagttatatttgcgctccgttagtggattacaggcatggcatgaatggtgttatacggcgttgagcgatcgtcctgttgaattgaatctctatagtctgcgcgaacatattgagaacctgatttcacttgaggcaggtattgatcaggttgttgagatgcgtattacgggggcaggtgtggtcatggcctggcaaattcgtcgctataaatacagcctgcgctatgattatgaaaaagaactattactcagccagtcagtgaaccatcgtgctgggcagattccttcccccgttatcatgctgttaagtgaacccgagaggaaatccattcccttagcatctagaatgagcgagggagtgcctgtcggtgaatatgagttgagctcaatcgttaacaaaaatggaccgtggttggttgtccctaaaccgggtgaagagatggcttttcgtccctgcttcattcgtggcgaatcttcgttaccggtagaagaaagcaacatccgctcattgcagaaagcgacccagctttttaatccacaggcagaagttaataccatcacactggttctcggacagatggctaacgatcctgcccattccggctggcaatttatgcgtagcctgtacgatcaatttggttatttaccactggcaacctttgaagtatggcgtgcactggtgcagcatccgcaggcattggcaatgtcgctcttcaaatttgaaatgtcagcagagtacctgagtcgtattgagaatgagttccctattctatgggagtttttccccatctttgagatcaaagcggcatctgagcgtttcaaattgttcctgagccaaaaaggtgcaccggaggaaacccagaaattactggttactaatatgtttcaacggctggggctcgtgttcccgacatatgccgatgaaattgagaaatggttaagtaacggacatctccccccgtctattcctgagtcttttgtccacgtgtggtatcaggagcttttacgtgagcatagtgaagctcaatggccagagtacggcagcaagcggctgcatagctggatggcatcacaaaaaaatccagtgattggtattaatcctgacgcaaatcaccgctattccgtggccttgttacccgtcttcgctgcagctgtggcaagcggaaatgcttcttttgaatctgtatttgaccgtaaacccggtgccgtatttttcctgaggcaagtcagggatttcgattcccgctggtttaaggccatcttccagtgcagcctgttgcgttatgttgctaaaaaataa

SEQ ID NO: 28670 - DNA, 6345 bp, Escherichia coli 2-222-05_S3_C1
atgactacacgctatttttcgtcacttattgaacaatcgttgcctcgttcaactgaagcaacgctcagtatcatgggcgttacaaacccgcagttgcgtgaacatctcgcgcagcaaatgggggctgattgtgggaaaccgggctcattccttgcttctccggtattccagcaaatgtttggctggaaggagtcaaaccacacgatgcgcagtctgacggaaggcaacgcattgttgagcaaagcagtggttgattcactggatgatcagagtaatggccggtaccgatttggtgctgactggaagccttttacacaccagttagccagttggaaagctttgctggaaaagaaacattcagtggtggtaaccagtggtacgggttcaggtaaaacggaatgttttatggtaccggtgctggaagatctttaccgggaactgcatgaaaatggcaacaatccgttggtcggtgtccgagccctttttctctatccattgaacgccttgattaattcacagcgcgagcgtctggatgcctggacgcgtggttttggtactgggatccgctactgcttgtataacggaaatacagaagagctccacgcaaaaatgaaaacagtgcaggataatagaccaaatgaagtcttatcccgtgaaaagatgcgtctggagccagccccgattctggtgaccaacggcacgatgctggaatatatgatggttcgccaggtcgacgccccgattatccagcaatccaaagcacaaaaatcactacgctggattgtactggatgaagcgcatacctatgtcgggtcgcaggccgctgaactggcactccagctgcgtcgtgtgatgacagcgtttggcgtgacgccagatgatgtgcgctttgtagcgacctctgcgaccattgcctgcagcgacgccgaaaagcagctgaaaaaatttctctctgaattatccggtatcccgcaggagcgcatcgatgttctggacggaagtcgggtgattcctgaactggaaccatccaaaaacgtttctgttccgttagacgaaatagagcaaatacctgatctggatctaaaagataaaaatgataataaaattaaagggataagccctgagcgcttttatgcgcttacgcactcccccgaagcgcgttacatacgtgaaatgttggttagccaacccaatccaatgaaactggatgagatgacgcagcggttaaatgcgctgacaaaacagcattacagccagcaggaagtactgcgttggatcgatgtctgttcagggactcaacctaatgcaaaggatcccgcatttcttaaagtcagggcgcatatcttccagcgtaatacccaaggaatatgggcttgtgttgataaagattgcagattaaagcacggtacaccgctcgaaaaaggctggccctttggctatgtgtatgtgaaccagcgacaaaattgtgactgtggaagccctgtatacgaagttgcattctgtaatgattgtaatgagcctcatcttctggcgcaggacaaaaagggcaaacttgtccaatgggaaaataaaggtggcgatgagttctccttgcaggatgaagtacctgttgaacatgacactacagaggaaaaagtcgaaaaagagaacggtttcctgcctccgttgattattgccgcaggagagaccagcgagacaggctataccctacaacgcctcgaccaccagacgcgccgtattggcgttattaacaatgacagcattccgctgattattaatgatgttgaacaggtttgtagcgccagtggctgtggctacagaggcatgagtgggaaacagcccttccggcgtgcactattaggtgggccattttacgttactaatatcgtgcccaccgttcttgagtattgtcaggactttaccagtgatgaaggcaaagagggcgtcggaccagattcgttgccagggcgaggacgtcgactcattacctttacggacagtcgacaaggtacagctcgaatggcggtgcgtatgcagcaagaagcagaacgcagtctcttacgcggaagcgtagtcgaaattctgagctggcatcaacggacgcaaacgtccacggcgccgaatgccaatgccgatctggaaaaattagcggccagggcaaagcaagcccgtgagcaggcagaagaatatcgaagctggggaatgccagaccaggcgaaattgtcacaagcacaggctgaacagcttgaacaggcttatcaggctgcaaccggtggaaaagcagcaactaccctggtatcccgcacctggacagaaatggttaacgagcttaaagataaagccgatatccgtggcccggtactgaaatataaccactatttgcagcctgaagtgtttaataaaaacggcgggccactaaagctttcggaaatgttgttgttccgggaattcatgcgtcgccctaaacggactaacagcctggaaacacaggggctggttcaggttggttaccaggggctggagaaaatacataagagccccttgcactggcaggaaaaaggattaacgctggatgactggcgcgattttctcaaggttacgttggatctttatgttcgcgaaagcaacttcacacagctggatgatgagctgaaaaactggattggtagccgtttttcatcaaaattcgtccgtaacccggaatcaaaagatcctgaagataatcagaacagacgctggcctcaaattcgtaatggcaacgtatcccatcgtttagcgaagttactgatgctgggggctggattcaaaaccgtcaatacggcgactattgatattatcaatacatggctgaaagaagcatgggcccaacttaccggaccacttgcagtactgaaacccgatggcaaccgtttttatttaccgaaagagcatatgactttttctttaatcacggatgcctggatttgcccggtaaccaataaaatcctggatacggcttttaaaggcttaaccccttatctgcccacccatatttcgttcgagcatcttacccaggcgcaatatgacacttttgtcgcgcagaaagtcaccatgccggaaatctggaagctggatcgttcacaggaagactacgcagagggtctggcaaaagcacgagactgggtcaacaatgatccgctgatcgcacaattgcggtcggaaaacgtctggacagacatcaacgatcgtgtagtggaaggcggtttctactatcgcactgccgagcactctgcccagcagtcgtcagaacgcctgcaaagctatgaaaagatgttcaagaacgggcaactaaatgttctcaactgttccaccaccatggaaatgggggttgatattgggggcattactgcggtggtaatgaacaacgttccgccacatccggccaactatttacagcgcgccgggcgagccgggcgtagtaaagaatcacgcgcgatctcttataccctatgcaaaggtaacccacacgaccagcaggtttttgccaacccactctggccatttgaaaccatgatcccggcacccatggtcgcgatgaactccgcccgactggtgcaacgtcacgtcaatgcattattactgtctgactttttatgtaacgttattggcgaaaccgataaagagaaaaccagcctcgatagcctctggtttttcggtgaagatgacgggcagtcaaaatgcgaacgctttaaagtctggctggaacgcccggttcttgatatcgacacggcgctggaacggctggtgaaaggtacggcgttgcatggcgcaagagccgaacatctgcgggataaaacaatcaatgcgatcaccttcctgcaacagcggtggctctccgtttatcgcgatctcgtgacccaggagcgtgagtcgcagccgcaaacgccttatcgtaagcgcatagagctggagaagaaacggcactgtggcgagtatctgctgcgcgatctggctgccagaaccttcctgccgggatacggtttcccgacagatgtagtgacgtttgataacttcacgatggaagattatatccgcgaaaaatcgcagaaaagtcgtgataaaaaggaccgtgaagataacgtctcccgttataaaggattaccttcccgtaacctcggtgttgccattcgtgaatatgcaccgggagcagagatcattcttgatggtcgtgtcttccgctctgccggtgtctcactgcactggcacaacattaatgctgataccaatgaagcccagcgtctggattgcgcctggcgctgtcacaaatgcgggaccattggctatgaagaggggatgagcagttccgggatgctcttttgctccaacagcgcctgcggcgaaaaaataaccatggataatcgccgtcaggtgttgcagcctgccgggtttgtcaccgatgcacacgctccggtaacgaacaatattgaaaccatgaaattcgtcccggttgtccccgcgtgggtctttgttaaagcagagcccgtaccgttgcctaacccgctaatgggttatatggcttctggggctgatgggcatgttttccagcaaagtttgggggaaggtggacacggttatgcattgtgtctgagctgtggccgtgcggagtcgatgctgaatgaaaatgatgcaccgaaaagtatggaagctcactatccaccgcgtccgggtaaagcggaccgcgacagccagaatcatcgtctgatttgccccggttcgacggcactcatgaagaacgtcaccctgggcgcactggcgcgcaccgatgtctttgaaatggttctgcgcaaaccgcaaaacggcgagtatctgccagataacacagaagaggggcggattgtcgctatgactctggcggttgctctgcgtcaggcgctggcaggcgttctgggtatctccgccgcagaactcggctattctgtacgtccggtcagactggaggatgggcaatcggtattagccgttcagctttatgatgtgatcagcggtggtgctggttttgcctccagcgcaccggtacatattgaagctatattgcagggaatggtgaaacagttaggctgccgccattgtgatactgcatgcagtgaatgtctgcttgattcccagactcgccacgatcacgatttgctggatcgcaaagtggcgctggcttggcttggcgatgacttcacgtattacatcggtttaccggatgaagagacattctcgctgccggatgcccgctactgccctggcgctattggcgatacgattcgccgggcgattaacgaaggcgctgaaaagctcaccctgtggatgactggcgcgcccaatgagtgggatttatacgcccgtcagttccgcgcggctattcagagctatcggctaaaagacaacgtcgaggtcgatcttgttattcctgcgggagtggatgacccagacctgttgcatgaactatcgcaatttactgcgctgggtgtgcggttgtgccatgttgagcaggagctgcaattaccgattgttgcccaggtcacctttgccgatcgcgtgatgacgctggcctctcgcagtcagcaggcaacgattccggggccggagtggcacctgaatgacgaactggtggtgcgtagtctcggttatcaaacggtagaactgaacgagtttattctgcccgctaaagccgccaacgctgtcgagcgggtcaaagacattcagatccacaaacagttgaatggaccactttcgcagtttgggcaacgcttctgggacgtgctgtttaacgaccatgaagaagcgcagtcactgatgaaaaacacgcgaattaccggcgttcactataccgatcgctatctgcaaaacccggttgcgctggcgttgttgggatcaattctgaaaccgctaaaaacaaagctgaccgatggcgctgaagtggcgctggatacgctgtttaaagataaagatcgccccggtaaccggcctttccatgactggatgagcatagcggattttcaggatttcgctgatcagtggtttgctgctgcgctgggcaggccgatagaactgacggtgttcgattcgccgcgcgatatccctcaccatcgtaaactgacggtgacttttgaggatggtcaggtattgaagatccgcttcgatcaggggatgggctactggcgcatcaactttgcatcgcaatggcattactttgatttccgcgatgacgtttctttccagttagtcaaaatggctcaggcctgcaaggaagggaatgtggccaacagcgaagagagctgggcaacggatgtgctggtggaggtgatcgcctcctga

SEQ ID NO: 28671 - DNA, 234 bp, Escherichia coli 2-222-05_S3_C1
atgtcacaaaaaaatccagtgattggtattaatcctgacgcaaatcaccgctattccgtggcctggttacccgtcttcgccgcagcggtggcaagcggaaatgcttcttttgaatctgtatttgaccgtaaacccggtgccgtatttttcctgaggcaagtcagggatttcgattcccgctggtttaaggccatcttccagttcagcctgttgcgttatgttgctaaaaaataa

SEQ ID NO: 28672 - DNA, 6345 bp, Escherichia coli 2-222-05_S3_C2; identical to SEQ ID NO: 28670

SEQ ID NO: 28673 - DNA, 234 bp, Escherichia coli 2-222-05_S3_C2; identical to SEQ ID NO: 28671

SEQ ID NO: 28674 - DNA, 6345 bp, Escherichia coli 2-222-05_S3_C3; identical to SEQ ID NO: 28670

SEQ ID NO: 28675 - DNA, 234 bp, Escherichia coli 2-222-05_S3_C3; identical to SEQ ID NO: 28671

SEQ ID NO: 28676 - DNA, 6216 bp, Escherichia coli 2-316-03_S1_C1
ttgactcattatctggaatcacaatatttccagcctcccggtcaggaggggtcactgcttgcagacccggtattcgaaagcacgttcggctggatgcctgcggatgaaacaatggaggatttgcgggacaagctaatttccagcccgctggttgatgcattgagcaaagcgccggtgccatttcgtcatcaacttacggcgtggcgaacgattctggaagacaaaaaatccttgttagtgagcagcggtacgggatccgggaaaacagaatgctttatggtaccggttctagaagatcttattcgtcagcaaaaatcgacccgtcagtcactaacagggacacaagctattttcttgtatccgttaaatgcattaattaacagccaacaggagcggcttcgtgaatggacgcgcggatttaaggggaaaatacgcttcgcgctatataatggcgaaacccggcataccaaatacgaagttcaggaagatcagttgaaagtacctgaacaagctttgagtcgggaagccatttacgaagcaccaccttccatcatggtgacgaataccaccatgctggaatatatgctgattcgtcgtaaagatgccccaatcatcgaaaagtctcaggggatattaaagtatatcgtcctggatgaagcccatagttatattggttctcaggctgctgagttagcgctgcttttacgtcgtgttatgcaggctttcaatgttggacctggcacagataaacctgtgcagattatcgcgacctctgccactattggtgaagactctcctgaaggtaataaggagcttgctaaatttgtcgctgatcttgcgggcgttacagaacgtgatgtcaaagtggttcgcggctatcgacaaataccgcgggtatcggagtcgctgattcgtcatgaatatcccacatctttaacttctcttaaatctttgagccctcaggatctttaccaacagctttgtcattaccgtgtagcccagcaattgcgtcaggcgttaactcatcccggacggcaggcagtacgtttgagtgagttgctcaatgttgccagaagaacctggccagatattaatcaccgtgagttactgcaactcctcgacctaatggcgagatcgcgagaaggtgaactggcttttacgccattacgtatgcatgggtttatcagaacactggcgggtctatgggcatgttcaaacaaacaatgcttacataaagcgcatgaattaaatcagagtgactggccatttggtcaggtatggtttgagcagcgccaatattgtgactgtggtgcgccggtatttgaagttttacgttgctccgggtgtggttcagcttatttgtctgccaaagaggaggtgcgcggtgatggaacgaactggttggtagcgcaacccgccgctgccgaagtggatgaatttgctcttgatgtagatgtttattctgaagatgaagacaacgacgaattagacaataactctcaatttgatcgtctgattgcgatcgatggtgaaaaatatatcatttcactggaagaaacgacggcggggaaaattgatagtgaagcgcaaaagcactatgaaataaacctgttaagaccggaatctcgaggtgagggacgtaataattcctttgcttgtgtttgctgtggtgacacccaacgaaaaaataatcctttattccgtccgcttcgacttggcgcgcccttttttttaaatgaaattattcctactctgctggagttttcaccattaccgcagacaagagaagagcagttaggaccgtttaatggtcgacgtctgctcacctttacggattcacgtcagggcactgcccgcatttctgcccgcttacagcaggatgccgataaagcgacgttgcgagctctttgttaccaggagttggccaatattaatgagccatcagcaaagctcagcccggcacactgcgcattgttagagagttttattacccagttttctatccttcctttaaaaaactctattgacgcgctgaaaaaagcgatggttgctaatgaagagcttagcccggcggacattcaggcacttaaaattatcgagccgatggtgagttccttaagcccggatcatgctgaagcgatgcaaatactccaggctaactctggcaatcagcagaagaaaaccatgtcatggcaaacactgtctgaacagctggttggcagtgtggaccttgccgatagaatgagaggcagttttaaagaattgtctgggcttgatcttactaaacaacagtttgcagatttttgtttatacagtgagtttggtcgccgccctaaaaatgcctggaccctcgaaagtatgggtctggtagccattcactatccatttattgataaagttacaacctgcccgcaggactggaagacattattacccgatcccgataagcaattagcggaatggcgtaatttattgaagattactcttgatttctttatacgtgaaaacagtgccgttttttacgaaaacgagcaataccctcgctggatgggggctcgtttcccggtaaaaatgctccagggtccagataaaaaaaacaaagggcagaaacgtgatcaactttggccacaaatacgcgatcgccattataaccgggtcattaagctattaattgcagtctttccggcaatacaacctgagcaggctcactggaaatcgttagttaaccacttaatgattgaggtctgggatgcaattcgaccctgcttacgtcagtttgagtcgggttatcagctggatattaaacaacaagctgaattttacagtccaaagcaagtgtggcgttgcccctatactcgacgtgcgttagacgtcacgttactgggatactctccgtatttgccgggtagcaaagaaattgcacctgaaaaagcagtgttgattgaaatgcctgagcttcctgtacgtcactggcgtttgtctggtggtggagaaatcgcccgagaagaacgtctggagtggctggaaagtaatgcgctgattcaacatgcccgcgaggaaggattatggtctactcgcagcgaccgactggccctgaaagatagctggtatcgtctggaggaacactctgcgcagagaacgcctgagcagaaccaatttaatgaaaaacaatttaagtcaggcaaagttaatgtgctgaactgctccacgaccatggagatgggggtggacattggtggtatgagtttggtggcaatgaacaacgttcctccagctccggcaaattatttgcagcgtgcaggccgcgcgggtcgacgtggagagagtgcatctgctgccattacgttatgtaaaaacacggcgcatggaatggaggtattcaaagaccccctctgggcgttcaacactactgccagtgcgccacgggttcgttttgggagcagcagtattgttcaacgacatgttaatgccctggttttaggtctgtttttacgagctgaagttcctgatgcgacaaaactgagttgcaaatggttctttgaaggtgatgagagccagtgtcttcgttttctccattggttaaataaccaggccgatcagctggcggataaacttaaacgccttactcagggaaccgtcctgatgtcattgacggcaacccagctcttgacccgcacacaagcaatgatgcagcaggttgatatccgctggagaagccaacttgcgatactgttggaaaatatcgaagcgttgaaggcggataacagcgcgtgggaagaaacgccagcaggtaaagccatcgcttatcagcttcgtgattatcgcggtgcatatctgttttctaaactcattagtgaagcgttcctgccggggcatggtttcccggttggcgtcgtcaatttcaattatctgacggcagatgagctggaaaaacgtcgcgcaataaaagctactcaggctgaccctaatgaagggggagaaagcttttctcgtcgtattgaaaaattgcccagccgtgatttgcctacagcattacgcgagtatgctccaggtgcagatgtggtattgggcggaaaagtatatcgttcctcgggcattatgcttggcaaggtacttgccagcgggcaggagctgtcaggcgatcatcatattccgtggttctggcattgtcgtaaatgtggtgcgggggcaaccagtactacccgtcctgtcgaatgtagtcactgcaaagcggatatacagcaacttgatgtgaagcgttatttacagcctgttggttttgcgacagatatccgttatcaggcgcataatgatgtatccatgcctgcacaacttccctggaaagatccacgtgttcttgtaccgtcttcggtgtgggtttctttacccgatgctgggctaggacgttaccgttttagccatagtggggaattgttccacttcagtgaaggggaatttgggcacggctacgcaatttgcctctcatgtggtcgggcagaatctcaaaatcaaccccagcgtacccctgaaaatcttaagaacccagagagggaaaatacgcattacctgttgcgagggggcagtaacgatcgtctgggtagcaataaattgtgccacggtcacgtgcataaagatctttggttggggtatagcagtcgtacagatatggttgagctgcaactcaatgatgataatggcctgttgatccgtgatgaggttgccgcgcgttcccttgcggtcgctttgcgtgaagggttagcgcataaattgggtatcgaaaatactgagctgggcgtgacgacgcagcaagcgcgcgatatcaatggctataccggatattccatcttcatttacgacaataatgcgggtggtgcaggttatgcagtgcaattgatcgaccattgggctgatgtctttaattacgccagaaaattgctcgattgcagttgcgataaattctgtcaccactgcttgctcagctacgacagtcagcattatgtcaacagattagatcgtcaccatgcattaaccctgcttaccaatgtacggttgcagcgacttaacctcgcgccagaatatcagtacttcggcgatggtagccgggttgaaactaaccctctgagtttacgtattgcgcaatgcctgaacagcgagatttatgactcctgctcgctggttcttgcggggccgcaggaacagtgggactttgcccaatggccattatttaaagagttgctccagtttgcctcctccggtgggaatgttgagttgctggtggccacgccgctggcaaacttaactgatagctccagacatcagctttccgcgttggcggcgatgccgggaggtcgcttacaagtgaaatccattgccactgcgcagctcatgcaaggaaaggggcgctggcttgcgcaggtgactcgcgaagggcaaagccaacagtgggccgcagacgacagcgctaccgttgcacctggtgaattatggggacaaagtgcgtcttcaccagtagtgacacttaaaggaacgtccggaaaaaccttctcgggtcagaccttaagtgcagaagatttactgcccgccttacccaccggggcggtgcgcatcaatctctgtgaacaactggacgggccgctggaaggttttggttcgcgtttctggtcgttagtcacgcaacagcacgctggctggaagcaggcatttacccgccacaaagagataacgcatgttgagtacagcgatcgttatcttaatagcccattcacggcgcgtttgttaggtgaaatcttaaccgagctggttgaacagggaatggcggaacgcgccagcctcactgtttgcgtcaaaaaattggattacaactctcgccaacacgacgctctctataacgcgtggcttaatgaggaagatcgtcagcaggttgtgaccactttacttgaagaaggatatctggggcctgcgtggccgggagcaattagctggttaacgggggataaccagagtacggagcatggacgagaactgacagtcaccttcagcgatggcagtcagcattatgtcctgctcgacatggggcttagctactggcgctgtattgaagacaccttctttgattttgctctgcgagtaccgcagcaagttgaacggctggcaaacacgcgagcgcgagctgttgcctcgggtaatgaccttaggagttatgttatcgctggataa

SEQ ID NO: 28677 - DNA, 3360 bp, Escherichia coli 2-316-03_S1_C1
ttgcttgtgaaaactccagttaacccacttttgcaatggcttaacatgttttttagtcgccgttcattatccggagctgatggacgggcgttatatgcttaccgttgtactgatacagagtacgaaagtttggcagaactactgcgtacatatgccccccgtagttatccaagaacgatattcatttcctatagcgatgttctatttagcatatatgccgcagagtttatccgccggactcatacggtcggacaccctaaatgggacacaattttagattctattgactggaaagttccgtatgttcatcgacagaagctggttaatgatggcattcgctactggaaaagaaagataagaaacctggggcaagcttcgggttatctgcatacactggcttgtgaaggtggtttacctatccgcatgattgaaaatgagagcggttatttgattacctatttcagaaggatatatcaggcgcttcgtgggcaagcatctcaatatcctgccgctaaaattgcacaagaattaggcgatacgattcctgtcacaatgcaaaacgaactggtctatgaaatagccggtgaattctgcgagactctctgccgattacttagtgagcatccacctcaaagcagtgatcccgtttctgcattacgtaagctctctccagactggcatcttcaacttccactcgttctccccgaagcgaatgctgcagagattgtaaggcgattactttctcaatcttctgaaatacgcagtgcaagtagtcttcaggttgaaagaatctgggtcgatgttgatgacagttggtattgtgatgcccggttccgattcccggccacaatgcgtacagaacagttaacctctttgtttgaatgcaatattcagccggagcagacccgactcatcatttcaggaaaatggagaaatggcggggcaagggtggcaatgctaagccgttatgagcagcaagattggcggggcgagttattacctattgcgatgcaaaagctctctggtgcagatgcaatggccgaaatctcgttgtcgcttcatgaaggtccaattctgttaggccacacaattccaaaaggcggttatgaacttactgaagaactcccctgggtttttgaagcgatgaatgagagtgaatcgcagctaaaacttgtcggtatggggtctgtgagttccaggctaaatgctctgtttatttcgctaccgaaaaatagccatttagatattagtggagaaggtgagtttgatatcccaaggttgctgaaaaacagtgaacgcagcttaactaaaataagtggagtatttagcgttgttttacatgatggtgcagtttgtacaattcgcacccagcaactttatgattctgcgattgaatattatattaaatcgacagaagttgaactggttaaatcggattatcctgtccatcgagcctggccgaagatcggttggaaaaaggatctgcaatatggcattgtaccggagaaagaacttttttggcgttccattcgttcaggtaacaatgcctggcattctgtcgcatcagaaatgccaaaaggacagatagaagtcagacgaatagttaatgatgaggttttatttagcggtaaagttgtagttttaccagcagacttcgatattaatattatacctgagagtgttcagcaaggcatcataatgctttctggtataacggatactagaattgacaaatattcaaacaatgaaaaagtaacacttaagtccgattattcacaaaacgagtgtgctatttattataattcatcggagatgctggaaaataccgttgatttacgggtctcctggaaagatggttctaatcttaaactattattacctaagccggttagcggtggccgatttgtaactcatgatggttctgttcattttgatggtgtggcatctatagcgcatttgcatggaatagatgctgagttgttaaccatatcttgtgctggaagaggatatcttaatatcgagttgttggatgaaaatccagtagctgaaaaattccgttatttacatgccgaccttcctcttttatcaggatgcaatgacaaattaaaacaaatttcactttatgagaactataatttgctaaatgctatgctggcatgtgcatggaacagcaatagtacattatgtgttgatttttactctgacagatttggaaaggataaagcaacactcagtattaaacgctacgatggtagttttattgaacacgatcaagggttactggttgatataaaaaattctgttgtttttcctgcaaatagaatagacgagttggttgttgatgctatttctcttaaggatcctggcttacacatatcgttgctaaaaaaagatgaatttgcttatgatctttcagctctgaatgttcaggatagcccatggttaattgtggggaaacttgatggtacagctcgcattgcaccagtaattaaatgggggctacctgtattacagacaaatgatttattacttaatgctctatgcgaagcggattccgaacagcgaaaaaaatattttaatgagctaatttttgaaatagataacaatcctttgcaaaattattgctgtttattaacggagtatattaagaaatacaaaatgaataatggcttatccttgctggatctggatttgttcagaggtatttcgagtaattaccgcgtggttgttcagttgttaatatcatcatgtctttctggtgatagcgatacgatttatgatatacaggacgaattacccttttcatggggatggattcccgtttcaatctggaaagatgtttttcaaaagtgttgggcttatctggaaaaacagattaacgataaaacattagcattacatatattgcaaccctttattgcttttatgaaccatcgtgcacatatcgatcgtcggctggctcccattgcgaatatgttacttacatatagcgaactcctaccagccggttgtaatgtcttgccaactgttagtcgtgagcagtttaatgaagctaaacagatgctattaaggaaccccgacagctttgggcgtatcagtatcttccctaaagaactttggtctagtgctattactccagagttaaaatctgtttttaataagctttggattgaagataaatatcactcacggcttgaaaaacgttttaatttgatgttagtcgcagcgctgttaacccaaaaagataataacttgatatatcaactgtctgcgctttttgaattccactatcagcaagccccgcagcaattaggggtaatctatcaatattattttgaacaagcaggagtatgtcattga

SEQ ID NO: 28678 - DNA, 6315 bp, Escherichia coli 2-316-03_S1_C2; identical to SEQ ID NO: 28574

SEQ ID NO: 28679 - DNA, 3360 bp, Escherichia coli 2-316-03_S1_C2; identical to SEQ ID NO: 28647

SEQ ID NO: 28680 - DNA, 7974 bp, Escherichia coli 2719100
atgattgttgggagcattaaacttgatgacagtgaaattgccattggtgaggtgccgttaaccttcatcgttgatgcagatcaatggctgttacagggacaggcctcctgcagtgtgcgaagcagcgatgttctgattgtgctccctcgggacaatagcactgttgctggttttgatggccaatcgagtgcagtaaacgtattaggacttaaagcgctacctgttaagggatgtcaggacgttacagttacagcaaatgaaacttatcggattcgcaccggaagagaacaaatcagcatcggaaggtttgctctaaatggaaagcgtgcaagctgggtttgtcatccagatgagacatttattggtgtaccaaaagtcatttctacactaccagatattcaaagcattgatgtaacgcgttacctgagcggaatttcaattgagcgatgtcatatacaagagatgctaggggctcaatatctttctatccgtaatagtaataatgaaacgctcttgcgtcgcaaaatcggtatcttgcctgctgatttcagtattgagataaaaggtggaatgcacgcaaatgaaggcactatcgtaatcaccacacagcatccttgtgtagcaacacttaaagataaaacattggaggctacacgtaagcgtactgaggggcggacagagatacaactcaaagcggaaggggtacctccggcatttattacattacaagttctgcctaatttggcggctgataccatcgacattgagttacctttcccagctaaaggctgccttgctcttgatgtaaacggacgtcctctggataaaaacattacgctgcatgatctgctgggttccagagcattcctgttctccagaaatggtgagccgacaaaatatacattgcagttgcatttgcgctccattagtggattacaggcatggcacgaatggagttatacggcattgagcgagcgtcctgttgaattgaatctctatagtctacgtgaacacattgaaaatctgatttcacttgaggcaggtattgatcaggttgttgagatgcgtattacgggggcgggtgtggtcatggcctggcaaattcgtcgctataaatacagcctgcgctatgattatgaaaaagaactattactcagccagtcagtgaaccatcgtgctggacagattccttcccccgttatcatgctgttaagtgaacccgagaggaaatccattcccttagcatcaagaatgagcgagggagtgcctgtcggtgaatatgagttgagctcaatcgttaacaaaaacggaccatggttggttgttcctaaaccgggtgaagagatggcttttcgcccctgcttcattcgtggcgaatcttcattaccggtagaagaaagcaacatccgctcattgcagaaagcgacccagctttttaatccacaggcagaagttaataccatcacacgggttctcggacagatggctaacgatcctgcccattccggctggcaatttatgcgtagcctgtacgatcaatttggttatttaccgctggcaacctttgaagtatggcgtgcactagtgcagcatccgcaggcattggcgatgtcgctcttcaaattcgaaatgtcagcagagtatctgagtcgtattgagaatgagttccctattttatgggagtttttccccatctttgagatcaaagctgcatctgagcgtttcaaattgttcctgagccaaaaaggtgcaccggaggaaacccagaaattactggttaccaatatgtttcaacggctggggctcgtgttcccgacatatgccgatgaaattgagaaatggttaagtaatggatatctccccccgtctattcctgaatcttgtgtccacgggtggtatcaggagctcttacgtgagcacagtgaggctcgctggcctgaatatggctgcaagcgtctgtataaatggatgatgtcacaaaaaaatccagtgattggtattaatcctgacgcaaatcaccgctattccgtggcctggttaccggtgctggaagatctttaccgggaactgcatgaaaatggcaacaatccgttggtcggtgtccgagccctttttctctatccattgaacgccctgattaattcacagcgcgagcgtctggatgcctggacgcgtggttttggtaccgggatccgctactgcctttacaacggcaacaccgaaaacctacacgcttcggtaaaaagcgaacaggcaaaaaggccgaatgaggtgctctcgcgcgaaaaaatgcgtgaagaacctgcgccgattctggtgaccaacggcacgatgctggaatatatgatggttcgccaggtcgacgccccgattatccagcaatctaaagcacaaaaatcactacgctggattgtactggatgaagcgcatacctatgtcgggtcgcaggccgctgaactggcactccagctgcgtcgtgtgatgacagcgtttggcgtgacgccagatgatgtgcgctttgtagcgacctctgcgaccattgccggcagcgacgccgaaaagcagctgaaaaaatttctctctgaattatccggtatcccgcaggagcgcatcgatgttctggacggaagtcgggtgattcctgaactggaaccatccaaaaacgtttctcttccgttagacgaaatagagcaaatacctgatctggaactaagagataaaaatgataataaaattaaagggataagctctgatcgcttttatgcgcttacgcattcccccgaagcacgttacatacgtgagatgttggtcaaacagcccaatccgatgaagctggatgagataacagagcggttaaacgtgctgacaaaacagcattacagccagcaggaagtactgcgttggatcgatgtctgttcagggactcaacctaatgcaaaggatcccgcatttcttaaagtcagggcgcatatcttccagcgtaatacccagggaatatgggcttgtgtggataaaaattgcagattaaagcacggtacaccgctcgaaaaaggctggccctttggctatgtgtatgtgaaccagcgacaaaattgcgactgtggaagccctgtctacgaagtggcgttctgtaatgattgtaatgagcctcatcttctggcgcaggacaaaaagggcaaacttgtccaatgggaaaataaaggtggcgatgagttctccttgcaggatgaagtacctgttgaacatgacactacagaggaaaaagtcgaaaaagagaacggtttcctgcctccgttgattattgccgcaggagagaccagcgagacaggctataccctacaacgcctcgaccgccagacgcgccgtattggcgttattaacaatgacagcattccgctgattattaatgatgttgaacaggtttgtagcgccagtggctgtggctacagagacatgagtgggaaacagcccttccggcgtgcactattaggtgggccattttacgttactaatatcgtgcccaccgttcttgagtattgtcaggactttaccagtgatgaaggcaaagagggcgtcggaccagattcgttgccagggcgaggacgtcgactcattacctttacggacagtcgacaaggtacagctcgaatggcggtgcgtatgcagcaagaagcagaacgcagtctcttacgcggaagcgtagtcgaaattctgagctggcatcaacggacgcaaacgtccacggcgccgaatgccaatgccgatctggaaaaattagcggccagggcgaagcaagcccgtgagcaggcagaagaatatcgaagctggggaatgccagaccaggcgaaattgtcacaagcgcaggctgaacagcttgaacaggcttatcaggctgcaaccggtggaaaagcagcaactaccctggtatcccgcacctggacagaaatggttaacgagcttaaagataaagccgatatccgtggcccggtactgaaatataaccactatttgcagcctgaagtgtttaataaaaacggcgggccactaaagctttcggaaatgttgttgttccgggaattcatgcgtcgccctaaacggactaacagcctggaaacacaggggctggttcaggttggttaccaggggctggagaaaatacataagagccccttgcactggcaggaaaaaggattaacgctggatgactggcgcgattttctcaaggttacgttggatctttatgttcgcgaaagcaacttcacacagctggatgatgagctgaaaaactggattggtagccgtttttcatcaaaattcgtccgtaacccggaatcaaaagatcctgaagataatcagaacagacgctggcctcaaattcgtaatggcaacgtatcccatcgtttagcgaagttactgatgctgggggctggattcaaaaccgtcaatacggcgactattgatattatcaatacatggctgaaagaagcatgggcccaacttaccggaccacttgcagtactgaaacccgatggcaaccgtttttatttaccgaaagagcatatgactttttctttaatcacggatgcctggatttgcccggtaaccaataaaatcctggatacggcttttaaaggcttaaccccttatctgcccacccatatttcgttcgagcatcttacccaggcgcaatatgacacttttgtcgcgcagaaagtcaccatgccggaaatctggaagctggatcgttcacaggaagactacgcagagggtctggcaaaagcacgagactgggtcaacaatgatccgctgatcgcacaattgcggtcggaaaacgtctggacagacatcaacgatcgtgtcgtggaaggcggtttctactatcgcactgccgagcactctgcccagcagtcgtcagaacgcctgcaaagctatgaaaagatgttcaagaacgggcaactaaatgttctcaactgttccaccaccatggaaatgggggttgatattgggggcattactgcggtggtaatgaacaacgttccgccacatccggccaactatttacagcgcgccgggcgagccgggcgtagtaaagaatcacgcgcgatctcttataccctatgcaaaggtaacccacacgaccagcaggtttttgccaacccactctggccatttgaaaccatgatcccggcacccatggtcgcgatgaactccgcccgactggtgcaacgtcacgtcaatgcattattactgtctgactttttatgtaacgttattggcgaaaccgataaagagaaaaccagcctcgatagcctctggtttttcggtgaagatgacgggcagtcaaaatgcgaacgctttaaagtctggctggaacgcccggttcttgatatcgacacggcgctggaacggctggtgaaaggtacggcgttgcatggcgcaagagccgaacatctgcgggataaaacaatcaatgcgatcaccttcctgcaacagcggtggctctccgtttatcgcgatctcgtgacccaggagcgtgagtcgcagccgcaaacgccttatcgtaagcgcatagagctggagaagaaacggcactgtggcgagtatctgctgcgcgatctggctgccagaaccttcctgccgggatacggtttcccgacagatgtagtgacgtttgataacttcacgatggaagattatatccgcgaaaaatcgcagaaaagtcgtgataaaaaggaccgtgaagataacgtctcccgttataaaggattaccttcccgtaacctcggtgttgccattcgtgaatatgcaccgggagcagagatcattcttgatggccgtgtcttccgctctgccggtgtctcactgcactggcacaacattaatgctgataccaatgaagcccagcgtctggattgcgcctggcgctgtcacaaatgcgggaccattggctatgaagaggggatgagcagttccgggatgctcttttgctccaacagcgcctgcggcgaaaaaataaccatggataatcgccgtcaggtgttgcagcctgccgggtttgtcaccgatgcacacgctccggtaacgaacaatattgaaaccatgaaattcgtcccggttgtccccgcctgggtctttgttaaagcagagcccgtaccgttgcctaacccgctaatgggttatatggcttctggggctgatgggcatgttttccagcaaagtctgggggaaggtggacacggttatgcattgtgtctgagctgtggccgtgcggagtcgatgctgaatgaaaatgatgctccgaaaagtatggaagctcactatcctccgcgtccgggtaaagcggaccgcgacagccagaatcatcgtctgatttgccccggttcgacagcactcatgaagaacgtcaccctgggcgcactggcgcgcaccgatgtctttgaaatggttctgcgcaaaccacaaaatggcgagtatctgccagataacacagaggaggggcggattgtcgccatgactctggcggttgctctgcgtcaggcgctggcaggcgttctgggtatctccgccgcagaactcggctattctgtacgtccggtcagactggaggatgggcaatcggtattagccgttcagctttatgatgtgatcagtggtggtgcaggttttgcctccagcgcaccggtacacattgaagctatattgcagggaatggtgaaacagttaggctgccgccattgtgatactgcatgtagtgaatgcctgcttgattcccagactcgccacgatcacgatttgctggatcgcaaagttgcgctggcctggcttggcgatgacttcacgtattacatcggtttaccggatgaagagacattctcgctgccggatgcccgctactgccctggcgctattggcgatacgattcgccgggcgattaacgaaggtgctgaaaagcttaccctatggatgaccggcgcgcccaatgagtgggatttatacgcccgtcagttccgcgcagctattcagagctatcggctaaaagacaacgtcgaggtcgatcttgttatccctgcgggagtggatgacccggatctattgcatgaactatcgcaatttactgcgctgggtgtgcggctgtgccatgttgaacaggatctgcaattgccgatcgttgctcaggtcacctttgccgatcgcgtgatgacgctggcctctcgtagccagcaggcaacgattccggggccggagtggcacctgaatgacgaactggtggtacgtagtctcggctataaaacggtagaactgaacgagtttattctgccagctaaagccgccaacgctgtcgagcgggtcaaagacattcagatccacaaacagttgaatggaccactgtcgcagtttgggcaacgcttctgggacgtgctgtttaacgaccatgaagaagcgcagtcactgatgaaaaacacgcgaattaccggcgttcactataccgatcgctatctgcaaaacccggttgcgctggcgttgttggggtcaattctgaaaccgctaaaaacaaagctgaccgatggcgctgaagtggcgttggatacgctgtttaaagataaagatcgccccggtaaccggcctttccatgactggatgagcatagcggattttcaggatttcgctgatcagtggtttgctgctgcgctgggcaggccggtagaactgacggtgttcgactcgccgcgcgatatccctcaccatcgtaaactgacggtgacttttgaggatggtcaggtattgaagatccgcttcgatcaggggatgggctactggcgtatcaactttgcatcgcaatggcattactttgacttccgcgatgacgtttctttccagttagtcaaaatggctcaggcctgcaatgaaggaaatgtggccaacagcgaagagagctgggcaacggatgtgctggtggaggtgatcgcctcctga

SEQ ID NO: 28681 - DNA, 840 bp, Escherichia coli 2719100
ttgggtcaatcagaatacatttcatgggtaaaatgtacttcctggctaagtaactttgtgaatcttagagggttgagaaaaccggatggccgtcctctttatgaatatcatgcaaccaatgatgaatataaccaattaacgcagctactccgtgcagtcggtcaatcacaatctaatatatgtaataaggactttgctgcctgttttgttcttttttgctctgagtggtaccgcagggattatgaacggcaatgcggatggacgtgggaccctatatataaaaaaatagggatttcatttaccgccacagagcttggtactatcgtaccgaaagggatggacgattactggctgcgcccaattcgattttatgaatctgaacgacgcaattttctcggaacattattcagtgaaggtggtttacctttccggttactcaaagaatcagacagtcgctttctggctgttttctccaggatccttggacaatatgagcaagcaaagcagtcaggtttttctgccctttcgctggcaagagccgtcatagaaaaatcagcgctgccaactgtttttagcgaagatacctctgtagaacttatcagtcatatggctgataacctcaattccttagtacttactcacaacctaataaatcacaaagaaccagtacaacagctggataaggttcaccctacctggcgaagcgagtttccaataccgttagatgatgaaacaggaacgcattttttgaatggactgctatgcgcagcctctgtagaggctaagcctcgactacaaaatgaaccgccccgggtttcctggagagtgttttatctgtga

SEQ ID NO: 28682 - DNA, 6345 bp, Escherichia coli 2747800
atgactacacgctatttttcgtcacttattgaacaatcgttgtctcgttcaactgaagcaacgctcagtatcatgggcgttacaaacccgcagttgcgtgaacatctcgcgcaacaaatgggggctgattgtgggaaaccgggctcattccttgcttctccggtattccagcaaatgtttggatggaaggagtcaaatcacacgatgcgcagcctgacggaaggcaacgcattgttgagcaaagcagtggttgattcactggataatcagagtaatggccggtaccgatttggtgctgactggaagccttttacacaccagttagccagttggaaagctttgctggaaaagaaacattcagtggtggtaaccagtggtacgggttcaggtaaaacggaatgttttatggttccggtgctggaagatctttaccgggaactgcatgaaaatggcaacaatccgttggtcggtgtccgagccctttttctctatccattgaacgccttgattaattcacagcgcgagcgtctggatgcctggacgcgtggttttggtactggaatccgctactgcttgtataacggaaatacagaagagctccacgcaaaaatgaaaacagtgcaggataatagaccaaatgaagtcttatcccgtgaaaagatgcgtctggagccagccccgattctggtgaccaacggcacgatgctggaatatatgatggttcgccaggtcgacgccccgattatccagcaatccaaagcacaaaaatcactacgctggattgtactggatgaagcgcatacctatgtcgggtcgcaggccgctgaactggcactccagctgcgtcgtgtgatgacagcgtttggcgtgacgccagatgatgtgcgctttgtagcgacctctgcgaccattgccggcagcgacgccgaaaagcagctgaaaaaatttctctctgaattatccggtatcccgcaggagcgcatcgatgttctggacggaagtcgggtgattcctgaactggaaccatccaaaaacgtttctgttccgttagacgaaatagagcaaatacctgatctggatctaaaagataaaaatgataataaaattaaagggataagtcctgagcgcttttatgcgctcacgcactcccccgaagcacgttacatacgcgagatgttggtcaaacatcccaatccaatgaagctggatgagatgacagagcggttaaacatactgacaaaacagcatcacagccagcatgaagtactgcgttggatcgacgtctgttcagggacccaacctaatgcaaaggatcccgcatttcttaaagtcagggcgcatatcttccagcgtaatacccagggaatatgggcttgtgtggataaagattgcaggttaaagcacggtacaccgctcgaaaaaggctggccctttggctatgtatatgtgaaccagcgacaaaattgcgattgtggaagccctgtttacgaagtggcgttctgtaatgattgtaatgaacctcatcttctggcgcgggacaaaaagggcaaactagtccagtgggaaaataaaggtggcgatgaattctctttgcaggatgaagtacctgttgaacatgacgctacagcggaaaaagtcgaaaaagagaacagtttccagcctccgttgattattgccgcaggagagaccagcgaggccggttataccctacaacgcctcgaccgccagacgcgccgtattggcgttattaacaatgacagcattccgctgattattaatgatgttgaacaggtttgtagtgccagtggctgtggctacagaggcatgagtgggaaacagcccttccggcgtgcactattaggtgggccattttacgttactaatatcgtgcccaccgttctagagtattgtcaggactttaccagtgatgaaggcaaagagggcgtcggaccagattcgttgccaggacgaggtcgtcgactcatcacctttacagacagtcgacaagggacagcccgaatggcggtgcgtatgcagcaagaagcagaacgcagtcgcttacgcggaagcgtagtcgaaattctcagctggcatcaaaggacgcaaacgtctacagcgccgaatgccaatgccgatctggaaaaattagcgaccagggcgaagcaagcccgtgagcaggcagaagaatatcgaagctggggaatgccagaccaggcgaaattgtcacaagcgcaggctgaacagcttgaacaggcttatcagtttgcaatcggcggaaaagcagcaaccaccctagtatcccgcacctggactgaaatggttaacgagcttaaagataaagccgatatccgtggcccggttctgaaatataactactatttgaagcctgaagtgtttaatgaaaacggcgggcctctaaagctttctgaaatgttgttgttccgggaattcatgcgtcgccctaaacggactaacagcctggaaacacaggggctggttcaggttggttacctgggactggagaaaatacataagctccctatgcactggcaggaaagggaattaacgctggatgactggcgcgattttctcaaggttacgttggatcattacgttcgcgagagcaacttcacacagctggatgatgagctgaaaaactggattggtagccgtttttcatcaaaattcgtccgtaacccggaatcaaaagatcctgaagataatcagaatagacgctggcctcaaattcgtaatggcaacgtatcccatcgtttagcgaagttactgatgctgggggctggattcaaaaccgtcaatacggcgactattgatattatcaatacatggctgaaagaagcatgggcccaacttaccggaccgcttgcagtactgaaacccgatggcaaccgtttttatttaccgaaagagcatatgactttttctttaatcacggatgcctggatttgcccggtaaccaataaaatcctggatacggcttttaaaggcttaaccccttatctgcctacccatatttcgttcgagcatcttacccaggcgcaatatgacacttttgtcgcgcagaaagtcaccatgccggaaatctggaagctggatcgttcacaggaagactacgcagagggtctggcaaaagcacgcgactgggtcagcaatgatccgctgatcgcacaattgcggtcagaaaacgtctggacagacatcaacgatcgtgtcgtggaaggcggtttctactatcgcactgccgagcactctgcccagcagtcgtcagaacgcctgcaaagctatgaaaagatgttcaagaacgggcaactaaatgttctcaactgttccaccaccatggaaatgggggttgatatcgggggcattacagcggtggtaatgaacaatgtaccgccacatcctgccaactatttacagcgcgccgggcgagccgggcgtagtaaagagtcgcgtgcgatctcttacaccctatgcaaaggtaacccacacgaccaacaggtttttgccaacccgctctggccgtttgaaaccatgatcccggcacccatggtcgcgatgaactccgcccgactggtacaacgtcacgtcaatgcattattactgtccgactttttatgtaacgttattggcgaaaccgataaagagaaaaccagcctcgatagcctctggtttttcggtgaagatgacgggcagtcaaaatgcgaacgctttaaaatctggctggaacgcccggttcttgatatcgacacggcgctggaacggctggtgaaaggtacggcgttgcatggtgcaagagctgaacatctgcgggataaaacaatcagcgcgatcaccttcctgcaacagcggtggctctccgtttatcgcgatctcgtgacccaggagcgtgagtcgcagccacaaacgccttatcgtaagcgcatagagctggagaagaaacgacactgtggagagtatctgctgcgcgatctggctgccagaactttcctgccgggatacggcttcccgacagatgtagtgacgtttgataacttcacaatggaagattatatccgcgaaaaattgcaaaaaagtcgtgataaaaaggaccgtgaagataacgtctcccgttataaaggattaccttcccgtaacctcggtgttgccattcgtgaatatgcaccgggagcagagatcattcttgatggccgtgtcttccgctctgccggtgtctcactgcactggcacaatattaatgctgataccaatgaagcccagcgtctggattgtgcctggcgctgtcacaaatgcgggaccattggctatgaagaggggatgagcagttccgggatgctcttttgctccaatagcgcctgcggcgaaaaaataatcatggataatcgccgtcaggtgttgcagcctgccgggtttgtcaccgatgcacacgctccggtaacgaacaatattgaaaccatgaaattcgtcccggttgtccccgcctgggtctttgttaaagcagagcccgtaccgttgcctaacccgctaatgggttatatggcttctggggctgatgggcatgttttccagcaaagtctgggggaaggtggacacggttatgcattgtgtctgagctgtggccgtgcggagtcgatgctgaatgaaaatgatgctccgaaaagtatggaagctcactatccaccgcgtccgggtaaagcggaccgcgacagccagaatcatcgtctgatttgcccaggttcgacggcactcatgaagaacgtcaccctgggcgcactggcgcgcaccgatgtctttgaaatggttctgcgcaaaccgcaaaaaggcgagtatctgccagataacacagaagaggggcggattgtcgctatgactctggcggttgctctgcgtcaggcgctagcgggcgttctgggtatctccggcgcagaactcggctattctgtacgcccggtcagactggaggatgggcaatcggtattagccgttcagctttatgatgtgatcagcggtggtgcaggttttgcctccagcgcaccggtacacattgaagctattttgcagggaatggtgaaacagttaggttgccgccattgtgatactgcatgtagtgaatgcctgcttgattcccagactcgccacgatcacgatttgctggatcgcaaagcggcgctggcctggcttggcgatgacttcacgtattacatcggtttaccggatgaagagacattctcgctgccggatgcccgctactgccctggcgctattggcgatacgattcgccgggcgattaacgaaggcgctgaaaagctcaccctgtggatgaccggcgcgcccaatgagtgggatttatacgcccgtcagttccgcgcggcggttcagagctatcggctaaaagacaacgtcgaggtcgatcttgttatacctgcgggagtggatgacccggatctgttgtatgaactatcgcaatttactgcgctgggtgtgcggctgtgccatgttgaacaggatctgcaattgccgatcgttgcccaggttacctttgccgatcgcgtgatgacgctggcttctcgcagccagcaggcaacgattccggggccggagtggcacctgaatgacgaactggtggtgcgtagtctcggttataaaacggtagaactgaacgagtttattctgccggctaaagccgccaacgctgtcgagcgggtcaaagacattcagatccacaaacagttgaatggaccactttcgcagtttggacaacgcttctgggacgtgctgtttaacgaccatgaagaagcacagtcactgatgaataacacgcgaattaccggcgttcactataccgatcgctatctgcaaaacccggttgcgctggcgttgttgggatcaattctgagaccgctaaaaacaaagctgaccgatgtcgctgaagtggcgctggatacgctgtttaaagataaagatcgccccggtaaccggcctttccatgactggatgagcatagcggattttcaggatttcgctgatcagtggtttgctgctgcgctgggcaggccgatagaactaacggtgttcgactcgccgcgcgatatccctcaccatcgtaaactgacggtgacttttgaggatggtcaggttttgaagatccgcttcgatcaggggatgggctactggcgtatcaactttgcatcgcaatggcattactttgacttccgcgatgacgtttctttccagttagtcaaaatggctcaggcctgcaatgaaggaaatgtggccaacagcgaagagagctgggcaacggatgtgctggtggaggtgagcgcctcctga

SEQ ID NO: 28683 - DNA, 1743 bp, Escherichia coli 2747800
atgctgggggctcaatatctttctatccgtaatagtaataatgaaacgctcttgcgtcgcaaaatcggtatcttgcctgctgatttcagtattgagataaaaggtggaatgcacgcaaatgaaggcactatcgtaatcaccacacagcatccttgtgtagcaaaacttaaagataaaacattggaggctacacgtaagcgtactgaggggcgaacagagatacaacttaaagcggaaggggtacctccggcatttattacattacaagttctgcctaatttggcggctgaccccatcgacattgagttaccttttcccgctaaaggctgtctcgctcttgatgtaaacggacgtcctctggataaaaacattacgctgcatgatctgctgggttccagagcgtttctgttctccagaaatggtgagccgacaaaatatacattgcagttgtatttgcgctccgttagtggattacaggcatggcatgaatggtgttatacggcgttgagcgatcgtcctgttgaattgaatctctatagtctgcgcgaacatattgagaacctgatttcacttgaggcaggtattgatcaggttgttgagatgcgtattacgggggcaggtgtggtcatggcctggcaaattcgtcgctataaatacagcctgcgctatgattatgaaaaagaactattactcagccagtcagtgaaccatcgtgctgggcagattccttcccccgttatcatgctgttaagtgaacccgagaggaaatccattcccttagcatctagaatgagcgagggagtgcctgtcggtgaatatgagttgagctcaatcgttaacaaaaatggaccgtggttggttgtccctaaaccgggtgaagagatggcttttcgtccctgcttcattcgtggcgaatcttcgttaccggtagaagaaagcaacatccgctcattgcagaaagcgacccagctttttaatccacaggcagaagttaataccatcacacgggttctcggacagatggctaacgatcctgcccattccggctggcaatttatgcgtagcctgtacgatcaattcgggtatttaccactggcaacctttgaagtatggcgtgcactggtgcagcatccgcaggcattggcaatgtcgctcttcaaatttgaaatgtcagcagagtacctgagtcgtattgagaatgagttccctattttatgggagtttttccccatctttgagatcaaagctgcatctgagcgtttcaaattgttcctgagccaaaaaggtgcaccggaggaaacccaaaaattactggttactaatatgtttcaacggctggggctcgtgttcccgacatatgccgatgaaattgagaaatggttaagtaacggatatctccctccgtctattcctgaatcttgtgtccacgggtggtatcaggagctcttacgtgagcacagtgaggctcgctggcctgaatatggctgtaagcgtctgtatgaatggatgatgtcacaaaaaaatccagtgattggtattaatcctgatgcagattaccgctattccgtggcctggttacccgtcttcgccgcagcggtggcaagcggaaatgcttcttttgaatctgtatttgaccgtaaacccggtgccgtatttttcctgaggcaagtcagggatttcgattcccgctggtttaaggccatcttccagtgcagcctgttgcgttatgttgctaaaaaataa

SEQ ID NO: 28684 - DNA, 6345 bp, Escherichia coli 2749250
atgactacacgctatttttcgtcacttattgaacaatcgttgtctcgttcaactgaagcaacgctcagtatcatgggcgttacaaacccgcagttgcgtgaacatctcgcgcaacaaatgggggctgattgtgggaaaccgggctcattccttgcttctccggtattccagcaaatgtttggatggaaggagtcaaatcacacgatgcgcagcctgacggaaggcaacgcattgttgagcaaagcagtggttgattcactggataatcagagtaatggccggtaccgatttggtgctgactggaagccttttacacaccagttagccagttggaaagctttgctggaaaagaaacattcagtggtggtaaccagtggtacgggttcaggtaaaacggaatgttttatggttccggtgctggaagatctttaccgggaactgcatgaaaatggcaacaatccgttggtcggtgtccgagccctttttctctatccattgaacgccttgattaattcacagcgcgagcgtctggatgcctggacgcgtggttttggtactggaatccgctactgcttgtataacggaaatacagaagagctccacgcaaaaatgaaaacagtgcaggataatagaccaaatgaagtcttatcccgtgaaaagatgcgtctggagccagccccgattctggtgaccaacggcacgatgctggaatatatgatggttcgccaggtcgacgccccgattatccagcaatccaaagcacaaaaatcactacgctggattgtactggatgaagcgcatacctatgtcgggtcgcaggccgctgaactggcactccagctgcgtcgtgtgatgacagcgtttggcgtgacgccagatgatgtgcgctttgtagcgacctctgcgaccattgccggcagcgacgccgaaaagcagctgaaaaaatttctctctgaattatccggtatcccgcaggagcgcatcgatgttctggacggaagtcgggtgattcctgaactggaaccatccaaaaacgtttctgttccgttagacgaaatagagcaaatacctgatctggatctaaaagataaaaatgataataaaattaaagggataagtcctgagcgcttttatgcgctcacgcactcccccgaagcacgttacatacgcgagatgttggtcaaacatcccaatccaatgaagctggatgagatgacagagcggttaaacatactgacaaaacagcatcacagccagcatgaagtactgcgttggatcgacgtctgttcagggacccaacctaatgcaaaggatcccgcatttcttaaagtcagggcgcatatcttccagcgtaatacccagggaatatgggcttgtgtggataaagattgcaggttaaagcacggtacacagctcgaaaaaggctggccctttggctatgtatatgtgaaccagcgacaaaattgcgattgtggaagccctgtttacgaagtggcgttctgtaatgattgtaatgaacctcatcttctggcgcgggacaaaaagggcaaactagtccagtgggaaaataaaggtggcgatgaattctctttgcaggatgaagtacctgttgaacatgacgctacagcggaaaaagtcgaaaaagagaacagtttccagcctccgttgattattgccgcaggagagaccagcgaggccggttataccctacaacgcctcgaccgccagacgcgccgtattggcgttattaacaatgacagcattccgctgattattaatgatgttgaacaggtttgtagtgccagtggctgtggctacagaggcatgagtgggaaacagcccttccggcgtgcactattaggtgggccattttacgttactaatatcgtgcccaccgttctagagtattgtcaggactttaccagtgatgaaggcaaagagggcgtcggaccagattcgttgccaggacgaggtcgtcgactcatcacctttacagacagtcgacaagggacagcccgaatggcggtgcgtatgcagcaagaagcagaacgcagtcgcttacgcggaagcgtagtcgaaattctcagctggcatcaaaggacgcaaacgtctacagcgccgaatgccaatgccgatctggaaaaattagcgaccagggcgaagcaagcccgtgagcaggcagaagaatatcgaagctggggaatgccagaccaggcgaaattgtcacaagcgcaggctgaacagcttgaacaggcttatcagtttgcaatcggcggaaaagcagcaaccaccctagtatcccgcacctggactgaaatggttaacgagcttaaagataaagccgatatccgtggcccggttctgaaatataactactatttgaagcctgaagtgtttaatgaaaacggcgggcctctaaagctttctgaaatgttgttgttccgggaattcatgcgtcgccctaaacggactaacagcctggaaacacaggggctggttcaggttggttacctgggactggagaaaatacataagctccctatgcactggcaggaaagggaattaacgctggatgactggcgcgattttctcaaggttacgttggatcattacgttcgcgagagcaacttcacacagctggatgatgagctgaaaaactggattggtagccgtttttcatcaaaattcgtccgtaacccggaatcaaaagatcctgaagataatcagaatagacgctggcctcaaattcgtaatggcaacgtatcccatcgtttagcgaagttactgatgctgggggctggattcaaaaccgtcaatacggcgactattgatattatcaatacatggctgaaagaagcatgggcccaacttaccggaccgcttgcagtactgaaacccgatggcaaccgtttttatttaccgaaagagcatatgactttttctttaatcacggatgcctggatttgcccggtaaccaataaaatcctggatacggcttttaaaggcttaaccccttatctgcctacccatatttcgttcgagcatcttacccaggcgcaatatgacacttttgtcgcgcagaaagtcaccatgccggaaatctggaagctggatcgttcacaggaagactacgcagagggtctggcaaaagcacgcgactgggtcagcaatgatccgctgatcgcacaattgcggtcagaaaacgtctggacagacatcaacgatcgtgtcgtggaaggcggtttctactatcgcactgccgagcactctgcccagcagtcgtcagaacgcctgcaaagctatgaaaagatgttcaagaacgggcaactaaatgttctcaactgttccaccaccatggaaatgggggttgatatcgggggcattacagcggtggtaatgaacaatgtaccgccacatcctgccaactatttacagcgcgccgggcgagccgggcgtagtaaagagtcgcgtgcgatctcttacaccctatgcaaaggtaacccacacgaccaacaggtttttgccaacccgctctggccgtttgaaaccatgatcccggcacccatggtcgcgatgaactccgcccgactggtacaacgtcacgtcaatgcattattactgtccgactttttatgtaacgttattggcgaaaccgataaagagaaaaccagcctcgatagcctctggtttttcggtgaagatgacgggcagtcaaaatgcgaacgctttaaaatctggctggaacgcccggttcttgatatcgacacggcgctggaacggctggtgaaaggtacggcgttgcatggtgcaagagctgaacatctgcgggataaaacaatcagcgcgatcaccttcctgcaacagcggtggctctccgtttatcgcgatctcgtgacccaggagcgtgagtcgcagccacaaacgccttatcgtaagcgcatagagctggagaagaaacgacactgtggagagtatctgctgcgcgatctggctgccagaactttcctgccgggatacggcttcccgacagatgtagtgacgtttgataacttcacaatggaagattatatccgcgaaaaattgcaaaaaagtcgtgataaaaaggaccgtgaagataacgtctcccgttataaaggattaccttcccgtaacctcggtgttgccattcgtgaatatgcaccgggagcagagatcattcttgatggccgtgtcttccgctctgccggtgtctcactgcactggcacaatattaatgctgataccaatgaagcccagcgtctggattgtgcctggcgctgtcacaaatgcgggaccattggctatgaagaggggatgagcagttccgggatgctcttttgctccaatagcgcctgcggcgaaaaaataatcatggataatcgccgtcaggtgttgcagcctgccgggtttgtcaccgatgcacacgctccggtaacgaacaatattgaaaccatgaaattcgtcccggttgtccccgcctgggtctttgttaaagcagagcccgtaccgttgcctaacccgctaatgggttatatggcttctggggctgatgggcatgttttccagcaaagtctgggggaaggtggacacggttatgcattgtgtctgagctgtggccgtgcggagtcgatgctgaatgaaaatgatgctccgaaaagtatggaagctcactatccaccgcgtccgggtaaagcggaccgcgacagccagaatcatcgtctgatttgcccaggttcgacggcactcatgaagaacgtcaccctgggcgcactggcgcgcaccgatgtctttgaaatggttctgcgcaaaccgcaaaaaggcgagtatctgccagataacacagaagaggggcggattgtcgctatgactctggcggttgctctgcgtcaggcgctagcgggcgttctgggtatctccggcgcagaactcggctattctgtacgcccggtcagactggaggatgggcaatcggtattagccgttcagctttatgatgtgatcagcggtggtgcaggttttgcctccagcgcaccggtacacattgaagctattttgcagggaatggtgaaacagttaggttgccgccattgtgatactgcatgtagtgaatgcctgcttgattcccagactcgccacgatcacgatttgctggatcgcaaagcggcgctggcctggcttggcgatgacttcacgtattacatcggtttaccggatgaagagacattctcgctgccggatgcccgctactgccctggcgctattggcgatacgattcgccgggcgattaacgaaggcgctgaaaagctcaccctgtggatgaccggcgcgcccaatgagtgggatttatacgcccgtcagttccgcgcggcggttcagagctatcggctaaaagacaacgtcgaggtcgatcttgttatacctgcgggaggggatgacccggatctgttgtatgaactatcgcaatttactgcgctgggtgtgcggctgtgccatgttgaacaggatctgcaattgccgatcgttgcccaggttacctttgccgatcgcgtgatgacgctggcttctcgcagccagcaggcaacgattccggggccggagtggcacctgaatgacgaactggtggtgcgtagtctcggttataaaacggtagaactgaacgagtttattctgccggctaaagccgccaacgctgtcgagcgggtcaaagacattcagatccacaaacagttgaatggaccactttcgcagtttggacaacgcttctgggacgtgctgtttaacgaccatgaagaagcacagtcactgatgaataacacgcgaattaccggcgttcactataccgatcgctatctgcaaaacccggttgcgctggcgttgttgggatcaattctgagaccgctaaaaacaaagctgaccgatgtcgctgaagtggcgctggatacgctgtttaaagataaagatcgccccggtaaccggcctttccatgactggatgagcatagcggattttcaggatttcgctgatcagtggtttgctgctgcgctgggcaggccgatagaactaacggtgttcgactcgccgcgcgatatccctcaccatcgtaaactgacggtgacttttgaggatggtcaggttttgaagatccgcttcgatcaggggatgggctactggcgtatcaactttgcatcgcaatggcattactttgacttccgcgatgacgtttctttccagttagtcaaaatggctcaggcctgcaatgaaggaaatgtggccaacagcgaagagagctgggcaacggatgtgctggtggaggtgagcgcctcctga

SEQ ID NO: 28685 - DNA, 1743 bp, Escherichia coli 2749250; identical to SEQ ID NO: 28683

SEQ ID NO: 28686 - DNA, 6345 bp, Escherichia coli 2770900
atgactacacgctatttttcgtcacttattgaacaatcgttgtctcgttcaactgaagcaacgctcagtatcatgggcgttacaaacccgcagttgcgtgaacatctcgcgcaacaaatgggggctgattgtgggaaaccgggctcattccttgcttctccggtattccagcaaatgtttggatggaaggagtcaaatcacacgatgcgcagcctgacggaaggcaacgcattgttgagcaaagcagtggttgattcactggataatcagagtaatggccggtaccgatttggtgctgactggaagccttttacacaccagttagccagttggaaagctttgctggaaaagaaacattcagtggtggtaaccagtggtacgggttcaggtaaaacggaatgttttatggttccggtgctggaagatctttaccgggaactgcatgaaaatggcaacaatccgttggtcggtgtccgagccctttttctctatccattgaacgccttgattaattcacagcgcgagcgtctggatgcctggacgcgtggttttggtactggaatccgctactgcttgtataacggaaatacagaagagctccacgcaaaaatgaaaacagtgcaggataatagaccaaatgaagtcttatcccgtgaaaagatgcgtctggagccagccccgattctggtgaccaacggcacgatgctggaatatatgatggttcgccaggtcgacgccccgattatccagcaatccaaagcacaaaaatcactacgctggattgtactggatgaagcgcatacctatgtcgggtcgcaggccgctgaactggcactccagctgcgtcgtgtgatgacagcgtttggcgtgacgccagatgatgtgcgctttgtagcgacctctgcgaccattgccggcagcgacgccgaaaagcagctgaaaaaatttctctctgaattatccggtatcccgcaggagcgcatcgatgttctggacggaagtcgggtgattcctgaactggaaccatccaaaaacgtttctgttccgttagacgaaatagagcaaatacctgatctggatctaaaagataaaaatgataataaaattaaagggataagtcctgagcgcttttatgcgctcacgcactcccccgaagcacgttacatacgcgagatgttggtcaaacatcccaatccaatgaagctggatgagatgacagagcggttaaacatactgacaaaacagcatcacagccagcatgaagtactgcgttggatcgacgtctgttcagggacccaacctaatgcaaaggatcccgcatttcttaaagtcagggcgcatatcttccagcgtaatacccagggaatatgggcttgtgtggataaagattgcaggttaaagcacggtacaccgctcgaaaaaggctggccctttggctatgtatatgtgaaccagcgacaaaattgcgattgtggaagccctgtttacgaagtggcgttctgtaatgattgtaatgaacctcatcttctggcgcgggacaaaaagggcaaactagtccagtgggaaaataaaggtggcgatgaattctctttgcaggatgaagtacctgttgaacatgacgctacagcggaaaaagtcgaaaaagagaacagtttccagcctccgttgattattgccgcaggagagaccagcgaggccggttataccctacaacgcctcgaccgccagacgcgccgtattggcgttattaacaatgacagcattccgctgattattaatgatgttgaacaggtttgtagtgccagtggctgtggctacagaggcatgagggggaaacagcccttccggcgtgcactattaggtgggccattttacgttactaatatcgtgcccaccgttctagagtattgtcaggactttaccagtgatgaaggcaaagagggcgtcggaccagattcgttgccaggacgaggtcgtcgactcatcacctttacagacagtcgacaagggacagcccgaatggcggtgcgtatgcagcaagaagcagaacgcagtcgcttacgcggaagcgtagtcgaaattctcagctggcatcaaaggacgcaaacgtctacagcgccgaatgccaatgccgatctggaaaaattagcgaccagggcgaagcaagcccgtgagcaggcagaagaatatcgaagctggggaatgccagaccaggcgaaattgtcacaagcgcaggctgaacagcttgaacaggcttatcagtttgcaatcggcggaaaagcagcaaccaccctagtatcccgcacctggactgaaatggttaacgagcttaaagataaagccgatatccgtggcccggttctgaaatataactactatttgaagcctgaagtgtttaatgaaaacggcgggcctctaaagctttctgaaatgttgttgttccgggaattcatgcgtcgccctaaacggactaacagcctggaaacacaggggctggttcaggttggttacctgggactggagaaaatacataagctccctatgcactggcaggaaagggaattaacgctggatgactggcgcgattttctcaaggttacgttggatcattacgttcgcgagagcaacttcacacagctggatgatgagctgaaaaactggattggtagccgtttttcatcaaaattcgtccgtaacccggaatcaaaagatcctgaagataatcagaatagacgctggcctcaaattcgtaatggcaacgtatcccatcgtttagcgaagttactgatgctgggggctggattcaaaaccgtcaatacggcgactattgatattatcaatacatggctgaaagaagcatgggcccaacttaccggaccgcttgcagtactgaaacccgatggcaaccgtttttatttaccgaaagagcatatgactttttctttaatcacggatgcctggatttgcccggtaaccaataaaatcctggatacggcttttaaaggcttaaccccttatctgcctacccatatttcgttcgagcatcttacccaggcgcaatatgacacttttgtcgcgcagaaagtcaccatgccggaaatctggaagctggatcgttcacaggaagactacgcagagggtctggcaaaagcacgcgactgggtcagcaatgatccgctgatcgcacaattgcggtcagaaaacgtctggacagacatcaacgatcgtgtcgtggaaggcggtttctactatcgcactgccgagcactctgcccagcagtcgtcagaacgcctgcaaagctatgaaaagatgttcaagaacgggcaactaaatgttctcaactgttccaccaccatggaaatgggggttgatatcgggggcattacagcggtggtaatgaacaatgtaccgccacatcctgccaactatttacagcgcgccgggcgagccgggcgtagtaaagagtcgcgtgcgatctcttacaccctatgcaaaggtaacccacacgaccaacaggtttttgccaacccgctctggccgtttgaaaccatgatcccggcacccatggtcgcgatgaactccgcccgactggtacaacgtcacgtcaatgcattattactgtccgactttttatgtaacgttattggcgaaaccgataaagagaaaaccagcctcgatagcctctggtttttcggtgaagatgacgggcagtcaaaatgcgaacgctttaaaatctggctggaacgcccggttcttgatatcgacacggcgctggaacggctggggaaaggtacggcgttgcatggtgcaagagctgaacatctgcgggataaaacaatcagcgcgatcaccttcctgcaacagcggtggctctccgtttatcgcgatctcgtgacccaggagcgtgagtcgcagccacaaacgccttatcgtaagcgcatagagctggagaagaaacgacactgtggagagtatctgctgcgcgatctggctgccagaactttcctgccgggatacggcttcccgacagatgtagtgacgtttgataacttcacaatggaagattatatccgcgaaaaattgcaaaaaagtcgtgataaaaaggaccgtgaagataacgtctcccgttataaaggattaccttcccgtaacctcggtgttgccattcgtgaatatgcaccgggagcagagatcattcttgatggccgtgtcttccgctctgccggtgtctcactgcactggcacaatattaatgctgataccaatgaagcccagcgtctggattgtgcctggcgctgtcacaaatgcgggaccattggctatgaagaggggatgagcagttccgggatgctcttttgctccaatagcgcctgcggcgaaaaaataatcatggataatcgccgtcaggtgttgcagcctgccgggtttgtcaccgatgcacacgctccggtaacgaacaatattgaaaccatgaaattcgtcccggttgtccccgcctgggtctttgttaaagcagagcccgtaccgttgcctaacccgctaatgggttatatggcttctggggctgatgggcatgttttccagcaaagtctgggggaaggtggacacggttatgcattgtgtctgagctgtggccgtgcggagtcgatgctgaatgaaaatgatgctccgaaaagtatggaagctcactatccaccgcgtccgggtaaagcggaccgcgacagccagaatcatcgtctgatttgcccaggttcgacggcactcatgaagaacgtcaccctgggcgcactggcgcgcaccgatgtctttgaaatggttctgcgcaaaccgcaaaaaggcgagtatctgccagataacacagaagaggggcggattgtcgctatgactctggcggttgctctgcgtcaggcgctagcgggcgttctgggtatctccggcgcagaactcggctattctgtacgcccggtcagactggaggatgggcaatcggtattagccgttcagctttatgatgtgatcagcggtggtgcaggttttgcctccagcgcaccggtacacattgaagctattttgcagggaatggtgaaacagttaggttgccgccattgtgatactgcatgtagtgaatgcctgcttgattcccagactcgccacgatcacgatttgctggatcgcaaagcggcgctggcctggcttggcgatgacttcacgtattacatcggtttaccggatgaagagacattctcgctgccggatgcccgctactgccctggcgctattggcgatacgattcgccgggcgattaacgaaggcgctgaaaagctcaccctgtggatgaccggcgcgcccaatgagtgggatttatacgcccgtcagttccgcgcggcggttcagagctatcggctaaaagacaacgtcgaggtcgatcttgttatacctgcgggagtggatgacccggatctgttgtatgaactatcgcaatttactgcgctgggtgtgcggctgtgccatgttgaacaggatctgcaattgccgatcgttgcccaggttacctttgccgatcgcgtgatgacgctggcttctcgcagccagcaggcaacgattccggggccggagtggcacctgaatgacgaactggtggtgcgtagtctcggttataaaacggtagaactgaacgagtttattctgccggctaaagccgccaacgctgtcgagcgggtcaaagacattcagatccacaaacagttgaatggaccactttcgcagtttggacaacgcttctgggacgtgctgtttaacgaccatgaagaagcacagtcactgatgaataacacgcgaattaccggcgttcactataccgatcgctatctgcaaaacccggttgcgctggcgttgttgggatcaattctgagaccgctaaaaacaaagctgaccgatgtcgctgaagtggcgctggatacgctgtttaaagataaagatcgccccggtaaccggcctttccatgactggatgagcatagcggattttcaggatttcgctgatcagtggtttgctgctgcgctgggcaggccgatagaactaacggtgttcgactcgccgcgcgatatccctcaccatcgtaaactgacggtgacttttgaggatggtcaggttttgaagatccgcttcgatcaggggatgggctactggcgtatcaactttgcatcgcaatggcattactttgacttccgcgatgacgtttctttccagttagtcaaaatggctcaggcctgcaatgaaggaaatgtggccaacagcgaagagagctgggcaacggatgtgctggtggaggtgagcgcctcctga

SEQ ID NO: 28687 - DNA, 1743 bp, Escherichia coli 2770900; identical to SEQ ID NO: 28683

SEQ ID NO: 28688 - DNA, 6345 bp, Escherichia coli 2860050; identical to SEQ ID NO: 28682

SEQ ID NO: 28689 - DNA, 687 bp, Escherichia coli 2860050
atgcgtagcctgtacgatcaattcgggtatttaccactggcaacctttgaagtatggcgtgcactggtgcagcatccgcaggcattggcaatgtcgctcttcaaatttgaaatgtcagcagagtacctgagtcgtattgagaatgagttccctattttatgggagtttttccccatctttgagatcaaagctgcatctgagcgtttcaaattgttcctgagccaaaaaggtgcaccggaggaaacccaaaaattactggttactaatatgtttcaacggctggggctcgtgttcccgacatatgccgatgaaattgagaaatggttaagtaacggatatctccctccgtctattcctgaatcttgtgtccacgggtggtatcaggagctcttacgtgagcacagtgaggctcgctggcctgaatatggctgtaagcgtctgtatgaatggatgatgtcacaaaaaaatccagtgattggtattaatcctgatgcagattaccgctattccgtggcctggttacccgtcttcgccgcagcggtggcaagcggaaatgcttcttttgaatctgtatttgaccgtaaacccggtgccgtatttttcctgaggcaagtcagggatttcgattcccgctggtttaaggccatcttccagtgcagcctgttgcgttatgttgctaaaaaataa

SEQ ID NO: 28690 - DNA, 6345 bp, Escherichia coli 2860650
atgactacacgctatttttcgtcacttattgaacaatcgttgtctcgttcaactgaagcaacgctcagtatcatgggcgttacaaacccgcagttgcgtgaacatctcgcgcaacaaatgggggctgattgtgggaaaccgggctcattccttgcttctccggtattccagcaaatgtttggatggaaggagtcaaatcacacgatgcgcagcctgacggaaggcaacgcattgttgagcaaagcagtggttgattcactggataatcagagtaatggccggtaccgatttggtgctgactggaagccttttacacaccagttagccagttggaaagctttgctggaaaagaaacattcagtggtggtaaccagtggtacgggttcaggtaaaacggaatgttttatggttccggtgctggaagatctttaccgggaactgcatgaaaatggcaacaatccgttggtcggtgtccgagccctttttctctatccattgaacgccttgattaattcacagcgcgagcgtctggatgcctggacgcgtggttttggtactggaatccgctactgcttgtataacggaaatacagaagagctccacgcaaaaatgaaaacagtgcaggataatagaccaaatgaagtcttatcccgtgaaaagatgcgtctggagccagccccgattctggtgaccaacggcacgatgctggaatatatgatggttcgccaggtcgacgccccgattatccagcaatccaaagcacaaaaatcactacgctggattgtactggatgaagcgcatacctatgtcgggtcgcaggccgctgaactggcactccagctgcgtcgtgtgatgacagcgtttggcgtgacgccagatgatgtgcgctttgtagcgacctctgcgaccattgccggcagcgacgccgaaaagcagctgaaaaaatttctctctgaattatccggtatcccgcaggagcgcatcgatgttctggacggaagtcgggtgattcctgaactggaaccatccaaaaacgtttctgttccgttagacgaaatagagcaaatacctgatctggatctaaaagataaaaatgataataaaattaaagggataagtcctgagcgcttttatgcgctcacgcactcccccgaagcacgttacatacgcgagatgttggtcaaacatcccaatccaatgaagctggatgagatgacagagcggttaaacatactgacaaaacagcatcacagccagcatgaagtactgcgttggatcgacgtctgttcagggacccaacctaatgcaaaggatcccgcatttcttaaagtcagggcgcatatcttccagcgtaatacccagggaatatgggcttgtgtggataaagattgcaggttaaagcacggtacaccgctcgaaaaaggctggccctttggctatgtatatgtgaaccagcgacaaaattgcgattgtggaagccctgtttacgaagtggcgttctgtaatgattgtaatgaacctcatcttctggcgcgggacaaaaagggcaaactagtccagtgggaaaataaaggtggcgatgaattctctttgcaggatgaagtacctgttgaacatgacgctacagcggaaaaagtcgaaaaagagaacagtttccagcctccgttgattattgccgcaggagagaccagcgaggccggttataccctacaacgcctcgaccgccagacgcgccgtattggcgttattaacaatgacagcattccgctgattattaatgatgttgaacaggtttgtagtgccagtggctgtggctacagaggcatgagggggaaacagcccttccggcgtgcactattaggtgggccattttacgttactaatatcgtgcccaccgttctagagtattgtcaggactttaccagtgatgaaggcaaagagggcgtcggaccagattcgttgccaggacgaggtcgtcgactcatcacctttacagacagtcgacaagggacagcccgaatggcggtgcgtatgcagcaagaagcagaacgcagtcgcttacgcggaagcgtagtcgaaattctcagctggcatcaaaggacgcaaacgtctacagcgccgaatgccaatgccgatctggaaaaattagcgaccagggcgaagcaagcccgtgagcaggcagaagaatatcgaagctggggaatgccagaccaggcgaaattgtcacaagcgcaggctgaacagcttgaacaggcttatcagtttgcaatcggcggaaaagcagcaaccaccctagtatcccgcacctggactgaaatggttaacgagcttaaagataaagccgatatccgtggcccggttctgaaatataactactatttgaagcctgaagtgtttaatgaaaacggcgggcctctaaagctttctgaaatgttgttgttccgggaattcatgcgtcgccctaaacggactaacagcctggaaacacaggggctggttcaggttggttacctgggactggagaaaatacataagctccctatgcactggcaggaaagggaattaacgctggatgactggcgcgattttctcaaggttacgttggatcattacgttcgcgagagcaacttcacacagctggatgatgagctgaaaaactggattggtagccgtttttcatcaaaattcgtccgtaacccggaatcaaaagatcctgaagataatcagaatagacgctggcctcaaattcgtaatggcaacgtatcccatcgtttagcgaagttactgatgctgggggctggattcaaaaccgtcaatacggcgactattgatattatcaatacatggctgaaagaagcatgggcccaacttaccggaccgcttgcagtactgaaacccgatggcaaccgtttttatttaccgaaagagcatatgactttttctttaatcacggatgcctggatttgcccggtaaccaataaaatcctggatacggcttttaaaggcttaaccccttatctgcctacccatatttcgttcgagcatcttacccaggcgcaatatgacacttttgtcgcgcagaaagtcaccatgccggaaatctggaagctggatcgttcacaggaagactacgcagagggtctggcaaaagcacgcgactgggtcagcaatgatccgctgatcgcacaattgcggtcagaaaacgtctggacagacatcaacgatcgtgtcgtggaaggcggtttctactatcgcactgccgagcactctgcccagcagtcgtcagaacgcctgcaaagctatgaaaagatgttcaagaacgggcaactaaatgttctcaactgttccaccaccatggaaatgggggttgatatcgggggcattacagcggtggtaatgaacaatgtaccgccacatcctgccaactatttacagcgcgccgggcgagccgggcgtagtaaagagtcgcgtgcgatctcttacaccctatgcaaaggtaacccacacgaccaacaggtttttgccaacccgctctggccgtttgaaaccatgatcccggcacccatggtcgcgatgaactccgcccgactggtacaacgtcacgtcaatgcattattactgtccgactttttatgtaacgttattggcgaaaccgataaagagaaaaccagcctcgatagcctctggtttttcggtgaagatgacgggcagtcaaaatgcgaacgctttaaaatctggctggaacgcccggttcttgatatcgacacggcgctggaacggctggtgaaaggtacggcgttgcatggtgcaagagctgaacatctgcgggataaaacaatcagcgcgatcaccttcctgcaacagcggtggctctccgtttatcgcgatctcgtgacccaggagcgtgagtcgcagccacaaacgccttatcgtaagcgcatagagctggagaagaaacgacactgtggagagtatctgctgcgcgatctggctgccagaactttcctgccgggatacggcttcccgacagatgtagtgacgtttgataacttcacaatggaagattatatccgcgaaaaattgcaaaaaagtcgtgataaaaaggaccgtgaagataacgtctcccgttataaaggattaccttcccgtaacctcggtgttgccattcgtgaatatgcaccgggagcagagatcattcttgatggccgtgtcttccgctctgccggtgtctcactgcactggcacaatattaatgctgataccaatgaagcccagcgtctggattgtgcctggcgctgtcacaaatgcgggaccattggctatgaagaggggatgagcagttccgggatgctcttttgctccaatagcgcctgcggcgaaaaaataatcatggataatcgccgtcaggtgttgcagcctgccgggtttgtcaccgatgcacacgctccggtaacgaacaatattgaaaccatgaaattcgtcccggttgtccccgcctgggtctttgttaaagcagagcccgtaccgttgcctaacccgctaatgggttatatggcttctggggctgatgggcatgttttccagcaaagtctgggggaaggtggacacggttatgcattgtgtctgagctgtggccgtgcggagtcgatgctgaatgaaaatgatgctccgaaaagtatggaagctcactatccaccgcgtccgggtaaagcggaccgcgacagccagaatcatcgtctgatttgcccaggttcgacggcactcatgaagaacgtcaccctgggcgcactggcgcgcaccgatgtctttgaaatggttctgcgcaaaccgcaaaaaggcgagtatctgccagataacacagaagaggggcggattgtcgctatgactctggcggttgctctgcgtcaggcgctagcgggcgttctgggtatctccggcgcagaactcggctattctgtacgcccggtcagactggaggatgggcaatcggtattagccgttcagctttatgatgtgatcagcggtggtgcaggttttgcctccagcgcaccggtacacattgaagctattttgcagggaatggtgaaacagttaggttgccgccattgtgatactgcatgtagtgaatgcctgcttgattcccagactcgccacgatcacgatttgctggatcgcaaagcggcgctggcctggcttggcgatgacttcacgtattacatcggtttaccggatgaagagacattctcgctgccggatgcccgctactgccctggcgctattggcgatacgattcgccgggcgattaacgaaggcgctgaaaagctcaccctgtggatgaccggcgcgcccaatgagtgggatttatacgcccgtcagttccgcgcggcggttcagagctatcggctaaaagacaacgtcgaggtcgatcttgttatacctgcgggagtggatgacccggatctgttgtatgaactatcgcaatttactgcgctgggtgtgcggctgtgccatgttgaacaggatctgcaattgccgatcgttgcccaggttacctttgccgatcgcgtgatgacgctggcttctcgcagccagcaggcaacgattccggggccggaggggcacctgaatgacgaactggtggtgcgtagtctcggttataaaacggtagaactgaacgagtttattctgccggctaaagccgccaacgctgtcgagcgggtcaaagacattcagatccacaaacagttgaatggaccactttcgcagtttggacaacgcttctgggacgtgctgtttaacgaccatgaagaagcacagtcactgatgaataacacgcgaattaccggcgttcactataccgatcgctatctgcaaaacccggttgcgctggcgttgttgggatcaattctgagaccgctaaaaacaaagctgaccgatgtcgctgaagtggcgctggatacgctgtttaaagataaagatcgccccggtaaccggcctttccatgactggatgagcatagcggattttcaggatttcgctgatcagtggtttgctgctgcgctgggcaggccgatagaactaacggtgttcgactcgccgcgcgatatccctcaccatcgtaaactgacggtgacttttgaggatggtcaggttttgaagatccgcttcgatcaggggatgggctactggcgtatcaactttgcatcgcaatggcattactttgacttccgcgatgacgtttctttccagttagtcaaaatggctcaggcctgcaatgaaggaaatgtggccaacagcgaagagagctgggcaacggatgtgctggtggaggtgagcgcctcctga

SEQ ID NO: 28691 - DNA, 1743 bp, Escherichia coli 2860650; identical to SEQ ID NO: 28683

SEQ ID NO: 28692 - DNA, 6273 bp, Escherichia coli 2866350
atgggcgttacaaacccgcagttgcgtgaacatctcgcgcaacaaatgggggctgattgtgggaaaccgggctcattccttgcttctccggtattccagcaaatgtttggatggaaggagtcaaatcacacgatgcgcagcctgacggaaggcaacgcattgttgagcaaagcagtggttgattcactggataatcagagtaatggccggtaccgatttggtgctgactggaagccttttacacaccagttagccagttggaaagctttgctggaaaagaaacattcagtggtggtaaccagtggtacgggttcaggtaaaacggaatgttttatggttccggtgctggaagatctttaccgggaactgcatgaaaatggcaacaatccgttggtcggtgtccgagccctttttctctatccattgaacgccttgattaattcacagcgcgagcgtctggatgcctggacgcgtggttttggtactggaatccgctactgcttgtataacggaaatacagaagagctccacgcaaaaatgaaaacagtgcaggataatagaccaaatgaagtcttatcccgtgaaaagatgcgtctggagccagccccgattctggtgaccaacggcacgatgctggaatatatgatggttcgccaggtcgacgccccgattatccagcaatccaaagcacaaaaatcactacgctggattgtactggatgaagcgcatacctatgtcgggtcgcaggccgctgaactggcactccagctgcgtcgtgtgatgacagcgtttggcgtgacgccagatgatgtgcgctttgtagcgacctctgcgaccattgccggcagcgacgccgaaaagcagctgaaaaaatttctctctgaattatccggtatcccgcaggagcgcatcgatgttctggacggaagtcgggtgattcctgaactggaaccatccaaaaacgtttctgttccgttagacgaaatagagcaaatacctgatctggatctaaaagataaaaatgataataaaattaaagggataagtcctgagcgcttttatgcgctcacgcactcccccgaagcacgttacatacgcgagatgttggtcaaacatcccaatccaatgaagctggatgagatgacagagcggttaaacatactgacaaaacagcatcacagccagcatgaagtactgcgttggatcgacgtctgttcagggacccaacctaatgcaaaggatcccgcatttcttaaagtcagggcgcatatcttccagcgtaatacccagggaatatgggcttgtgtggataaagattgcaggttaaagcacggtacaccgctcgaaaaaggctggccctttggctatgtatatgtgaaccagcgacaaaattgcgattgtggaagccctgtttacgaagtggcgttctgtaatgattgtaatgaacctcatcttctggcgcgggacaaaaagggcaaactagtccagtgggaaaataaaggtggcgatgaattctctttgcaggatgaagtacctgttgaacatgacgctacagcggaaaaagtcgaaaaagagaacagtttccagcctccgttgattattgccgcaggagagaccagcgaggccggttataccctacaacgcctcgaccgccagacgcgccgtattggcgttattaacaatgacagcattccgctgattattaatgatgttgaacaggtttgtagtgccagtggctgtggctacagaggcatgagtgggaaacagcccttccggcgtgcactattaggtgggccattttacgttactaatatcgtgcccaccgttctagagtattgtcaggactttaccagtgatgaaggcaaagagggcgtcggaccagattcgttgccaggacgaggtcgtcgactcatcacctttacagacagtcgacaagggacagcccgaatggcggtgcgtatgcagcaagaagcagaacgcagtcgcttacgcggaagcgtagtcgaaattctcagctggcatcaaaggacgcaaacgtctacagcgccgaatgccaatgccgatctggaaaaattagcgaccagggcgaagcaagcccgtgagcaggcagaagaatatcgaagctggggaatgccagaccaggcgaaattgtcacaagcgcaggctgaacagcttgaacaggcttatcagtttgcaatcggcggaaaagcagcaaccaccctagtatcccgcacctggactgaaatggttaacgagcttaaagataaagccgatatccgtggcccggttctgaaatataactactatttgaagcctgaagtgtttaatgaaaacggcgggcctctaaagctttctgaaatgttgttgttccgggaattcatgcgtcgccctaaacggactaacagcctggaaacacaggggctggttcaggttggttacctgggactggagaaaatacataagctccctatgcactggcaggaaagggaattaacgctggatgactggcgcgattttctcaaggttacgttggatcattacgttcgcgagagcaacttcacacagctggatgatgagctgaaaaactggattggtagccgtttttcatcaaaattcgtccgtaacccggaatcaaaagatcctgaagataatcagaatagacgctggcctcaaattcgtaatggcaacgtatcccatcgtttagcgaagttactgatgctgggggctggattcaaaaccgtcaatacggcgactattgatattatcaatacatggctgaaagaagcatgggcccaacttaccggaccgcttgcagtactgaaacccgatggcaaccgtttttatttaccgaaagagcatatgactttttctttaatcacggatgcctggatttgcccggtaaccaataaaatcctggatacggcttttaaaggcttaaccccttatctgcctacccatatttcgttcgagcatcttacccaggcgcaatatgacacttttgtcgcgcagaaagtcaccatgccggaaatctggaagctggatcgttcacaggaagactacgcagagggtctggcaaaagcacgcgactgggtcagcaatgatccgctgatcgcacaattgcggtcagaaaacgtctggacagacatcaacgatcgtgtcgtggaaggcggtttctactatcgcactgccgagcactctgcccagcagtcgtcagaacgcctgcaaagctatgaaaagatgttcaagaacgggcaactaaatgttctcaactgttccaccaccatggaaatgggggttgatatcgggggcattacagcggtggtaatgaacaatgtaccgccacatcctgccaactatttacagcgcgccgggcgagccgggcgtagtaaagagtcgcgtgcgatctcttacaccctatgcaaaggtaacccacacgaccaacaggtttttgccaacccgctctggccgtttgaaaccatgatcccggcacccatggtcgcgatgaactccgcccgactggtacaacgtcacgtcaatgcattattactgtccgactttttatgtaacgttattggcgaaaccgataaagagaaaaccagcctcgatagcctctggtttttcggtgaagatgacgggcagtcaaaatgcgaacgctttaaaatctggctggaacgcccggttcttgatatcgacacggcgctggaacggctggtgaaaggtacggcgttgcatggtgcaagagctgaacatctgcgggataaaacaatcagcgcgatcaccttcctgcaacagcggtggctctccgtttatcgcgatctcgtgacccaggagcgtgagtcgcagccacaaacgccttatcgtaagcgcatagagctggagaagaaacgacactgtggagagtatctgctgcgcgatctggctgccagaactttcctgccgggatacggcttcccgacagatgtagtgacgtttgataacttcacaatggaagattatatccgcgaaaaattgcaaaaaagtcgtgataaaaaggaccgtgaagataacgtctcccgttataaaggattaccttcccgtaacctcggtgttgccattcgtgaatatgcaccgggagcagagatcattcttgatggccgtgtcttccgctctgccggtgtctcactgcactggcacaatattaatgctgataccaatgaagcccagcgtctggattgtgcctggcgctgtcacaaatgcgggaccattggctatgaagaggggatgagcagttccgggatgctcttttgctccaatagcgcctgcggcgaaaaaataatcatggataatcgccgtcaggtgttgcagcctgccgggtttgtcaccgatgcacacgctccggtaacgaacaatattgaaaccatgaaattcgtcccggttgtccccgcctgggtctttgttaaagcagagcccgtaccgttgcctaacccgctaatgggttatatggcttctggggctgatgggcatgttttccagcaaagtctgggggaaggtggacacggttatgcattgtgtctgagctgtggccgtgcggagtcgatgctgaatgaaaatgatgctccgaaaagtatggaagctcactatccaccgcgtccgggtaaagcggaccgcgacagccagaatcatcgtctgatttgcccaggttcgacggcactcatgaagaacgtcaccctgggcgcactggcgcgcaccgatgtctttgaaatggttctgcgcaaaccgcaaaaaggcgagtatctgccagataacacagaagaggggcggattgtcgctatgactctggcggttgctctgcgtcaggcgctagcgggcgttctgggtatctccggcgcagaactcggctattctgtacgcccggtcagactggaggatgggcaatcggtattagccgttcagctttatgatgtgatcagcggtggtgcaggttttgcctccagcgcaccggtacacattgaagctattttgcagggaatggtgaaacagttaggttgccgccattgtgatactgcatgtagtgaatgcctgcttgattcccagactcgccacgatcacgatttgctggatcgcaaagcggcgctggcctggcttggcgatgacttcacgtattacatcggtttaccggatgaagagacattctcgctgccggatgcccgctactgccctggcgctattggcgatacgattcgccgggcgattaacgaaggcgctgaaaagctcaccctgtggatgaccggcgcgcccaatgagtgggatttatacgcccgtcagttccgcgcggcggttcagagctatcggctaaaagacaacgtcgaggtcgatcttgttatacctgcgggagtggatgacccggatctgttgtatgaactatcgcaatttactgcgctgggtgtgcggctgtgccatgttgaacaggatctgcaattgccgatcgttgcccaggttacctttgccgatcgcgtgatgacgctggcttctcgcagccagcaggcaacgattccggggccggagtggcacctgaatgacgaactggtggtgcgtagtctcggttataaaacggtagaactgaacgagtttattctgccggctaaagccgccaacgctgtcgagcgggtcaaagacattcagatccacaaacagttgaatggaccactttcgcagtttggacaacgcttctgggacgtgctgtttaacgaccatgaagaagcacagtcactgatgaataacacgcgaattaccggcgttcactataccgatcgctatctgcaaaacccggttgcgctggcgttgttgggatcaattctgagaccgctaaaaacaaagctgaccgatgtcgctgaagtggcgctggatacgctgtttaaagataaagatcgccccggtaaccggcctttccatgactggatgagcatagcggattttcaggatttcgctgatcagtggtttgctgctgcgctgggcaggccgatagaactaacggtgttcgactcgccgcgcgatatccctcaccatcgtaaactgacggtgacttttgaggatggtcaggttttgaagatccgcttcgatcaggggatgggctactggcgtatcaactttgcatcgcaatggcattactttgacttccgcgatgacgtttctttccagttagtcaaaatggctcaggcctgcaatgaaggaaatgtggccaacagcgaagagagctgggcaacggatgtgctggtggaggtgagcgcctcctga

SEQ ID NO: 28693 - DNA, 687 bp, Escherichia coli 2866350; identical to SEQ ID NO: 28689

SEQ ID NO: 28694 - DNA, 6315 bp, Escherichia coli 2886-75; identical to SEQ ID NO: 28464

SEQ ID NO: 28695 - DNA, 2937 bp, Escherichia coli 2886-75; identical to SEQ ID NO: 28445

SEQ ID NO: 28696 - DNA, 6315 bp, Escherichia coli 3.4870; identical to SEQ ID NO: 28464

SEQ ID NO: 28697 - DNA, 2937 bp, Escherichia coli 3.4870; identical to SEQ ID NO: 28445

SEQ ID NO: 28698 - DNA, 6315 bp, Escherichia coli 3.4880; identical to SEQ ID NO: 28464

SEQ ID NO: 28699 - DNA, 2937 bp, Escherichia coli 3.4880; identical to SEQ ID NO: 28445

SEQ ID NO: 28700 - DNA, 6315 bp, Escherichia coli 3-475-03_S1_C1
atggacgttcagcaactgcattatgcgccacttctaaatcagcttcatcagcgcgcggtgaggtcggtggtaagtcagttggcattgcggagcaagtcgttgactcattatctggaatcacaatatttccagcctcccggtcaggaggggtcactgcttgcagacccggtattcgaaagcacgttcggctggatgcctgcggatgaaacaatggaggatttgcgggacaagctaatttccagcccgctggttgatgcattgagcaaagcgccggtgccatttcgtcatcaacttacggcgtggcgaacgattctggaagacaaaaaatccttgttagtgagcagcggtacgggatccgggaaaacagaatgctttatggtaccggttctggaagatcttattcgtcagcaaaaatcgacccgtcagtcactaacagggacacaagctattttcttgtatccgttaaatgcattaattaacagccaacaggagcggcttcgcgaatggacgcgcggatttaaggggaaaatacgcttcgcgctatataatggcgaaacccggcataccaaatacgaagttcaggaagatcagttgaaagtacctgaacaagctttgagtcgggaagccatttacgaagcaccaccttccatcatggtgacgaataccaccatgctggaatatatgctgattcgtcgtaaagatgccccaatcatcgaaaagtctcaggggatgttaaagtatatcgtcctggatgaagcccatagttatattggttctcaggctgctgagttagcgctgcttttacgtcgtgttatgcaggctttcaatgttggacctggcacagataaacctgtgcagattatcgcgacctctgccactattggtgaagactctcctgaaggtaataaggagcttgctaaatttgtcgctgatcttgcgggcgttacagaacgtgatgtcaaagtggttcgcggctatcgacaaataccgcgggtatcggagtcgctgattcgtcatgaatatcccacatctttaacttctcttaaatctttgagccctcaggatctttaccaacagctttgtcattaccgtgtggcccagcaattgcgtcaggcgttaactcatcccggacggcaggcagtacgtttgagtgagttgctcaatgttgccagaagaacctggccagatattaatcaccgtgagttactgcaactcctcgacctaatggcgagatcgcgagaaggtgaactggcttttacgccattacgtatgcatgggtttatcagaacactggcgggtctatgggcatgttcaaacaaacaatgctcacataaagcgcatgaattaaatcagagtgactggccatttggtcaggtatggtttgagcagcgccaatattgtgactgtggtgcgccggtatttgaagttttacgttgctccgggtgtggttcagcttatttgtctgccaaagaggaggtgcgcggtgatggaacgaactggttggtagcgcaacccgctgctgccgaagtggatgaatttgctcttgatgtggatgtttattctgaagatgaagacaacgatgaattagacaataactctcaatttgatcgtctgattgcgatcgatggtgaaaaatatatcatttcactggaagaaacgacggcggggaaaattgatagtgaagcgcaaaagcactatgaaataaacctgttaagaccggagtctcgaggtgagggacgtaataattcctttgcttgtgtttgctgtggtgacacccaacgaaaaaataatcctttattccgtccgcttcgacttggcgcgcccttttttttaaatgaaattattcctactctgctggagttttcaccattaccgcagacaagagaagagcagttaggaccgtttaatggtcgacgtctgctcacctttacggattcacgtcagggcactgcccgcatttctgcccgcttacagcaggatgccgataaagcgacgttgcgagctctttgttaccaggagttggcaaatattaatgagccatcagcaaagctcagcccggcacactgcgcattgttagagagttttattacccagttttctatccttcctttaaaaaactctattgacgcgctgaaaaaagcgatggttgctaatgaagagcttagcccggcggacattcaggcacttaaaattatcgagccgatggtgagttccttaagcccggatcatgctgaagcgatgcaaatactccaggctaactctggcaatcagcagaagaaaaccatgtcatggcaaacactgtctgaacagctggttggcagtgtggaccttgccgatagaatgagaggcagttttaaagaattgtctgggcttgatcttactaaacaacagtttgcagatttttgtttatacagtgagtttggtcgccgccctaaaaatgcctggaccctcgaaagtctgggtctggtagccattcactatccatttattgataaagttacaacctgcccgcaggactggaagacattattacccgatcccgataagcaattagcggaatggcgtaatttattgaagattactcttgatttctttatacgtgaaaacagtgccgttttttacgaaaacgagcaataccctcgctggatgggggctcgtttcccggtaaaaatgctccagggtccagataaaaaaaacaaagggcagaaacgtgatcaactttggccacaaatacgcgatcgccattataaccgggtcattaagctattaattgcagtctttccggcaatacaacctgagcaggctcactggaaatcgttagttaaccacttaatgattgaggtctgggatgcaattcgaccctgcttacgtcagtttgagtcgggttatcagctggatattaaacaacaagctgaattttacagtccaaagcaagtgtggcgttgcccctatactcgacgtgcgttagacgtcacgttactgggatactctccgtatttaccgggtagcaaagaaattgcacctgaaaaagctgtgttgattgaaatgcctgagcttcctgtacgtcactggcgtttgtctggtggtggagaaatcgcccgagaagaacgtctggagtggctggaaagtaatgcgctgattcaacatgcccgcgaggaaggattatggtctactcgcagcgaccgactggccctgaaagatagctggtatcgtctggaggaacactctgcgcagagaacgcctgagcagaaccagtttaatgaaaaacaatttaagtcaggcaaagttaatgtgctgaactgctccacgaccatggagatgggggtggatattggtggtatgagtttggtggcaatgaacaacgttcctccagctccggcaaattatttgcaacgtgcaggtcgcgcggggcgtcgtggagagagtgcatctgctgccattacgttatgtaaaaacacggcgcatggaatggaggtattcaaagaccccctctgggcgttcaacactactgccagtgcgccacgggttcgttttgggagcagtagtattgttcaacgacatgttaatgccctggttttaggtctgtttttacgagctgaagttcctgatgcgacaaaactgagttgcaaatggttctttgaaggtgatgagagccagtgtcttcgttttctccattggttaaatcaccaggccgatcagctggcggataaacttaaacgccttactcagggaaccgtcctgatgtcattgacggcaacccagctcttgacccgcacacaagcaatgatgcagcaggttgatatccgctggagaagccaacttgcgatactgttggaaaatatcgaagcgttgaaagcggataacagcgcgtgggaagaaacgccagcaggtaaagccatcgcttatcagcttcgtgattatcgcggtgcatatctgttttctaaactcattagtgaagcgttcctgccggggcatggtttcccggttggcgtcgtcaatttcaattatctgacggcagatgagctggaaaaacgtcgcgcaataaaagctactcaggctgaccctaatgaagggggagaaagcttttctcgtcgtattgaaaaattgcccagccgtgatttgcctacagcattacgcgagtatgctccaggtgcagatgtggtattgggcggaaaagtatatcgttcctcgggcattatgcttggcaaggtacttgccagcgggcaggagctgtcaggcgatcatcatattccgtggttctggcattgtcgtaaatgtggtgcgggggcaaccagtactacccgtcctgtcgaatgtagtcactgcaaagcggatatacagcaacttgatgtgaagcgttatttacagcctgttggttttgcgacagatatccgttatcaggcgcataatgatgtatccatgcctgcacaacttccctggaaagatccacgtgttcttgtaccgtcttcggtgtgggtttctttacccgatgctgggctaggacgttaccgttttagccatagtggggaattgttccacttcagtgaaggggaatttgggcacggctacgcaatttgcctctcatgtggtcgggcagaatctcaaaatcaaccccagcgtacccctgaaaatcttaagaacccagagagggaaaatacgcattacctgttgcgagggggcagtaacgatcgtcaggggagcaataaattgtgccacggtcatgtgcataaagatctgtggttggggtatagcagtcgtacagatatggttgagctgcaactcaatgatgataatggcctgttgatccgtgatgaggttgccgcgcgatcccttgcggtcgctttgcgtgaagggttagcgcataaattgggtatcgaaaatactgagctgggcgtgacgacgcagcaagcgcgcgatatcaatggctataccggatattccatcttcatttacgacaataatgcgggtggtgcaggttatgcagtgcaattgatcgaccattgggctgatgtctttaattacgccagaaaattgctcgattgcagttgcgataaattctgtcaccactgcttgctcagctacgacagtcagcattatgtcaacagattagatcgtcaccatgcattaaccctgcttaccaatgtacggttgcagcgacttaacctcgcgccagaatatcagtacttcggcgatggtagccgggttgaaactaacccgctgagtttacgtattgcgcaatgcctgaacagcgagatttatgactcctgctcgctggttcttgcggggccgcaggaacagtgggattttgcccaatggccattatttaaagagttgctccagtttgcctcctccggtgggcatgttgagttgctggtggccacgccgttggcaaacttaactgatagctccagacatcagctttccgcgttggcggcgatgccgggagggcgcttacaagtgaaatccattgccactgcgcaactcatgcaaggaaaggggcgctggcttgcgcaggtgactcgcgaagggcaaagccaacagtgggccgcagacgacagcgctaccgttgcacctggtgaattatggggacaaagtgcgtcctcaccagtagtgacacttaaaggaacgtccggaaaaaccttctcgggtcagaccttaagtgcagaagatttactgcccgccttacccaccggggcggtgcgcatcaacctctgcgagcaactggacgggccgctggaagggtttggttcgcgtttctggtcgttagtcacgcaacagcacgctggctggaagcaggcatttacccgccacaaagagataacgcatgttgagtacagcgatcgttatcttaatagcccattcacggcgcgtttgttaggtgaaatcttaactgagctggttgaacagggaatggcggaacgtgccagcctcactgtttgcgtcaaaaaattggattacaattctcgccaacacgacgctctctataacgcgtggcttaatgaggaagatcgtcagcaggttgtgaccactttacttgaagaaggatatctggggccagcgtggccgggagcaattagctggttaacgggggataaccagagtatggagcatggacgagaactgacagtcaccttcagcgatggcagtcagcattatgtcctgctcgacatggggcttagctactggcgctgtattgaagacaccttctttgattttgctctacgagtaccgcagcaagttgaacggctggcaaacacgcgagcgcgagctgttgccccgggtaatgaccttaggagttatgttatcgctggataa

SEQ ID NO: 28701 - DNA, 3360 bp, Escherichia coli 3-475-03_S1_C1
ttgcttgtgaaaactccagttaacccacttttgcaatggcttaacatgttttttagtcgccgttcattatccggagctgatggacgggcgttatatgcttaccgttgtactgatacagagtacgaaagtttggcagaactactgcgtacatatgcccctcgtagttatccaagaacgatattcatttcctatagcgatgttctatttagcatatatgccgcagagtttatccgccggactcatacggtcggacaccctaaatgggacacaattttagattctattgactggaaagttccgtatgttcatcgacagaagctggttaatgatggcattcgctactggaaaagaaagataagaaacctggggcaagcttcgggttatctgcatacactggcttgtgaaggtggtttacctatccgcatgattgaaaatgagagcggttatttgattacctatttcagaaggatatatcaggcgcttcgtgggcaagcatctcaatatcctgccgctaaaattgcacaagaattaggcgatacgattcctgtcacaatgcaaaacgaactggtctatgaaatagccggtgaattctgcgagactctctgccgattacttagtgagcatccacctcaaagcagtgatcccgtttctgcattacgtaagctctctccagactggcatcttcaacttccactcgttctccccgaagcgaatgctgcagagattgtaaggcgattactttctcaatcttctgaaatacgcagtgcaagtagtcttcaggttgaaagaatctgggtcgatgttgatgacagttggtattgtgatgcccggttccgattcccggccacaatgcgtacagaacagttaacctctttgtttgaatgccatattcagccggagcagacccgactcatcatttcaggaaaatggaaaaatggcggggcaaggttggcaatgctaagccgttatgagcagcaagattggcgggtcgagttattacctattgcgatgcaaaaactctctggtgcagatgcaatggccgaaatctcattgtcgcttcatgaaggtccaattctgttaggtcacacaattccaaaaggcggttatgaacttactgaagaacttccctgggtttttgaagcgatgaatgagagtgaatcgcagctaaaacttgttggtatggggtctgtgagttccaggctaaatgctctgtttatttcgctaccgaaaaatagccatttagatattagtggagaaggtgagtttgatatcccaaggttgctgaaaaacagtgaacgtagcttaactaaaataagtggagtatttagcgttgttttacatgatggtgcagtttgtacaattcgcacccagcaactttatgattctgcgattgaatattatattaaatcgacagaagttgaactggttaaatcggattatcctgtccatcgagcctggccgaagatcggttggaaaaaggatctgcaatatggcattgtaccggagaaagaacttttttggcgttccattcgttcaggtaacaatgcctggtattctgtcgcatcagaaatgccaaaaggacagatagaagtccggcgaatagttaatgatgaggttttatttagcggtaaagttgtagttttaccagcagacttcgatattaatattatacctgagagtgctcagcaaggcattattatactttctggtataacggatactagaattgataaatattcaaacaatgaaaaagtaacacttaagtccgattattcacaaaacgagtgtgctatttattataattcatcgctgatgctggaaaataccgttgatttacgggtctcctggaaagatggttctaatcttaaactattattacctaagccggttagcggtggccgatttgtaactaatgatggttctgttcattttgatggtgtggcatctatagcacatttgcatggaatagatgctgagttattaaccatatcatgtgctggaagaggatatcttaatatcgagttattggatgaaaatccagtagctgaaaaattccgttatttacatgccgaccttcctcttttatcaggacgcaatgacaaattacaacaaatttcactttatgagaactataatttgctaaattctatgctggcatgtgcatggaacagcaatagtacattatgtgttgatttttactctgacagatttggaaaggataaagcaacactcaatattaaacgctacgatggtagttttattgaacacgatcaagggttactggttgatataaaaaattctgttgtttttcctgcaaatagaatagacgagctggttgttgatgctatttctcttaaggatcctggcttacacatatcgttgctaaaaaaagatgaatttgcttatgatctttcagctctgaatgttcaggatagcccatggttaattgtggggaaacttgatgatacagctcgcattgcaccagtaattaaatgggggctacctgtattacagacaaatgatttattacttaatgctctatgcgaagcggattccgaacagcgaaaaaaatattttaatgagctaatttttgaaatagataacaatcctttgcaaaattattgctgtttattaacggagtatattaagaaatacaaaatgaataatggcttatccttgctggatctggatttgttcagaggtatttcgagtaattaccgcgtagttgttcagttgttaatatcatcatgtctttctggtgatagcgatacgatttatgatatacaggacgaattacccttttcatggggatggattcccgtttcaatctggaaagatgtttttcaaaagtgttgggcttatctggaaaaacagattaacgataaaacattagcattacatatattgcaaccctttattgcttttatgaaccatcgtgcacatatcgatcgtcgtctgactcccattgcgaatatgttacttacatatggcgaactcctaccagccggttgtaatgtcttgccaactgttagtcgtgagcagtttaatgaagctaaacagatgctattaaggaatcccgacagctttgggcgtatcagtatcttccctaaagaactttggtctagtgctattactccagagttaaaatctgtttttaataagctttggattgaagataaatatcactcacggcttgaaaaacgttttaatttgatgttagtcgcagcgctgttaacccaaaaagataataacttgatacatcaattgtctgcgctttttgaattccactatcagcaagccccgcagcaattaggggtaatctatcaatattattttgaacaagcaggagtatgtcattga

SEQ ID NO: 28702 - DNA, 6315 bp, Escherichia coli 3-475-03_S1_C2
atggacgttcagcaactgcattatgcgccacttctaaatcagcttcatcagcgcgcggtgaggtcggtggtaagtcagttggcattgcggagcaagtcgttgactcattatctggaatcacaatatttccagcctcccggtcaggaggggtcactgcttgcagacccggtattcgaaagcacgttcggctggatgcctgcggatgaaacaatggaggatttgcgggacaagctaatttccagcccgctggttgatgcattgagcaaagcgccggtgccatttcgtcatcaacttacggcgtggcgaacgattctggaagacaaaaaatccttgttagtgagcagcggtacgggatccgggaaaacagaatgctttatggtaccggttctagaagatcttattcgtcagcaaaaatcgacccgtcagtcactaacagggacacaagctattttcttgtatccgttaaatgcattaattaacagccaacaggagcggcttcgtgaatggacgcgcggatttaaggggaaaatacgcttcgcgctatataatggcgaaacccggcataccaaatacgaagttcaggaagatcagttgaaagtacctgaacaagctttgagtcgggaagccatttacgaagcaccaccttccatcatggtgacgaataccaccatgctggaatatatgctgattcgtcgtaaagatgccccaatcatcgaaaagtctcaggggatattaaagtatatcgtcctggatgaagcccatagttatattggttctcaggctgctgagttagcgctgcttttacgtcgtgttatgcaggctttcaatgttggacctggcacagataaacctgtgcagattatcgcgacctctgccactattggtgaagactctcctgaaggtaataaggagcttgctaaatttgtcgctgatcttgcgggcgttacagaacgtgatgtcaaagtggttcgcggctatcgacaaataccgcgggtatcggagtcgctgattcgtcatgaatatcccacatctttaacttctcttaaatctttgagccctcaggatctttaccaacagctttgtcattaccgtgtagcccagcaattgcgtcaggcgttaactcatcccggacggcaggcagtacgtttgagtgagttgctcaatgttgccagaagaacctggccagatattaatcaccgtgagttactgcaactcctcgacctaatggcgagatcgcgagaaggtgaactggcttttacgccattacgtatgcatgggtttatcagaacactggcgggtctatgggcatgttcaaacaaacaatgcttacataaagcgcatgaattaaatcagagtgactggccatttggtcaggtatggtttgagcagcgccaatattgtgactgtggtgcgccggtatttgaagttttacgttgctccgggtgtggttcagcttatttgtctgccaaagaggaggtgcgcggtgatggaacgaactggttggtagcgcaacccgccgctgccgaagtggatgaatttgctcttgatgtagatgtttattctgaagatgaagacaacgacgaattagacaataactctcaatttgatcgtctgattgcgatcgatggtgaaaaatatatcatttcactggaagaaacgacggcggggaaaattgatagtgaagcgcaaaagcactatgaaataaacctgttaagaccggaatctcgaggtgagggacgtaataattcctttgcttgtgtttgctgtggtgacacccaacgaaaaaataatcctttattccgtccgcttcgacttggcgcgcccttttttttaaatgaaattattcctactctgctggagttttcaccattaccgcagacaagagaagagcagttaggaccgtttaatggtcgacgtctgctcacctttacggattcacgtcagggcactgcccgcatttctgcccgcttacagcaggatgccgataaagcgacgttgcgagctctttgttaccaggagttggccaatattaatgagccatcagcaaagctcagcccggcacactgcgcattgttagagagttttattacccagttttctatccttcctttaaaaaactctattgacgcgctgaaaaaagcgatggttgctaatgaagagcttagcccggcggacattcaggcacttaaaattatcgagccgatggtgagttccttaagcccggatcatgctgaagcgatgcaaatactccaggctaactctggcaatcagcagaagaaaaccatgtcatggcaaacactgtctgaacagctggttggcagtgtggaccttgccgatagaatgagaggcagttttaaagaattgtctgggcttgatcttactaaacaacagtttgcagatttttgtttatacagtgagtttggtcgccgccctaaaaatgcctggaccctcgaaagtatgggtctggtagccattcactatccatttattgataaagttacaacctgcccgcaggactggaagacattattacccgatcccgataagcaattagcggaatggcgtaatttattgaagattactcttgatttctttatacgtgaaaacagtgccgttttttacgaaaacgagcaataccctcgctggatgggggctcgtttcccggtaaaaatgctccagggtccagataaaaaaaacaaagggcagaaacgtgatcaactttggccacaaatacgcgatcgccattataaccgggtcattaagctattaattgcagtctttccggcaatacaacctgagcaggctcactggaaatcgttagttaaccacttaatgattgaggtctgggatgcaattcgaccctgcttacgtcagtttgagtcgggttatcagctggatattaaacaacaagctgaattttacagtccaaagcaagtgtggcgttgcccctatactcgacgtgcgttagacgtcacgttactgggatactctccgtatttgccgggtagcaaagaaattgcacctgaaaaagcagtgttgattgaaatgcctgagcttcctgtacgtcactggcgtttgtctggtggtggagaaatcgcccgagaagaacgtctggagtggctggaaagtaatgcgctgattcaacatgcccgcgaggaaggattatggtctactcgcagcgaccgactggccctgaaagatagctggtatcgtctggaggaacactctgcgcagagaacgcctgagcagaaccaatttaatgaaaaacaatttaagtcaggcaaagttaatgtgctgaactgctccacgaccatggagatgggggtggacattggtggtatgagtttggtggcaatgaacaacgttcctccagctccggcaaattatttgcagcgtgcaggccgcgcgggtcgacgtggagagagtgcatctgctgccattacgttatgtaaaaacacggcgcatggaatggaggtattcaaagaccccctctgggcgttcaacactactgccagtgcgccacgggttcgttttgggagcagcagtattgttcaacgacatgttaatgccctggttttaggtctgtttttacgagctgaagttcctgatgcgacaaaactgagttgcaaatggttctttgaaggtgatgagagccagtgtcttcgttttctccattggttaaataaccaggccgatcagctggcggataaacttaaacgccttactcagggaaccgtcctgatgtcattgacggcaacccagctcttgacccgcacacaagcaatgatgcagcaggttgatatccgctggagaagccaacttgcgatactgttggaaaatatcgaagcgttgaaggcggataacagcgcgtgggaagaaacgccagcaggtaaagccatcgcttatcagcttcgtgattatcgcggtgcatatctgttttctaaactcattagtgaagcgttcctgccggggcatggtttcccggttggcgtcgtcaatttcaattatctgacggcagatgagctggaaaaacgtcgcgcaataaaagctactcaggctgaccctaatgaagggggagaaagcttttctcgtcgtattgaaaaattgcccagccgtgatttgcctacagcattacgcgagtatgctccaggtgcagatgtggtattgggcggaaaagtatatcgttcctcgggcattatgcttggcaaggtacttgccagcgggcaggagctgtcaggcgatcatcatattccgtggttctggcattgtcgtaaatgtggtgcgggggcaaccagtactacccgtcctgtcgaatgtagtcactgcaaagcggatatacagcaacttgatgtgaagcgttatttacagcctgttggttttgcgacagatatccgttatcaggcgcataatgatgtatccatgcctgcacaacttccctggaaagatccacgtgttcttgtaccgtcttcggtgtgggtttctttacccgatgctgggctaggacgttaccgttttagccatagtggggaattgttccacttcagtgaaggggaatttgggcacggctacgcaatttgcctctcatgtggtcgggcagaatctcaaaatcaaccccagcgtacccctgaaaatcttaagaacccagagagggaaaatacgcattacctgttgcgagggggcagtaacgatcgtctgggtagcaataaattgtgccacggtcacgtgcataaagatctttggttggggtatagcagtcgtacagatatggttgagctgcaactcaatgatgataatggcctgttgatccgtgatgaggttgccgcgcgttcccttgcggtcgctttgcgtgaagggttagcgcataaattgggtatcgaaaatactgagctgggcgtgacgacgcagcaagcgcgcgatatcaatggctataccggatattccatcttcatttacgacaataatgcgggtggtgcaggttatgcagtgcaattgatcgaccattgggctgatgtctttaattacgccagaaaattgctcgattgcagttgcgataaattctgtcaccactgcttgctcagctacgacagtcagcattatgtcaacagattagatcgtcaccatgcattaaccctgcttaccaatgtacggttgcagcgacttaacctcgcgccagaatatcagtacttcggcgatggtagccgggttgaaactaaccctctgagtttacgtattgcgcaatgcctgaacagcgagatttatgactcctgctcgctggttcttgcggggccgcaggaacagtgggactttgcccaatggccattatttaaagagttgctccagtttgcctcctccggtgggaatgttgagttgctggtggccacgccgctggcaaacttaactgatagctccagacatcagctttccgcgttggcggcgatgccgggaggtcgcttacaagtgaaatccattgccactgcgcagctcatgcaaggaaaggggcgctggcttgcgcaggtgactcgcgaagggcaaagccaacagtgggccgcagacgacagcgctaccgttgcacctggtgaattatggggacaaagtgcgtcttcaccagtagtgacacttaaaggaacgtccggaaaaaccttctcgggtcagaccttaagtgcagaagatttactgcccgccttacccaccggggcggtgcgcatcaatctctgtgaacaactggacgggccgctggaaggttttggttcgcgtttctggtcgttagtcacgcaacagcacgctggctggaagcaggcttttccccgccacaaagagataacgcatgttgagtacagcgatcgttatcttaatagcccattcacggcgcgtttgttaggtgaaatcttaaccgagctggttgaacagggaatggcggaacgcgccagcctcactgtttgcgtcaaaaaattggattacaactctcgccaacacgacgctctctataacgcgtggcttaatgaggaagatcgtcagcaggttgtgaccactttacttgaagaaggatatctggggcctgcgtggccgggagcaattagctggttaacgggggataaccagagtacggagcatggacgagaactgacagtcaccttcagcgatggcagtcagcattatgtcctgctcgacatggggcttagctactggcgctgtattgaagacaccttctttgattttgctctgcgagtaccgcagcaagttgaacggctggcaaacacgcgagcgcgagctgttgcctcgggtaatgaccttaggagttatgttatcgctggataa

SEQ ID NO: 28703 - DNA, 3360 bp, Escherichia coli 3-475-03_S1_C2; identical to SEQ ID NO: 28649

SEQ ID NO: 28704 - DNA, 6315 bp, Escherichia coli 4-203-08_S3_C2
atggacgttcagcaactgcattatgcgccacttctaaatcagcttcatcagcgtgcggtgaggtcggtggtaagtcagttggcattgcggagcaagtcgttgactcattatctggaatcacaatattttcagcctcccggtcaggaggggtcactgcttgcagacccggtattcgaaagtacattcggctggatgcctgcggatgaaacaatggaggatttgcgggacaagctgatctccagcccgctggttgatgcattgagcaaagcgccagtgccatttcgtcatcaactcactgcgtggcgaacgattctggaagacaaaaaatccttgttagtgagcagcggtacgggatccgggaaaacagaatgctttatggtacctgttctggaagatcttattcgtcagcaaaaatcgccccgccagtcactaacagggacacaagctattttcttgtatccgttaaatgcattaattaacagccaacaggagcggcttcgcgaatggacgcgcggatttaaggggaaaatacgcttcgcgctatataatggcgaaacccggcataccaaatacgaaattcaggaagatcagttgaaagtacctgaacaagctttgagtcgggaagccatttatgaagcaccaccttccatcatggtgacgaataccaccatgctggaatatatgctgattcgtcgtaaagatgccccaatcatcgaaaagtctcaggggatgttaaagtatatcgtcctggatgaagcccatagttatattggttctcaggctgctgagttagcgctgcttttacgtcgtgttatgcaggctttcaatgttggacccggcacagataaacctgtgcagattatcgcgacctctgccactattggtgaagactctcctgaaggtaataaggagcttgctaaatttgtcgctgatctcgcgggcgttacagaacgtgatgtcaaagtggttcgcggttatcgacaaataccgcgggtatcggagtcgctgattcgtcatgaataccccacatctttaacttctcttaaatccctgagccctcaggatctttaccaacagctttgtcattaccgtgtggcccagcaattgcgtcaggcgttaactcatcccggacggcaggcagtacgtttgagtgagttgctcaatgttgccagaagaacctggccagatattaatcaccgtgagctactgcaactcctcgatctaatggcaagatcgcgagaaggtgaactggcttttacgccattacgtatgcatgggtttatcagaacactggcgggtctatgggcatgttcaaacaaacaatgctcacataaagcacatgaattaaatcagagtgactggccatttggtcaggtatggtttgagcagcgccaatattgtgactgtggtgcgccggtatttgaagttttacgttgctccgggtgtggttcagcttatttgtctgccaaagaggagatgcgcggtgatggaacgaactggttggtagcgcaaccagccgctgccgaagtggatgagtttgctcttgatgtagatgtttattctgaagatgaagacaacgacgaattagacaataactctcaatttgatcgtctgattgcgagcgatggtgaaaaatatatcatttcactggaagaaacgacggcggggaaaattgatagtgaagcgcaaaagcactatgaaataaacctgttaagaccggaatctcgaggtgagggacgcaataactcctttgcttgtgtttgctgtggtgacactcaacggaaaaataatcctttattccgtccgcttcggctcggtgcgcccttttttttaaatgaaattattcctactctgctggagttttctccattaccgcaaacaagagaagagcagttaggaccgtttaatggtcgacgcttgctcacctttacggattcgcgtcagggtaccgctcgcatttcagcccgcttacagcaggatgccgataaagcgacgttgcgagctctttgttaccaggagctggcaaatattacagagccttcagcaaaactcagcccggcacactgtgcactgttagagaaagttattagccagttttctgtcctccctttaaaaaattccatcgacgcgctgaaaaaagcgatggctgcgaatgaggagcttagcccgacggacattcaggcacttaaaattattgagccgatggtgagttccttaagcccggatcatgctgaagcgatgcaaatacttcaggctaactctggcaatcagcagaagaaaaccatgtcatggcaaacgctgtctgaacagctggttggcagtgtggaccttgccgatagaatgagaggcagttttaaagaattgtctgggcttgatcttactaaacaacagtttgcagatttttgtttatacagcgagtttggtcgccgccctaaaaatgcctggaccctcgaaagtcttggtctggtagccattcactatccatttattgataaagttacaacctgcccgcaggactggaagacattattacccgatcccgataagcaattagcggaatggcgtaatttattgaagattactcttgatttctttatccgtgaaaacagtgccgttttttacgaaaacgagcaataccctcgctggatgggggcacgtttcccggtaaaaatgctccaggggccagataaaaaaaacaaagggcagaaacgtgatcaactttggccacaaatacgcgatcgccattataaccgggtcattaagctattaatcgcagtctttccggcaatacaacctgagcaggctcactggaaatcgttagttaaccacttaatgattgaggtctgggatgcaattcgaccctgcttacgtcagtttgagtcgggttatcagctggatattaaacaacaagctgaattttacagtccaaagcaagtgtggcgttgcccctatactcgacgtgcgttagacgtcacgttgctgggatactctccgtatttgccgggtagcaaagaaattgcacctgaaaaagcagtgttgattgaaatgcctgagcttcctgtacgtcactggcgtttgtctggtggtggagaaatcgcccgagaagaacgtctggagtggctggaaagtaatgcgctgattcaacatgcccgcgaggaaggattatggtctactcgcagcgaccgactggccctgaaagatagctggtatcgtctggaggaacactctgcgcagagaacgcctgagcagaaccagtttaatgaaaaacaatttaagtcaggcaaagttaatgtgctgaactgttccacgaccatggagatgggggtggatattggtggtatgagtttggtggcaatgaacaacgttcctccagctccggcaaattatttgcagcgtgcaggccgcgcgggtcgacgtggagagagtgcatctgctgccattacgttatgtaaaaacacggcgcatggaatggaggtattcaaagaccccctctgggcgttcaacactactgccagtgcgccacgggttcgttttgggagcagcagtattgttcaacgacatgttaatgccctggttttaggtctgtttttacgagctgaagttcctgatgcgacaaaactgagttgcaaatggttctttgaaggtgatgagagccagtgttttcgttttctccattggttaaatcaccaggccgatcagctagcggataaacttaaacgccttactcagggaaccgtcctgatgtcattgacggcaacccagctcttgacccgcacacaagcaatgatgcagcaggttgatatccgctggagaagccaacttgcgatactgttggaaaatatcgaagcgttgaaggcggataacagcgcgtgggaagaaacgccagcaggtaaagccatcgcttatcagcttcgtgattatcgcggtgcatatctgttttctaaactcattagtgaagcgttcctgccggggcatggtttcccggttggcgtcgtcaatttcaattatctgacggcagatgagctggaaaaacgtcgcgcaataaaagctactcaggctgaccctaatgaagggggagaaagcttttctcgtcgtattgaaaaattgcccagccgtgatttgcctacagcattacgcgagtatgctccaggtgcagatgtggtattgggcggaaaagtatatcgttcctcgggcattatgcttggcaaggtacttgccagcgggcaggagctgtcaggcgatcatcatattccgtggttctggcattgtcgtaaatgtggtgcgggggcaaccagtactacccgtcctgtcgaatgtagtcactgcaaagcggatatacagcaacttgatgtgaagcgttatttacagcctgttggttttgcgacagatatccgttatcaggcgcataatgatgtatccatgcctgcacaacttccctggaaagatccacgtgttcttgtaccgtcttcggtgtgggtttctttacccgatgctgggctaggacgttaccgttttagccatagtggggaattgttccacttcagtgaaggggaatttgggcacggctacgcaatttgcctctcatgtggtcgggcagaatctcaaactcaaccccagcgtacccctgaaaatctaaagaacccagagagggaaaatacgcattacctgttgcgagggggcagtaacgatcgtcaggggagcaataaattgtgccacggtcatgtgcataaagatctgtggttgggatatagcagtcgtacagatatggttgagctgcaactcaatgatgataatggcctgttgatccgtgatgaggttgccgcgcgttcccttgcggtcgctttgcgtgaagggttagcgcataaattgggtatcgaaaatactgagctgggcgtgacgacgcagcaagcgcgcgatatcaatggctataccggatattccatcttcatatacgacaataatgcgggtggtgcaggttatgcagtgcaattgatcgaccattgggctgatgtctttaattacgccagaaaattgctcgattgcagttgcgataaattctgtcaccactgcttgctcagctacgacagtcagcattatgtcaacagattagatcgtcaccatgcattaaccctgcttaccaatgtacggttgcagcgacttaacctcgcgccagaatatcagtacttcggcgatggtagccgggttgaaactaaccctctgagtttacgtattgcgcaatgcctgaacagcgagatttatgactcctgctcgctggttcttgcggggccgcaggaacagtgggactttgcccaatggccattatttaaagagttgctccagtttgcctcctccggtgggcatgttgagttgctggtggccacgccgctggcaaacttaactgatagctccagacatcaactttccgcgttggcggcgatgccgggaggtcgcttacaagtgaaatccattgccactgcgcagctcatgcaaggaaaggggcgctggcttgcgcaggtgactcgcgaagggcaaagccaacagtgggccgcagacgacagcgctaccgttgcacctggtgaattatggggacaaagtgcgtcttcaccagtagtgacacttaaaggaacgtccggaaaaaccttctcgggtcagaccttaagtgcagaagatttactgcccgccttacccaccggggcggtgcgcatcaatctctgtgaacaactggacgggccgctggaaggttttggttcgcgtttctggtcgttagtcacgcaacagcacgctggctggaagcaggcatttacccgccacaaagagataacgcatgttgagtacagcgatcgttatcttaatagcccattcacggcgcgtttgttaggtgaaatcttaaccgagctggttgaacagggaatggcggaacgcgccagcctcactgtttgcgtcaaaaaattggattacaactctcgccaacacgacgctctctataacgcgtggcttaatgaggaagatcgtcagcaggttgtgaccactttacttgaagaaggatatctggggcctgcgtggccgggagcaattagctggttaacgggggataaccagagtacggagcatggacgagaactgacagtcaccttcagcgatggcagtcagcattatgtcctgctcgacatggggcttagctactggcgctgtattgaagataccttctttgattttgccctgcgattaccgcagcaagttgaacggctggcaaacacgcgagcgcgagctgttgccccgggtaatgaccttaggagttatattatcgctggataa

SEQ ID NO: 28705 - DNA, 3360 bp, Escherichia coli 4-203-08_S3_C2
ttgcttgtgaaaactccagttaacccacttttgcaatggcttaacatgttttttagtcgccgttcattatccggagctgatggacgggcgttatatgcttaccgttgtactgatacagagtacgaaagtttggcagaactactgcgtacatatgccccccgtagttatccaagaacgatattcatttcctatagcgatgttctatttagcatatatgccgcagagtttatccgccggactcatacggtcggacaccctaaatgggacacaattttagattctattaactggaaagttccgtatgttcatcgacagaagctggttaatgatggcattcgctactggaaaagaaagataagaaacctggggcaagcttcgggttatctccatacactggcttgtgaagggggtttacctatccgcatgattgaaaatgagagcggttatttgattacctatttcagaaggatatatcaggcgcttcgtgggcaatcatctcaatatcctgccgctaaaattgcacaagaattaggcgatacgattcctgtcacaatgcaaaacgaactggtctatgaaatagccggtgaattctgcgagactctctgccgattacttagtgagcatcctcctcatagcagtgatcccgtttctgcattacgtaagctctctccagactggcatcttcaacttccactcgttctccccgaagcgaatgctgcagagattgtaaggcgattactttctcaatcttctgaaatacgcagtgcaagtagtcttcaggttgaaagaatctgggtcgatgttgatgacagttggtattgcgatgcccggttccgattcccggccacaatgcgtacagaacagttaacctctttgtttgaatgccatattcagccggagcagacccgactcatcatttcaggaaaatggaaaaatggcggggcaaggttggcaatgctaagccgttatgagcagcaagattggcgggtcgagttattacctattgcgatgcaaaaactctctggtgcagatgcaatggccgaaatctcattgtcgcttcatgaaggtccaattctgttaggtcacacaattccaaaaggcggttatgaacttactgaagaacttccctgggtttttgaagcgatgaatgagagtgaatcgcagctaaaacttgttggtatggggtctgtgagttccaggctaaatgctctgtttatttcgctaccgaaaaatagccatttagatattagtggagaaggtgagtttgatatcccaaggttgctaaaaaacagtgaacgcagcttaactaaaataagtggagtatttagcgttgttttacatgatggtgctgtttgtacaattcgcacccagcaactttatgattctgcgattgaatattatattaaatcgacagaagttgaactggttaaatcggattatcctgtccatcgagcctggccgaagatcggttggaaaaaggatctgcaatatggcattgtaccggagaaagaacttttttggcgttccattcgttcaggtaataatgcctggtattctgtcgcatcagaaatgccaaaaggacagatagaagtccggcgaatagttaatgatgaggttttatttagcggtaaagttgtagttttaccagcagacttcgatattaatattatacctgagagtgctcagcaaggcattattatgctttctggtataacggatactagaattgataaatattcaaacaatgaaaaagtaacacttaagtccgattattcacaaaacgagtgtgctatttattataattcatcgctgatgctggaaaataccgttgatttacgggtctcctggaaagatggttctaatcttaaactattattacctaagccggttagcggtggccgatttgtaactaatgatggttctgttcattttgatggtgtggcatctatagcacatttgcatggaatagatgctgagttattaaccatatcatgtgctggaagaggatatcttaatatcgagttattggatgaaaatccagtagctgaaaaattccgttatttacatgccgaccttcctcttttatcaggacgcaatgacaaattacaacaaatttcactttatgagaactataatttgctaaatgctatgctggcatgtgcatggaacagcaatagtacattatgtgttgatttttactctgacagatttggaaaggataaagcaacactcaatattaaacgctacgatggtagttttattgaacacgatcaagggttactggttgatataaaaaattctgttgtttttcctgcaaatagaatagacgaactggttgttgatgctatttctcttaagaatcctggcttacacatatcattgttaaaaaaagatgagtttgcttataatctttcagctctgaatgttcaggatagtccatggttaattgtgggaaaacttgatggtacagctcgcattgcaccagtaattaaatggatgctacctgtattgcagacaaatgatttattactaaatgctctatgcgaagcagacccagaacagcgcaaaaaaaattttaatgagctaatttttgaaatagataacaacccattgcaaaattattgctgtttattaacagagtatattaagaaatacaaaatgaataatggcttatccttgctggatctggacttgttcagatgtatttcgagtaattaccgcgtggttgttcaattgttaatatcatcatgtctttctggtgatagcgatacgatttatgatatacaggaagaattacccttttcatggggatggattcccgtttcaatctggaaagatgttttccaaaaatgttggacttatctggagaaacagattaacgataaaacattagcattacatatattgcaaccctttattgcttttatgaaccatcgtgcacatatcgatcgtcggctggctccgattgcgaatatgttacttacatatagtgagagcctaccaaccggttgtgatgtattgccaactgttagtcgtgagcagtttaatgaagctaaacagatgctattaaggaaccccgacagctttgggcgtatcagtatcttccctaaagaactttggtctagtgctattactccagagttaaaatctgtttttaataagctttggattgaagataaatatcactcacggcttgaaaaacgttttaatttgatgttagtcgcagcgctgttaacccaaaaagataataacctgatacatcaactgtctgcgctttttgaatttcactatcagcaagccccacagcaattaggggtaatctatcaatattattttgaacaagcaggagtatgtcattga

SEQ ID NO: 28706 - DNA, 6315 bp, Escherichia coli 4-203-08_S3_C3; identical to SEQ ID NO: 28704

SEQ ID NO: 28707 - DNA, 3360 bp, Escherichia coli 4-203-08_S3_C3
ttgcttgtgaaaactccagttaacccacttttgcaatggcttaacatgttttttagtcgccgttcattatccggagctgatggacgggcgttatatgcttaccgttgtactgatacagagtacgaaagtttggcagaactactgcgtacatatgccccccgtagttatccaagaacgatattcatttcctatagcgatgttctatttagcatatatgccgcagagtttatccgccggactcatacggtcggacaccctaaatgggacacaattttagattctattaactggaaagttccgtatgttcatcgacagaagctggttaatgatggcattcgctactggaaaagaaagataagaaacctggggcaagcttcgggttatctccatacactggcttgtgaaggtggtttacctatccgcatgattgaaaatgagagcggttatttgattacctatttcagaaggatatatcaggcgcttcgtgggcaatcatctcaatatcctgccgctaaaattgcacaagaattaggcgatacgattcctgtcacaatgcaaaacgaactggtctatgaaatagccggtgaattctgcgagactctctgccgattacttagtgagcatcctcctcatagcagtgatcccgtttctgcattacgtaagctctctccagactggcatcttcaacttccactcgttctccccgaagcgaatgctgcagagattgtaaggcgattactttctcaatcttctgaaatacgcagtgcaagtagtcttcaggttgaaagaatctgggtcgatgttgatgacagttggtattgcgatgcccggttccgattcccggccacaatgcgtacagaacagttaacctctttgtttgaatgccatattcagccggagcagacccgactcatcatttcaggaaaatggaaaaatggcggggcaaggttggcaatgctaagccgttatgagcagcaagattggcggggcgagttattacctattgcgatgcaaaaactctctggtgcagatgcaatggccgaaatctcattgtcgcttcatgaaggtccaattctgttaggtcacacaattccaaaaggcggttatgaacttactgaagaacttccctgggtttttgaagcgatgaatgagagtgaatcgcagctaaaacttgttggtatggggtctgtgagttccaggctaaatgctctgtttatttcgctaccgaaaaatagccatttagatattagtggagaaggtgagtttgatatcccaaggttgctaaaaaacagtgaacgcagcttaactaaaataagtggagtatttagcgttgttttacatgatggtgctgtttgtacaattcgcacccagcaactttatgattctgcgattgaatattatattaaatcgacagaagttgaactggttaaatcggattatcctgtccatcgagcctggccgaagatcggttggaaaaaggatctgcaatatggcattgtaccggagaaagaacttttttggcgttccattcgttcaggtaataatgcctggtattctgtcgcatcagaaatgccaaaaggacagatagaagtccggcgaatagttaatgatgaggttttatttagcggtaaagttgtagttttaccagcagacttcgatattaatattatacctgagagtgctcagcaaggcattattatgctttctggtataacggatactagaattgataaatattcaaacaatgaaaaagtaacacttaagtccgattattcacaaaacgagtgtgctatttattataattcatcgctgatgctggaaaataccgttgatttacgggtctcctggaaagatggttctaatcttaaactattattacctaagccggttagcggtggccgatttgtaactaatgatggttctgttcattttgatggtgtggcatctatagcacatttgcatggaatagatgctgagttattaaccatatcatgtgctggaagaggatatcttaatatcgagttattggatgaaaatccagtagctgaaaaattccgttatttacatgccgaccttcctcttttatcaggacgcaatgacaaattacaacaaatttcactttatgagaactataatttgctaaatgctatgctggcatgtgcatggaacagcaatagtacattatgtgttgatttttactctgacagatttggaaaggataaagcaacactcaatattaaacgctacgatggtagttttattgaacacgatcaagggttactggttgatataaaaaattctgttgtttttcctgcaaatagaatagacgaactggttgttgatgctatttctcttaagaatcctggcttacacatatcattgttaaaaaaagatgagtttgcttataatctttcagctctgaatgttcaggatagtccatggttaattgtgggaaaacttgatggtacagctcgcattgcaccagtaattaaatggatgctacctgtattgcagacaaatgatttattactaaatgctctatgcgaagcagacccagaacagcgcaaaaaaaattttaatgagctaatttttgaaatagataacaacccattgcaaaattattgctgtttattaacagagtatattaagaaatacaaaatgaataatggcttatccttgctggatctggacttgttcagatgtatttcgagtaattaccgcgtggttgttcaattgttaatatcatcatgtctttctggtgatagcgatacgatttatgatatacaggaagaattacccttttcatggggatggattcccgtttcaatctggaaagatgttttccaaaaatgttggacttatctggagaaacagattaacgataaaacattagcattacatatattgcaaccctttattgcttttatgaaccatcgtgcacatatcgatcgtcggctggctccgattgcgaatatgttacttacatatagtgagagcctaccaaccggttgtgatgtattgccaactgttagtcgtgagcagtttaatgaagctaaacagatgctattaaggaaccccgacagctttgggcgtatcagtatcttccctaaagaactttggtctagtgctattactccagagttaaaatctgtttttaataagctttggattgaagataaatatcactcacggcttgaaaaacgttttaatttgatgttagtcgcagcgctgttaacccaaaaagataataacctgatacatcaactgtctgcgctttttgaatttcactatcagcaagccccacagcaattaggggtaatctatcaatattattttgaacaagcaggagtatgtcattga

SEQ ID NO: 28708 - DNA, 6315 bp, Escherichia coli 5.2239; identical to SEQ ID NO: 28464

SEQ ID NO: 28709 - DNA, 2937 bp, Escherichia coli 5.2239; identical to SEQ ID NO: 28445

SEQ ID NO: 28710 - DNA, 6315 bp, Escherichia coli 5412; identical to SEQ ID NO: 28464

SEQ ID NO: 28711 - DNA, 2937 bp, Escherichia coli 5412; identical to SEQ ID NO: 28445

SEQ ID NO: 28712 - DNA, 6345 bp, Escherichia coli 576-1; identical to SEQ ID NO: 28560

SEQ ID NO: 28713 - DNA, 2205 bp, Escherichia coli 576-1; identical to SEQ ID NO: 28567

SEQ ID NO: 28714 - DNA, 6315 bp, Escherichia coli 5905
atggacgttcagcaactgcattatgcgccacttctaaatcagcttcatcagcgtgcggtgaggtcggtggtaagtcagttggcattgcggagcaagtcgttgactcattatctggaatcacaatattttcagcctcccggtcaggaggggtcactgcttgcagacccggtattcgaaagtacattcggctggatgcctgcggatgaaacaatggaggatttgcgggacaagctgatctccagcccgctggttgatgcattgagcaaagcgccagtgccatttcgtcatcaacttactgcgtggcgaacgattctggaagacaaaaaatccttgttagtgagcagcggtacgggatccgggaaaacagaatgctttatggtaccggttctggaagatcttattcgtcagcaaaaatcgacccgccagtcactaacagggacacaagctattttcttgtatccgttaaatgcattaattaacagccaacaggagcggcttcgcgaatggacgcgcggatttaaggggaaaatacgcttcgcgctatataatggcgaaacccggcataccaaatacgaaattcaggaagatcagttgaaagtacctgaacaagctttgagtcgggaagccatttatgaagcaccaccttccatcatggtgacgaataccaccatgctggaatatatgctgattcgtcgtaaagatgccccaatcatcgaaaagtctcaggggatgttaaagtatatcgtcctggatgaagcccatagttatattggttctcaggctgctgagttagcgctgcttttacgtcgtgttatgcaggctttcaatgttggacccggcacagataaacctgtgcagattatcgcgacctctgccactattggtgaagactctcctgaaggtaataaggagcttgctaaatttgtcgctgatctcgcgggcgttacagaacgtgatgtcaaagtggttcgcggttatcgacaaataccgcgggtatcggagtcgctgattcgtcatgaataccccacatctttaacttctcttaaatccctgagccctcaggatctttaccaacagctttgtcattaccgtgtggcccagcaattgcgtcaggcgttaactcatcccggacggcaggcagtacgtttgagtgagttgctcaatgttgccagaagaacctggccagatattaatcaccgtgagctactgcaactcctcgatctaatggcaagatcgcgagaaggtgaactggcttttacgccattacgtatgcatgggtttatcagaacactggcgggtctatgggcatgttcaaacaaacaatgctcacataaagcacatgaattaaatcagagtgactggccatttggtcaggtatggtttgagcagcgccaatattgtgactgtggagcgccggtatttgaagttttacgttgctccgggtgtggttcagcttatttgtctgccaaagaggagatgcgcggtgatggaacgaactggttggtagcgcaaccagccgctgccgaagtggatgagtttgctcttgatgtagatgtttattctgaagatgaagacaacgacgaattagacaataactctcaatttgatcgtctgattgcgagcggtggtgaaaaatatatcatttcactggaagaaacgacggcggggaaaattgatagtgaagcgcaaaagcactatgaaataaacctgttaagaccggaatctcgaggtgagggacgcaataactcctttgcttgtgtttgctgtggtgacactcaacggaaaaataatcctttattccgtccgcttcggctcggcgcgcccttttttttaaatgaaattattcctactctgctggagttttctccattaccgcaaacaagagaagagcagttaggaccgtttaatggtcgacgcttgctcacctttacggattcgcgtcagggtaccgctcgcatttcagcccgcttacagcaggatgccgataaagcgacgttgcgagctctttgttaccaggagctggcaaatattacagagccttcagcaaaactcagcccggcacactgtgcactgttagagaaagttattagccagttttctgtcctccctttaaaaaattccatcgacgcgctgaaaaaagcgatggctgcgaatgaggagcttagcccgacggacattcaggcacttaaaattattgagccgatggtgagttccttaagcacggagcatgctgaagcgatgcaaatacttcaggctaactctggcaatcagcagaagaaaaccatgtcatggcaaacgctgtctgaacagctggttggcagtgtggaccttgccgatagaatgagaggcagttttaaagaattgtctgggcttgatcttactaaacaacagtttgcagatttttgtttatacagcgagtttggtcgccgccctaaaaatgcctggaccctcgaaagtctgggtctggtagccattcactatccattcattgataaagttacaacctgcccgcaggactggaagacattattacccgatcccgataagcaattagcggaatggcgtaatttattgaagattactcttgatttctttatccgtgaaaacagtgccgttttttacgaaaacgagcaataccctcgctggatgggggcacgtttcccggtaaaaatgctccaggggccagataaaaaaaacaaagggcagaaacgtgatcaactttggccacaaatacgcgatcgccattataaccgggtcattaagctattaatcgcagtctttccggcaatacaacctgagcaggctcactggaaatcgttagttaaccacttaatgattgaggtctgggatgcaattcgaccctgcttacgtcagtttgagtcgggttatcagctggatattaaacaacaagctgaattttacagtccaaagcaagtgtggcgttgcccctatactcgacgtgcgttagacgtcacgttgctgggatactctccgtatttgccgggtagcaaagaaattgcacctgaaaaagcagtgttgattgaaatgcctgagcttcctgtacgtcactggcgtttgtctggtggtggagaaatcgcccgagaagaacgtctggagtggctggaaagtaatgcgctgattcaacatgcccgcgaggaaggattatggtctactcgcagcgaccgactggccctgaaagatagctggtatcgtctggaggaacactctgcgcagagaacgcctgagcagaaccagtttaatgaaaaacaatttaagtcaggcaaagttaatgtgctgaactgttccacgaccatggagatgggggtggatattggtggtatgagtttggtggcaatgaacaacgttcctccagcgccggcaaattatttgcaacgtgcaggtcgcgcggggcgtcgtggagagagtgcatctgctgccattacgttatgtaaaaacacggcgcatggaatggaggtattcaaagaccccctctggacgttcaacactactgccagtgcgccacgggttcgttttgggagcagtagtattgttcaacgacatgttaatgccctggttttaggtctgtttttacgagctgaagttcctgatgcgacaaaactgagttgcaaatggttctttgaaggtgatgagagccagtgtcttcgttttctccattggttaaatcaccaggccgatcagctggcggataaacttaaacgccttactcagggaaccgtactgatgtcattgacggcaacccagctcttgacccgcacacaagcaatgatgcagcaggttgatatccgctggagaagccaacttgcgatactgttggaaaatatcgaagcgttgaaggcggataacagcgcgtgggaagaaacaccagcaggtaaagccatcgcttatcagcttcgtgattatcgcggtgcatatctgttttctaaactcattagtgaagcgttcctgccggggcatggtttcccggttggcgtagtcaatttcaattatctgacggcagatgagctggaaaaacgtcgcgcaataaaagccactcaggctgaccctaatgaagggggagaaagcttttctcgtcgtattgaaaaattgcccagccgtgatttgcctacagcattacgcgagtatgcgcctggtgcagatgtggtattgggcggaaaagtatatcgttcctcgggcattatgcttggcaaggtgcttgccagcgggcaggagctgtcaggcgatcatcatattccgtggttctggcattgccgtaaatgtggtgcgggggcaaccagtactacccatcctgtcgaatgtagtcactgcaaagcggatatacagcaacttgatgtgaagcgttatttacagcctgttggttttgcgacagatattcgttatcaggcacataatgatgtatccatgcctgcacaacttccctggaaagatccacgtgttcttgtaccgtcttcggtgtgggtttctttacccgatgctgggctaggacgttaccgttttagccatagtggggaattgttccacttcagtgaaggggaatttgggcacggctacgcaatttgcctctcatgtggtcgggcagaatctcaaactcaaccccagcgtacccctgaaaatctaaagaacccagagagggaaaatacgcattacctgttgcgagggggcagtaacgatcgtcaggggagcaataaattgtgccacggtcatgtgcataaagatctgtggttgggatatagcagtcgtacagatatggttgagctgcaactcaatgatgataatggcctgttgatccgtgatgaggttgccgcgcgttcccttgcggtcgctttgcgtgaagggttagcgcataaattgggtatcgaaaatactgagctgggcgtgacgacgcagcaagcgcgcgatatcaatggctataccggatattccatcttcatttacgacaataatgcggggggtgcaggttatgcagtgcaattgatcgaccattgggctgatgtctttaattacgccagaaaattgctcgattgcagttgcgataaattctgtcaccactgcttgctcagctacgacagtcagcattatgtcaacagattagatcgtcaccatgcattaaccctgcttaccaatgtacggttgcagcgacttaacctcgcgccagaatatcagtacttcggcgatggtagccgggttgaaactaaccctctgagtttacgtattgcgcaatgcctgaacagcgagatttatgactcctgctcgctggttcttgcggggccgcaggaacagtgggactttgcccaatggccattatttaaagagttgctccagtttgcctcctccggtgggaatgttgagttgctggtggccacgccgctggcaaacttaactgatagctccagacatcagctttccgcgttggcggcgatgccgggaggtcgcttacaagtgaaatccattgccactgcgcagctcatgcaaggaaaggggcgctggcttgcgcaggtgactcgcgaagggcaaagccaacagtgggccgcagacgacagcgctaccgttgcacctggtgaattatggggacaaagtgcgtcttcaccagtagtgacacttaaaggaacgtccggaaaaaccttctcgggtcagaccttaagtgcagaagatttactgcccgccttacccaccggggcggtgcgcatcaatctctgtgaacaactggacgggccgctggaaggttttggttcgcgtttctggtcgttagtcacgcaacagcacgctggctggaagcaggcatttacccgccacaaagagataacgcatgttgagtacagcgatcgttatcttaatagcccattcacggcgcgtttgttaggtgaaatcttaaccgagctggttgaacagggaatggcggaacgcgccagcctcactgtttgcgtcaaaaaattggattacaactctcgccaacacgacgctctctataacgcgtggcttaatgaggaagatcgtcagcaggttgtgaccactttacttgaagaaggatatctggggcctgcgtggccgggagcaattagctggttaacgggggataaccagagtacggagcatggacgagaactgacagtcaccttcagcgatggcagtcagcattatgtcctgctcgacatggggcttagctactggcgctgtattgaagataccttctttgattttgccctgcgagtaccgcagcaagttgaacggctggcaaacacgcgagcgcgagctgttgccccgggtaatgaccttaggagttatattatcgctggataa

SEQ ID NO: 28715 - DNA, 2937 bp, Escherichia coli 5905
atgattgaaaatgagagcggttatttgattacctatttcagaaggatatatctggcgcttcgtgggcaatcatctcaatatcctgccgctaaaattgcacaagaattaggcgatacgattcctgtcacaatgcaaaacgaactggtctatgaaatagccggtgaattctgcgagactctctgccgattacttagtgagcatcctcctcatagcagtgatcccgtttctgcattacgtaagctctctccagactggcatcttcaacttccactcgttctccccgaagcgaatgctgcagagattgtaaggcgattactttctcaatcttctgaaatacgcagtgcaagtagtcttcaggttgaaagaatctgggtcgatgttgatgacagttggtattgcgatgcccggttccgattcccggccacaatgcgtacagaacagttaacctctttgtttgaatgccatattcagccggagcagacccgactcatcatttcaggaaaatggaaaaatggcggggcaaggttggcaatgctaagccgttatgagcagcaagattggcgggtcgagttattacctattgcgatgcaaaaactctctggtgcagatgcaatggccgaaatctcattgtcgcttcatgaaggtccaattctgttaggtcacacaattccaaaaggcggttatgaacttactgaagaacttccctgggtttttgaagcgatgaatgagagtgaatcgcagctaaaacttgttggtatggggtctgtgagttccaggctaaatgctctgtttatttcgctaccgaaaaatagccatttagatattagtggagaaggtgagtttgatatcccaaggttgctgaaaaacagtgaacgcagcttaactaaaataagtggagtatttagcgttgttttacatgatggtgctgtttgtacaattcgcacccagcaactttatgattctgcgattgaatattatattaaatcgacagaagttgaactggttaaatcggattatcctgtccatcgagcctggccgaagatcggttggaaaaaggatctgcaatgtggcattgtaccggagaaagaacttttttggcgttccattcgttcaggtaataatgcctggtattctgtcgcatcagaaatgccaaaaggacagatagaagtccggcgaatagttaatgatgaggttttatttagcggtaaagttgtagttttaccagcagacttcgatattaatattatacctgagagtgctcagcaaggcattattatgctttctggtataacggatactagaattgataaatattcaaacaatgaaaaagtaacacttaagtccgattattcacaaaacgagtgtgctatttattataattcatcgctgatgctggaaaataccgttgatttacgggtctcctggaaagatggttctaatcttaaactattattacctaagccggttagcggtggccgatttgtaactaatgatggttctgttcattttgatggtgtggcatctatagcacatttgcatggaatagatgctgagttattaaccatatcatgtgctggaagaggatatcttaatatcgagttattggatgaaaatccagtagctgaaaaattccgctatttacatgccgaccttcctcttttatcaggacgcaatgacaaattacaacaaatttcactttatgagaactataatttgctaaatgctatgctggcatgtgcatggaacagcaatagtacattatgtgttgatttttactctgacagatttggaaaggataaagcaacactcaatattaaacgctacgatggtagttttattgaacacgatcaagggttactggttgatataaaaaattctgttgtttttcctgcaaatagaatagacgaactggttgttgatgctatttctcttaagaatcctggcttacacatatcattgttaaaaaaagatgagtttgcttatgatctttcagctctgaatgttcaggatagtccatggttaattgtgggaaaacttgatggtacagctcgcattgcaccagtaattaaatggatgctacctgtattgcagacaaatgatttattactaaatgctctatgcgaagcagacccagaacagcgcaaaaaaaattttaatgagctaatttttgaaatagataacaacccattgcaaaattattgctgtttattaacagagtatattaagaaatacaaaatgaataatggcttatccttgctggatctggacttgttcagaggtatttcgagtaattaccgcgtggttgttcaattgttaatatcatcatgtctttctggtgatagcgatacgatttatgatatacaggaagaattacccttttcatggggatggattcccgtttcaatctggaaagatgttttccaaaaatgttggacttatctggagaaacagattaacgataaaacattagcattacatatattgcaaccctttattgcttttatgaaccatcgtgcacatatcgatcgtcggctggctccgattgcgaatatgttacttacatatagtgagagcctaccaaccggttgtgatgtattgccaactgttagtcgtgagcagtttaatgaagctaaacagatgctattaaggaaccccgacagctttgggcgtatcagtatcttccctaaagaactttggtctagtgctattactccagagttaaaatctgtttttaataagctttggattgaagataaatatcactcacggcttgaaaaacgttttaatttgatgttagtcgcagcgctgttaacccaaaaagataataacctgatacatcaactgtctgcgctttttgaatttcactatcagcaagccccacagcaattaggggtaatctatcaatattattttgaacaagcaggagtatgtcattga

SEQ ID NO: 28716 - DNA, 6315 bp, Escherichia coli 6-175-07_S4_C1
atggacgttcagcaactgcattatgcgccacttctaaatcagcttcatcagcgtgcggtgaggtcggtggtaagtcagttggcattgcggagcaagtcgttgactcattatctggaatcacaatattttcagcctcccggtcaggaggggtcactgcttgcagacccggtattcgaaagtacattcggctggatgcctgcggatgaaacaatggaggatttgcgggacaagctgatctccagcccgctggttgatgcattgagcaaagcgccagtgccatttcgtcatcaactcactgcgtggcgaacgattctggaagacaaaaaatccttgttagtgagcagcggtacgggatccgggaaaacagaatgctttatggtacctgttctggaagatcttattcgtcagcaaaaatcgccccgccagtcactaacagggacacaagctattttcttgtatccgttaaatgcattaattaacagccaacaggagcggcttcgcgaatggacgcgcggatttaaggggaaaatacgcttcgcgctatataatggcgaaacccggcataccaaatacgaaattcaggaagatcagttgaaagtacctgaacaagctttgagtcgggaagccatttatgaagcaccaccttccatcatggtgacgaataccaccatgctggaatatatgctgattcgtcgtaaagatgccccaatcatcgaaaagtctcaggggatgttaaagtatatcgtcctggatgaagcccatagttatattggttctcaggctgctgagttagcgctgcttttacgtcgtgttatgcaggctttcaatgttggacccggcacagataaacctgtgcagattatcgcgacctctgccactattggtgaagactctcctgaaggtaataaggagcttgctaaatttgtcgctgatctcgcgggcgttacagaacgtgatgtcaaagtggttcgcggttatcgacaaataccgcgggtatcggagtcgctgattcgtcatgaataccccacatctttaacttctcttaaatccctgagccctcaggatctttaccaacagctttgtcattaccgtgtggcccagcaattgcgtcaggcgttaactcatcccggacggcaggcagtacgtttgagtgagttgctcaatgttgccagaagaacctggccagatattaatcaccgtgagctactgcaactcctcgatctaatggcaagatcgcgagaaggtgaactggcttttacgccattacgtatgcatgggtttatcagaacactggcgggtctatgggcatgttcaaacaaacaatgctcacataaagcacatgaattaaatcagagtgactggccatttggtcaggtatggtttgagcagcgccaatattgtgactgtggtgcgccggtatttgaagttttacgttgctccgggtgtggttcagcttatttgtctgccaaagaggagatgcgcggtgatggaacgaactggttggtagcgcaaccagccgctgccgaagtggatgagtttgctcttgatgtagatgtttattctgaagatgaagacaacgacgaattagacaataactctcaatttgatcgtctgattgcgagcgatggtgaaaaatatatcatttcactggaagaaacgacggcggggaaaattgatagtgaagcgcaaaagcactatgaaataaacctgttaagaccggaatctcgaggtgagggacgcaataactcctttgcttgtgtttgctgtggtgacactcaacggaaaaataatcctttattccgtccgcttcggctcggtgcgcccttttttttaaatgaaattattcctactctgctggagttttctccattaccgcaaacaagagaagagcagttaggaccgtttaatggtcgacgcttgctcacctttacggattcgcgtcagggtaccgctcgcatttcagcccgcttacagcaggatgccgataaagcgacgttgcgagctctttgttaccaggagctggcaaatattacagagccttcagcaaaactcagcccggcacactgtgcactgttagagaaagttattagccagttttctgtcctccctttaaaaaattccatcgacgcgctgaaaaaagcgatggctgcgaatgaggagcttagcccgacggacattcaggcacttaaaattattgagccgatggtgagttccttaagcccggatcatgctgaagcgatgcaaatacttcaggctaactctggcaatcagcagaagaaaaccatgtcatggcaaacgctgtctgaacagctggttggcagtgtggaccttgccgatagaatgagaggcagttttaaagaattgtctgggcttgatcttactaaacaacagtttgcagatttttgtttatacagcgagtttggtcgccgccctaaaaatgcctggaccctcgaaagtcttggtctggtagccattcactatccatttattgataaagttacaacctgcccgcaggactggaagacattattacccgatcccgataagcaattagcggaatggcgtaatttattgaagattactcttgatttctttatccgtgaaaacagtgccgttttttacgaaaacgagcaataccctcgctggatgggggcacgtttcccggtaaaaatgctccaggggccagataaaaaaaacaaagggcagaaacgtgatcaactttggccacaaatacgcgatcgccattataaccgggtcattaagctattaatcgcagtctttccggcaatacaacctgagcaggctcactggaaatcgttagttaaccacttaatgattgaggtctgggatgcaattcgaccctgcttacgtcagtttgagtcgggttatcagctggatattaaacaacaagctgaattttacagtccaaagcaagtgtggcgttgcccctatactcgacgtgcgttagacgtcacgttgctgggatactctccgtatttgccgggtagcaaagaaattgcacctgaaaaagcagtgttgattgaaatgcctgagcttcctgtacgtcactggcgtttgtctggtggtggagaaatcgcccgagaagaacgtctggagtggctggaaagtaatgcgctgattcaacatgcccgcgaggaaggattatggtctactcgcagcgaccgactggccctgaaagatagctggtatcgtctggaggaacactctgcgcagagaacgcctgagcagaaccagtttaatgaaaaacaatttaagtcaggcaaagttaatgtgctgaactgttccacgaccatggagatgggggtggatattggtggtatgagtttggtggcaatgaacaacgttcctccagctccggcaaattatttgcagcgtgcaggccgcgcgggtcgacgtggagagagtgcatctgctgccattacgttatgtaaaaacacggcgcatggaatggaggtattcaaagaccccctctgggcgttcaacactactgccagtgcgccacgggttcgttttgggagcagcagtattgttcaacgacatgttaatgccctggttttaggtctgtttttacgagctgaagttcctgatgcgacaaaactgagttgcaaatggttctttgaaggtgatgagagccagtgttttcgttttctccattggttaaatcaccaggccgatcagctagcggataaacttaaacgccttactcagggaaccgtcctgatgtcattgacggcaacccagctcttgacccgcacacaagcaatgatgcagcaggttgatatccgctggagaagccaacttgcgatactgttggaaaatatcgaagcgttgaaggcggataacagcgcgtgggaagaaacgccagcaggtaaagccatcgcttatcagcttcgtgattatcgcggtgcatatctgttttctaaactcattagtgaagcgttcctgccggggcatggtttcccggttggcgtcgtcaatttcaattatctgacggcagatgagctggaaaaacgtcgcgcaataaaagctactcaggctgaccctaatgaagggggagaaagcttttctcgtcgtattgaaaaattgcccagccgtgatttgcctacagcattacgcgagtatgctccaggtgcagatgtggtattgggcggaaaagtatatcgttcctcgggcattatgcttggcaaggtacttgccagcgggcaggagctgtcaggcgatcatcatattccgtggttctggcattgtcgtaaatgtggtgcgggggcaaccagtactacccgtcctgtcgaatgtagtcactgcaaagcggatatacagcaacttgatgtgaagcgttatttacagcctgttggttttgcgacagatatccgttatcaggcgcataatgatgtatccatgcctgcacaacttccctggaaagatccacgtgttcttgtaccgtcttcggtgtgggtttctttacccgatgctgggctaggacgttaccgttttagccatagtggggaattgttccacttcagtgaaggggaatttgggcacggctacgcaatttgcctctcatgtggtcgggcagaatctcaaactcaaccccagcgtacccctgaaaatctaaagaacccagagagggaaaatacgcattacctgttgcgagggggcagtaacgatcgtcaggggagcaataaattgtgccacggtcatgtgcataaagatctgtggttgggatatagcagtcgtacagatatggttgagctgcaactcaatgatgataatggcctgttgatccgtgatgaggttgccgcgcgttcccttgcggtcgctttgcgtgaagggttagcgcataaattgggtatcgaaaatactgagctgggcgtgacgacgcagcaagcgcgcgatatcaatggctataccggatattccatcttcatatacgacaataatgcgggtggtgcaggttatgcagtgcaattgatcgaccattgggctgatgtctttaattacgccagaaaattgctcgattgcagttgcgataaattctgtcaccactgcttgctcagctacgacagtcagcattatgtcaacagattagatcgtcaccatgcattaaccctgcttaccaatgtacggttgcagcgacttaacctcgcgccagaatatcagtacttcggcgatggtagccgggttgaaactaaccctctgagtttacgtattgcgcaatgcctgaacagcgagatttatgactcctgctcgctggttcttgcggggccgcaggaacagtgggactttgcccaatggccattatttaaagagttgctccagtttgcctcctccggtgggcatgttgagttgctggtggccacgccgctggcaaacttaactgatagctccagacatcaactttccgcgttggcggcgatgccgggaggtcgcttacaagtgaaatccattgccactgcgcagctcatgcaaggaaaggggcgctggcttgcgcaggtgactcgcgaagggcaaagccaacagtgggccgcagacgacagcgctaccgttgcacctggtgaattatggggacaaagtgcgtcttcaccagtagtgacacttaaaggaacgtccggaaaaaccttctcgggtcagaccttaagtgcagaagatttactgcccgccttacccaccggggcggtgcgcatcaatctctgtgaacaactggacgggccgctggaaggttttggttcgcgtttctggtcgttagtcacgcaacagcacgctggctggaagcaggcatttccccgccacaaagagataacgcatgttgagtacagcgatcgttatcttaatagcccattcacggcgcgtttgttaggtgaaatcttaaccgagctggttgaacagggaatggcggaacgcgccagcctcactgtttgcgtcaaaaaattggattacaactctcgccaacacgacgctctctataacgcgtggcttaatgaggaagatcgtcagcaggttgtgaccactttacttgaagaaggatatctggggcctgcgtggccgggagcaattagctggttaacgggggataaccagagtacggagcatggacgagaactgacagtcaccttcagcgatggcagtcagcattatgtcctgctcgacatggggcttagctactggcgctgtattgaagataccttctttgattttgccctgcgattaccgcagcaagttgaacggctggcaaacacgcgagcgcgagctgttgccccgggtaatgaccttaggagttatattatcgctggataa

SEQ ID NO: 28717 - DNA, 3360 bp, Escherichia coli 6-175-07_S4_C1; identical to SEQ ID NO: 28705

SEQ ID NO: 28718 - DNA, 6315 bp, Escherichia coli 6-175-07_S4_C2
atggacgttcagcaactgcattatgcgccacttctaaatcagcttcatcagcgtgcggtgaggtcggtggtaagtcagttggcattgcggagcaagtcgttgactcattatctggaatcacaatattttcagcctcccggtcaggaggggtcactgcttgcagacccggtattcgaaagtacattcggctggatgcctgcggatgaaacaatggaggatttgcgggacaagctgatctccagcccgctggttgatgcattgagcaaagcgccagtgccatttcgtcatcaactcactgcgtggcgaacgattctggaagacaaaaaatccttgttagtgagcagcggtacgggatccgggaaaacagaatgctttatggtacctgttctggaagatcttattcgtcagcaaaaatcgccccgccagtcactaacagggacacaagctattttcttgtatccgttaaatgcattaattaacagccaacaggagcggcttcgcgaatggacgcgcggatttaaggggaaaatacgcttcgcgctatataatggcgaaacccggcataccaaatacgaaattcaggaagatcagttgaaagtacctgaacaagctttgagtcgggaagccatttatgaagcaccaccttccatcatggtgacgaataccaccatgctggaatatatgctgattcgtcgtaaagatgccccaatcatcgaaaagtctcaggggatgttaaagtatatcgtcctggatgaagcccatagttatattggttctcaggctgctgagttagcgctgcttttacgtcgtgttatgcaggctttcaatgttggacccggcacagataaacctgtgcagattatcgcgacctctgccactattggtgaagactctcctgaaggtaataaggagcttgctaaatttgtcgctgatctcgcgggcgttacagaacgtgatgtcaaagtggttcgcggttatcgacaaataccgcgggtatcggagtcgctgattcgtcatgaataccccacatctttaacttctcttaaatccctgagccctcaggatctttaccaacagctttgtcattaccgtgtggcccagcaattgcgtcaggcgttaactcatcccggacggcaggcagtacgtttgagtgagttgctcaatgttgccagaagaacctggccagatattaatcaccgtgagctactgcaactcctcgatctaatggcaagatcgcgagaaggtgaactggcttttacgccattacgtatgcatgggtttatcagaacactggcggggctatgggcatgttcaaacaaacaatgctcacataaagcacatgaattaaatcagagtgactggccatttggtcaggtatggtttgagcagcgccaatattgtgactgtggtgcgccggtatttgaagttttacgttgctccgggtgtggttcagcttatttgtctgccaaagaggagatgcgcggtgatggaacgaactggttggtagcgcaaccagccgctgccgaagtggatgagtttgctcttgatgtagatgtttattctgaagatgaagacaacgacgaattagacaataactctcaatttgatcgtctgattgcgagcgatggtgaaaaatatatcatttcactggaagaaacgacggcggggaaaattgatagtgaagcgcaaaagcactatgaaataaacctgttaagaccggaatctcgaggtgagggacgcaataactcctttgcttgtgtttgctgtggtgacactcaacggaaaaataatcctttattccgtccgcttcggctcggtgcgcccttttttttaaatgaaattattcctactctgctggagttttctccattaccgcaaacaagagaagagcagttaggaccgtttaatggtcgacgcttgctcacctttacggattcgcgtcagggtaccgctcgcatttcagcccgcttacagcaggatgccgataaagcgacgttgcgagctctttgttaccaggagctggcaaatattacagagccttcagcaaaactcagcccggcacactgtgcactgttagagaaagttattagccagttttctgtcctccctttaaaaaattccatcgacgcgctgaaaaaagcgatggctgcgaatgaggagcttagcccgacggacattcaggcacttaaaattattgagccgatggtgagttccttaagcccggatcatgctgaagcgatgcaaatacttcaggctaactctggcaatcagcagaagaaaaccatgtcatggcaaacgctgtctgaacagctggttggcagtgtggaccttgccgatagaatgagaggcagttttaaagaattgtctgggcttgatcttactaaacaacagtttgcagatttttgtttatacagcgagtttggtcgccgccctaaaaatgcctggaccctcgaaagtcttggtctggtagccattcactatccatttattgataaagttacaacctgcccgcaggactggaagacattattacccgatcccgataagcaattagcggaatggcgtaatttattgaagattactcttgatttctttatccgtgaaaacagtgccgttttttacgaaaacgagcaataccctcgctggatgggggcacgtttcccggtaaaaatgctccaggggccagataaaaaaaacaaagggcagaaacgtgatcaactttggccacaaatacgcgatcgccattataaccgggtcattaagctattaatcgcagtctttccggcaatacaacctgagcaggctcactggaaatcgttagttaaccacttaatgattgaggtctgggatgcaattcgaccctgcttacgtcagtttgagtcgggttatcagctggatattaaacaacaagctgaattttacagtccaaagcaagtgtggcgttgcccctatactcgacgtgcgttagacgtcacgttgctgggatactctccgtatttgccgggtagcaaagaaattgcacctgaaaaagcagtgttgattgaaatgcctgagcttcctgtacgtcactggcgtttgtctggtggtggagaaatcgcccgagaagaacgtctggagtggctggaaagtaatgcgctgattcaacatgcccgcgaggaaggattatggtctactcgcagcgaccgactggccctgaaagatagctggtatcgtctggaggaacactctgcgcagagaacgcctgagcagaaccagtttaatgaaaaacaatttaagtcaggcaaagttaatgtgctgaactgttccacgaccatggagatgggggtggatattggtggtatgagtttggtggcaatgaacaacgttcctccagctccggcaaattatttgcagcgtgcaggccgcgcgggtcgacgtggagagagtgcatctgctgccattacgttatgtaaaaacacggcgcatggaatggaggtattcaaagaccccctctgggcgttcaacactactgccagtgcgccacgggttcgttttgggagcagcagtattgttcaacgacatgttaatgccctggttttaggtctgtttttacgagctgaagttcctgatgcgacaaaactgagttgcaaatggttctttgaaggtgatgagagccagtgttttcgttttctccattggttaaatcaccaggccgatcagctagcggataaacttaaacgccttactcagggaaccgtcctgatgtcattgacggcaacccagctcttgacccgcacacaagcaatgatgcagcaggttgatatccgctggagaagccaacttgcgatactgttggaaaatatcgaagcgttgaaggcggataacagcgcgtgggaagaaacgccagcaggtaaagccatcgcttatcagcttcgtgattatcgcggtgcatatctgttttctaaactcattagtgaagcgttcctgccggggcatggtttcccggttggcgtcgtcaatttcaattatctgacggcagatgagctggaaaaacgtcgcgcaataaaagctactcaggctgaccctaatgaagggggagaaagcttttctcgtcgtattgaaaaattgcccagccgtgatttgcctacagcattacgcgagtatgctccaggtgcagatgtggtattgggcggaaaagtatatcgttcctcgggcattatgcttggcaaggtacttgccagcgggcaggagctgtcaggcgatcatcatattccgtggttctggcattgtcgtaaatgtggtgcgggggcaaccagtactacccgtcctgtcgaatgtagtcactgcaaagcggatatacagcaacttgatgtgaagcgttatttacagcctgttggttttgcgacagatatccgttatcaggcgcataatgatgtatccatgcctgcacaacttccctggaaagatccacgtgttcttgtaccgtcttcggtgtgggtttctttacccgatgctgggctaggacgttaccgttttagccatagtggggaattgttccacttcagtgaaggggaatttgggcacggctacgcaatttgcctctcatgtggtcgggcagaatctcaaactcaaccccagcgtacccctgaaaatctaaagaacccagagagggaaaatacgcattacctgttgcgagggggcagtaacgatcgtcaggggagcaataaattgtgccacggtcatgtgcataaagatctgtggttgggatatagcagtcgtacagatatggttgagctgcaactcaatgatgataatggcctgttgatccgtgatgaggttgccgcgcgttcccttgcggtcgctttgcgtgaagggttagcgcataaattgggtatcgaaaatactgagctgggcgtgacgacgcagcaagcgcgcgatatcaatggctataccggatattccatcttcatatacgacaataatgcgggtggtgcaggttatgcagtgcaattgatcgaccattgggctgatgtctttaattacgccagaaaattgctcgattgcagttgcgataaattctgtcaccactgcttgctcagctacgacagtcagcattatgtcaacagattagatcgtcaccatgcattaaccctgcttaccaatgtacggttgcagcgacttaacctcgcgccagaatatcagtacttcggcgatggtagccgggttgaaactaaccctctgagtttacgtattgcgcaatgcctgaacagcgagatttatgactcctgctcgctggttcttgcggggccgcaggaacagtgggactttgcccaatggccattatttaaagagttgctccagtttgcctcctccggtgggcatgttgagttgctggtggccacgccgctggcaaacttaactgatagctccagacatcaactttccgcgttggcggcgatgccgggaggtcgcttacaagtgaaatccattgccactgcgcagctcatgcaaggaaaggggcgctggcttgcgcaggtgactcgcgaagggcaaagccaacagtgggccgcagacgacagcgctaccgttgcacctggtgaattatggggacaaagtgcgtcttcaccagtagtgacacttaaaggaacgtccggaaaaaccttctcgggtcagaccttaagtgcagaagatttactgcccgccttacccaccggggcggtgcgcatcaatctctgtgaacaactggacgggccgctggaaggttttggttcgcgtttctggtcgttagtcacgcaacagcacgctggctggaagcaggcatttccccgccacaaagagataacgcatgttgagtacagcgatcgttatcttaatagcccattcacggcgcgtttgttaggtgaaatcttaaccgagctggttgaacagggaatggcggaacgcgccagcctcactgtttgcgtcaaaaaattggattacaactctcgccaacacgacgctctctataacgcgtggcttaatgaggaagatcgtcagcaggttgtgaccactttacttgaagaaggatatctggggcctgcgtggccgggagcaattagctggttaacgggggataaccagagtacggagcatggacgagaactgacagtcaccttcagcgatggcagtcagcattatgtcctgctcgacatggggcttagctactggcgctgtattgaagataccttctttgattttgccctgcgattaccgcagcaagttgaacggctggcaaacacgcgagcgcgagctgttgccccgggtaatgaccttaggagttatattatcgctggataa

SEQ ID NO: 28719 - DNA, 3360 bp, Escherichia coli 6-175-07_S4_C2; identical to SEQ ID NO: 28707

SEQ ID NO: 28720 - DNA, 6315 bp, Escherichia coli 6-175-07_S4_C3
atggacgttcagcaactgcattatgcgccacttctaaatcagcttcatcagcgtgcggtgaggtcggtggtaagtcagttggcattgcggagcaagtcgttgactcattatctggaatcacaatattttcagcctcccggtcaggaggggtcactgcttgcagacccggtattcgaaagtacattcggctggatgcctgcggatgaaacaatggaggatttgcgggacaagctgatctccagcccgctggttgatgcattgagcaaagcgccagtgccatttcgtcatcaactcactgcgtggcgaacgattctggaagacaaaaaatccttgttagtgagcagcggtacgggatccgggaaaacagaatgctttatggtacctgttctggaagatcttattcgtcagcaaaaatcgccccgccagtcactaacagggacacaagctattttcttgtatccgttaaatgcattaattaacagccaacaggagcggcttcgcgaatggacgcgcggatttaaggggaaaatacgcttcgcgctatataatggcgaaacccggcataccaaatacgaaattcaggaagatcagttgaaagtacctgaacaagctttgagtcgggaagccatttatgaagcaccaccttccatcatggtgacgaataccaccatgctggaatatatgctgattcgtcgtaaagatgccccaatcatcgaaaagtctcaggggatgttaaagtatatcgtcctggatgaagcccatagttatattggttctcaggctgctgagttagcgctgcttttacgtcgtgttatgcaggctttcaatgttggacccggcacagataaacctgtgcagattatcgcgacctctgccactattggtgaagactctcctgaaggtaataaggagcttgctaaatttgtcgctgatctcgcgggcgttacagaacgtgatgtcaaagtggttcgcggttatcgacaaataccgcgggtatcggagtcgctgattcgtcatgaataccccacatctttaacttctcttaaatccctgagccctcaggatctttaccaacagctttgtcattaccgtgtggcccagcaattgcgtcaggcgttaactcatcccggacggcaggcagtacgtttgagtgagttgctcaatgttgccagaagaacctggccagatattaatcaccgtgagctactgcaactcctcgatctaatggcaagatcgcgagaaggtgaactggcttttacgccattacgtatgcatgggtttatcagaacactggcggggctatgggcatgttcaaacaaacaatgctcacataaagcacatgaattaaatcagagtgactggccatttggtcaggtatggtttgagcagcgccaatattgtgactgtggtgcgccggtatttgaagttttacgttgctccgggtgtggttcagcttatttgtctgccaaagaggagatgcgcggtgatggaacgaactggttggtagcgcaaccagccgctgccgaagtggatgagtttgctcttgatgtagatgtttattctgaagatgaagacaacgacgaattagacaataactctcaatttgatcgtctgattgcgagcgatggtgaaaaatatatcatttcactggaagaaacgacggcggggaaaattgatagtgaagcgcaaaagcactatgaaataaacctgttaagaccggaatctcgaggtgagggacgcaataactcctttgcttgtgtttgctgtggtgacactcaacggaaaaataatcctttattccgtccgcttcggctcggtgcgcccttttttttaaatgaaattattcctactctgctggagttttctccattaccgcaaacaagagaagagcagttaggaccgtttaatggtcgacgcttgctcacctttacggattcgcgtcagggtaccgctcgcatttcagcccgcttacagcaggatgccgataaagcgacgttgcgagctctttgttaccaggagctggcaaatattacagagccttcagcaaaactcagcccggcacactgtgcactgttagagaaagttattagccagttttctgtcctccctttaaaaaattccatcgacgcgctgaaaaaagcgatggctgcgaatgaggagcttagcccgacggacattcaggcacttaaaattattgagccgatggtgagttccttaagcccggatcatgctgaagcgatgcaaatacttcaggctaactctggcaatcagcagaagaaaaccatgtcatggcaaacgctgtctgaacagctggttggcagtgtggaccttgccgatagaatgagaggcagttttaaagaattgtctgggcttgatcttactaaacaacagtttgcagatttttgtttatacagcgagtttggtcgccgccctaaaaatgcctggaccctcgaaagtcttggtctggtagccattcactatccatttattgataaagttacaacctgcccgcaggactggaagacattattacccgatcccgataagcaattagcggaatggcgtaatttattgaagattactcttgatttctttatccgtgaaaacagtgccgttttttacgaaaacgagcaataccctcgctggatgggggcacgtttcccggtaaaaatgctccaggggccagataaaaaaaacaaagggcagaaacgtgatcaactttggccacaaatacgcgatcgccattataaccgggtcattaagctattaatcgcagtctttccggcaatacaacctgagcaggctcactggaaatcgttagttaaccacttaatgattgaggtctgggatgcaattcgaccctgcttacgtcagtttgagtcgggttatcagctggatattaaacaacaagctgaattttacagtccaaagcaagtgtggcgttgcccctatactcgacgtgcgttagacgtcacgttgctgggatactctccgtatttgccgggtagcaaagaaattgcacctgaaaaagcagtgttgattgaaatgcctgagcttcctgtacgtcactggcgtttgtctggtggtggagaaatcgcccgagaagaacgtctggagtggctggaaagtaatgcgctgattcaacatgcccgcgaggaaggattatggtctactcgcagcgaccgactggccctgaaagatagctggtatcgtctggaggaacactctgcgcagagaacgcctgagcagaaccagtttaatgaaaaacaatttaagtcaggcaaagttaatgtgctgaactgttccacgaccatggagatgggggtggatattggtggtatgagtttggtggcaatgaacaacgttcctccagctccggcaaattatttgcagcgtgcaggccgcgcgggtcgacgtggagagagtgcatctgctgccattacgttatgtaaaaacacggcgcatggaatggaggtattcaaagaccccctctgggcgttcaacactactgccagtgcgccacgggttcgttttgggagcagcagtattgttcaacgacatgttaatgccctggttttaggtctgtttttacgagctgaagttcctgatgcgacaaaactgagttgcaaatggttctttgaaggtgatgagagccagtgttttcgttttctccattggttaaatcaccaggccgatcagctagcggataaacttaaacgccttactcagggaaccgtcctgatgtcattgacggcaacccagctcttgacccgcacacaagcaatgatgcagcaggttgatatccgctggagaagccaacttgcgatactgttggaaaatatcgaagcgttgaaggcggataacagcgcgtgggaagaaacgccagcaggtaaagccatcgcttatcagcttcgtgattatcgcggtgcatatctgttttctaaactcattagtgaagcgttcctgccggggcatggtttcccggttggcgtcgtcaatttcaattatctgacggcagatgagctggaaaaacgtcgcgcaataaaagctactcaggctgaccctaatgaagggggagaaagcttttctcgtcgtattgaaaaattgcccagccgtgatttgcctacagcattacgcgagtatgctccaggtgcagatgtggtattgggcggaaaagtatatcgttcctcgggcattatgcttggcaaggtacttgccagcgggcaggagctgtcaggcgatcatcatattccgtggttctggcattgtcgtaaatgtggtgcgggggcaaccagtactacccgtcctgtcgaatgtagtcactgcaaagcggatatacagcaacttgatgtgaagcgttatttacagcctgttggttttgcgacagatatccgttatcaggcgcataatgatgtatccatgcctgcacaacttccctggaaagatccacgtgttcttgtaccgtcttcggtgtgggtttctttacccgatgctgggctaggacgttaccgttttagccatagtggggaattgttccacttcagtgaaggggaatttgggcacggctacgcaatttgcctctcatgtggtcgggcagaatctcaaactcaaccccagcgtacccctgaaaatctaaagaacccagagagggaaaatacgcattacctgttgcgagggggcagtaacgatcgtcaggggagcaataaattgtgccacggtcatgtgcataaagatctgtggttgggatatagcagtcgtacagatatggttgagctgcaactcaatgatgataatggcctgttgatccgtgatgaggttgccgcgcgttcccttgcggtcgctttgcgtgaagggttagcgcataaattgggtatcgaaaatactgagctgggcgtgacgacgcagcaagcgcgcgatatcaatggctataccggatattccatcttcatatacgacaataatgcgggtggtgcaggttatgcagtgcaattgatcgaccattgggctgatgtctttaattacgccagaaaattgctcgattgcagttgcgataaattctgtcaccactgcttgctcagctacgacagtcagcattatgtcaacagattagatcgtcaccatgcattaaccctgcttaccaatgtacggttgcagcgacttaacctcgcgccagaatatcagtacttcggcgatggtagccgggttgaaactaaccctctgagtttacgtattgcgcaatgcctgaacagcgagatttatgactcctgctcgctggttcttgcggggccgcaggaacagtgggactttgcccaatggccattatttaaagagttgctccagtttgcctcctccggtgggcatgttgagttgctggtggccacgccgctggcaaacttaactgatagctccagacatcaactttccgcgttggcggcgatgccgggaggtcgcttacaagtgaaatccattgccactgcgcagctcatgcaaggaaaggggcgctggcttgcgcaggtgactcgcgaagggcaaagccaacagtgggccgcagacgacagcgctaccgttgcacctggtgaattatggggacaaagtgcgtcttcaccagtagtgacacttaaaggaacgtccggaaaaaccttctcgggtcagaccttaagtgcagaagatttactgcccgccttacccaccggggcggtgcgcatcaatctctgtgaacaactggacgggccgctggaaggttttggttcgcgtttctggtcgttagtcacgcaacagcacgctggctggaagcaggcatttacccgccacaaagagataacgcatgttgagtacagcgatcgttatcttaatagcccattcacggcgcgtttgttaggtgaaatcttaaccgagctggttgaacagggaatggcggaacgcgccagcctcactgtttgcgtcaaaaaattggattacaactctcgccaacacgacgctctctataacgcgtggcttaatgaggaagatcgtcagcaggttgtgaccactttacttgaagaaggatatctggggcctgcgtggccgggagcaattagctggttaacgggggataaccagagtacggagcatggacgagaactgacagtcaccttcagcgatggcagtcagcattatgtcctgctcgacatggggcttagctactggcgctgtattgaagataccttctttgattttgccctgcgattaccgcagcaagttgaacggctggcaaacacgcgagcgcgagctgttgccccgggtaatgaccttaggagttatattatcgctggataa

SEQ ID NO: 28721 - DNA, 2937 bp, Escherichia coli 6-175-07_S4_C3
atgattgaaaatgagagcggttatttgattacctatttcagaaggatatatcaggcgcttcgtgggcaatcatctcaatatcctgccgctaaaattgcacaagaattaggcgatacgattcctgtcacaatgcaaaacgaactggtctatgaaatagccggtgaattctgcgagactctctgccgattacttagtgagcatcctcctcatagcagtgatcccgtttctgcattacgtaagctctctccagactggcatcttcaacttccactcgttctccccgaagcgaatgctgcagagattgtaaggcgattactttctcaatcttctgaaatacgcagtgcaagtagtcttcaggttgaaagaatctgggtcgatgttgatgacagttggtattgcgatgcccggttccgattcccggccacaatgcgtacagaacagttaacctctttgtttgaatgccatattcagccggagcagacccgactcatcatttcaggaaaatggaaaaatggcggggcaaggttggcaatgctaagccgttatgagcagcaagattggcgggtcgagttattacctattgcgatgcaaaaactctctggtgcagatgcaatggccgaaatctcattgtcgcttcatgaaggtccaattctgttaggtcacacaattccaaaaggcggttatgaacttactgaagaacttccctgggtttttgaagcgatgaatgagagtgaatcgcagctaaaacttgttggtatggggtctgtgagttccaggctaaatgctctgtttatttcgctaccgaaaaatagccatttagatattagtggagaaggtgagtttgatatcccaaggttgctaaaaaacagtgaacgcagcttaactaaaataagtggagtatttagcgttgttttacatgatggtgctgtttgtacaattcgcacccagcaactttatgattctgcgattgaatattatattaaatcgacagaagttgaactggttaaatcggattatcctgtccatcgagcctggccgaagatcggttggaaaaaggatctgcaatatggcattgtaccggagaaagaacttttttggcgttccattcgttcaggtaataatgcctggtattctgtcgcatcagaaatgccaaaaggacagatagaagtccggcgaatagttaatgatgaggttttatttagcggtaaagttgtagttttaccagcagacttcgatattaatattatacctgagagtgctcagcaaggcattattatgctttctggtataacggatactagaattgataaatattcaaacaatgaaaaagtaacacttaagtccgattattcacaaaacgagtgtgctatttattataattcatcgctgatgctggaaaataccgttgatttacgggtctcctggaaagatggttctaatcttaaactattattacctaagccggttagcggtggccgatttgtaactaatgatggttctgttcattttgatggtgtggcatctatagcacatttgcatggaatagatgctgagttattaaccatatcatgtgctggaagaggatatcttaatatcgagttattggatgaaaatccagtagctgaaaaattccgttatttacatgccgaccttcctcttttatcaggacgcaatgacaaattacaacaaatttcactttatgagaactataatttgctaaatgctatgctggcatgtgcatggaacagcaatagtacattatgtgttgatttttactctgacagatttggaaaggataaagcaacactcaatattaaacgctacgatggtagttttattgaacacgatcaagggttactggttgatataaaaaattctgttgtttttcctgcaaatagaatagacgaactggttgttgatgctatttctcttaagaatcctggcttacacatatcattgttaaaaaaagatgagtttgcttataatctttcagctctgaatgttcaggatagtccatggttaattgtgggaaaacttgatggtacagctcgcattgcaccagtaattaaatggatgctacctgtattgcagacaaatgatttattactaaatgctctatgcgaagcagacccagaacagcgcaaaaaaaattttaatgagctaatttttgaaatagataacaacccattgcaaaattattgctgtttattaacagagtatattaagaaatacaaaatgaataatggcttatccttgctggatctggacttgttcagatgtatttcgagtaattaccgcgtggttgttcaattgttaatatcatcatgtctttctggtgatagcgatacgatttatgatatacaggaagaattacccttttcatggggatggattcccgtttcaatctggaaagatgttttccaaaaatgttggacttatctggagaaacagattaacgataaaacattagcattacatatattgcaaccctttattgcttttatgaaccatcgtgcacatatcgatcgtcggctggctccgattgcgaatatgttacttacatatagtgagagcctaccaaccggttgtgatgtattgccaactgttagtcgtgagcagtttaatgaagctaaacagatgctattaaggaaccccgacagctttgggcgtatcagtatcttccctaaagaactttggtctagtgctattactccagagttaaaatctgtttttaataagctttggattgaagataaatatcactcacggcttgaaaaacgttttaatttgatgttagtcgcagcgctgttaacccaaaaagataataacctgatacatcaactgtctgcgctttttgaatttcactatcagcaagccccacagcaattaggggtaatctatcaatattattttgaacaagcaggagtatgtcattga

SEQ ID NO: 28722 - DNA, 6345 bp, Escherichia coli 6-319-05_S1_C1
atgactacacgctatttttcgtcacttattgaacaatcgttgtctcgttcaactgaagcaacgctcagtatcatgggcgttacaaacccgcagttgcgtgaacatctcgcgcaacaaatgggggctgattgtgggaaaccgggctcattccttgcttctccggtattccagcaaatgtttggatggaaggagtcaaatcacacgatgcgcagcctgacggaaggcaacgcattgttgagcaaagcagtggttgattcactggataatcagagtaatggccggtaccgatttggtgctgactggaagccttttacacaccagttagccagttggaaagctttgctggaaaagaaacattcagtggtggtaaccagtggtacgggttcaggtaaaacggaatgttttatggttccggtgctggaagatctttaccgggaactgcatgaaaatggcaacaatccgttggtcggtgtccgagccctttttctctatccattgaacgccttgattaattcacagcgcgagcgtctggatgcctggacgcgtggttttggtactggaatccgctactgcttgtataacggaaatacagaagagctccacgcaaaaatgaaaacagtgcaggataatagaccaaatgaagtcttatcccgtgaaaagatgcgtctggagccagccccgattctggtgaccaacggcacgatgctggaatatatgatggttcgccaggtcgacgccccgattatccagcaatccaaagcacaaaaatcactacgctggattgtactggatgaagcgcatacctatgtcgggtcgcaggccgctgaactggcactccagctgcgtcgtgtgatgacagcgtttggcgtgacgccagatgatgtgcgctttgtagcgacctctgcgaccattgccggcagcgacgccgaaaagcagctgaaaaaatttctctctgaattatccggtatcccgcaggagcgcatcgatgttctggacggaagtcgggtgattcctgaactggaaccatccaaaaacgtttctgttccgttagacgaaatagagcaaatacctgatctggatctaaaagataaaaatgataataaaattaaagggataagtcctgagcgcttttatgcgctcacgcactcccccgaagcacgttacatacgcgagatgttggtcaaacatcccaatccaatgaagctggatgagatgacagagcggttaaacatactgacaaaacagcatcacagccagcatgaagtactgcgttggatcgacgtctgttcagggacccaacctaatgcaaaggatcccgcatttcttaaagtcagggcgcatatcttccagcgtaatacccagggaatatgggcttgtgtggataaagattgcaggttaaagcacggtacaccgctcgaaaaaggctggccctttggctatgtatatgtgaaccagcgacaaaattgcgattgtggaagccctgtttacgaagtggcgttctgtaatgattgtaatgaacctcatcttctggcgcgggacaaaaagggcaaactagtccagtgggaaaataaaggtggcgatgaattctctttgcaggatgaagtacctgttgaacatgacgctacagcggaaaaagtcgaaaaagagaacagtttccagcctccgttgattattgccgcaggagagaccagcgaggccggttataccctacaacgcctcgaccgccagacgcgccgtattggcgttattaacaatgacagcattccgctgattattaatgatgttgaacaggtttgtagtgccagtggctgtggctacagaggcatgagtgggaaacagcccttccggcgtgcactattaggtgggccattttacgttactaatatcgtgcccaccgttctagagtattgtcaggactttaccagtgatgaaggcaaagagggcgtcggaccagattcgttgccaggacgaggtcgtcgactcatcacctttacagacagtcgacaagggacagcccgaatggcggtgcgtatgcagcaagaagcagaacgcagtcgcttacgcggaagcgtagtcgaaattctcagctggcatcaaaggacgcaaacgtctacagcgccgaatgccaatgccgatctggaaaaattagcgaccagggcgaagcaagcccgtgagcaggcagaagaatatcgaagctggggaatgccagaccaggcgaaattgtcacaagcgcaggctgaacagcttgaacaggcttatcagtttgcaatcggcggaaaagcagcaaccaccctagtatcccgcacctggactgaaatggttaacgagcttaaagataaagccgatatccgtggcccggttctgaaatataactactatttgaagcctgaagtgtttaatgaaaacggcgggcctctaaaactttctgaaatgttgttgttccgggaattcatgcgtcgccctaaacggactaacagcctggaaacacaggggctggttcaggttggttacctgggactggagaaaatacataagctccctatgcactggcaggaaagggaattaacgctggatgactggcgcgattttctcaaggttacgttggatcattacgttcgcgagagcaacttcacacagctggatgatgagctgaaaaactggattggtagccgtttttcatcaaaattcgtccgtaacccggaatcaaaagatcctgaagataatcagaatagacgctggcctcaaattcgtaatggcaacgtatcccatcgtttagcgaagttactgatgctgggggctggattcaaaaccgtcaatacggcgactattgatattatcaatacatggctgaaagaagcatgggcccaacttaccggaccgcttgcagtactgaaacccgatggcaaccgtttttatttaccgaaagagcatatgactttttctttaatcacggatgcctggatttgcccggtaaccaataaaatcctggatacggcttttaaaggcttaaccccttatctgcctacccatatttcgttcgagcatcttacccaggcgcaatatgacacttttgtcgcgcagaaagtcaccatgccggaaatctggaagctggatcgttcacaggaagactacgcagagggtctggcaaaagcacgcgactgggtcagcaatgatccgctgatcgcacaattgcggtcagaaaacgtctggacagacatcaacgatcgtgtcgtggaaggcggtttctactatcgcactgccgagcactctgcccagcagtcgtcagaacgcctgcaaagctatgaaaagatgttcaagaacgggcaactaaatgttctcaactgttccaccaccatggaaatgggggttgatatcgggggcattacagcggtggtaatgaacaatgtaccgccacatcctgccaactatttacagcgcgccgggcgagccgggcgtagtaaagagtcgcgtgcgatctcttacaccctatgcaaaggtaacccacacgaccaacaggtttttgccaacccgctctggccgtttgaaaccatgatcccggcacccatggtcgcgatgaactccgcccgactggtacaacgtcacgtcaatgcattattactgtccgactttttatgtaacgttattggcgaaaccgataaagagaaaaccagcctcgatagcctctggtttttcggtgaagatgacgggcagtcaaaatgcgaacgctttaaaatctggctggaacgcccggttcttgatatcgacacggcgctggaacggctggtgaaaggtacggcgttgcatggtgcaagagctgaacatctgcgggataaaacaatcagcgcgatcaccttcctgcaacagcggtggctctccgtttatcgcgatctcgtgacccaggagcgtgagtcgcagccacaaacgccttatcgtaagcgcatagagctggagaagaaacgacactgtggagagtatctgctgcgcgatctggctgccagaactttcctgccgggatacggcttcccgacagatgtagtgacgtttgataacttcacaatggaagattatatccgcgaaaaattgcaaaaaagtcgtgataaaaaggaccgtgaagataacgtctcccgttataaaggattaccttcccgtaacctcggtgttgccattcgtgaatatgcaccgggagcagagatcattcttgatggccgtgtcttccgctctgccggtgtctcactgcactggcacaatattaatgctgataccaatgaagcccagcgtctggattgtgcctggcgctgtcacaaatgcgggaccattggctatgaagaggggatgagcagttccgggatgctcttttgctccaatagcgcctgcggcgaaaaaataatcatggataatcgccgtcaggtgttgcagcctgccgggtttgtcaccgatgcacacgctccggtaacgaacaatattgaaaccatgaaattcgtcccggttgtccccgcctgggtctttgttaaagcagagcccgtaccgttgcctaacccgctaatgggttatatggcttctggggctgatgggcatgttttccagcaaagtctgggggaaggtggacacggttatgcattgtgtctgagctgtggccgtgcggagtcgatgctgaatgaaaatgatgctccgaaaagtatggaagctcactatccaccgcgtccgggtaaagcggaccgcgacagccagaatcatcgtctgatttgcccaggttcgacggcactcatgaagaacgtcaccctgggcgcactggcgcgcaccgatgtctttgaaatggttctgcgcaaaccgcaaaaaggcgagtatctgccagataacacagaagaggggcggattgtcgctatgactctggcggttgctctgcgtcaggcgctagcgggcgttctgggtatctccggcgcagaactcggctattctgtacgcccggtcagactggaggatgggcaatcggtattagccgttcagctttatgatgtgatcagcggtggtgcaggttttgcctccagcgcaccggtacacattgaagctattttgcagggaatggtgaaacagttaggttgccgccattgtgatactgcatgtagtgaatgcctgcttgattcccagactcgccacgatcacgatttgctggatcgcaaagcggcgctggcctggcttggcgatgacttcacgtattacatcggtttaccggatgaagagacattctcgctgccggatgcccgctactgccctggcgctattggcgatacgattcgccgggcgattaacgaaggcgctgaaaagctcaccctgtggatgaccggcgcgcccaatgagtgggatttatacgcccgtcagttccgcgcggcggttcagagctatcggctaaaagacaacgtcgaggtcgatcttgttatacctgcgggagtggatgacccggatctgttgtatgaactatcgcaatttactgcgctgggtgtgcggctgtgccatgttgaacaggatctgcaattgccgatcgttgcccaggttacctttgccgatcgcgtgatgacgctggcttctcgcagccagcaggcaacgattccggggccggagtggcacctgaatgacgaactggtggtgcgtagtctcggttataaaacggtagaactgaacgagtttattctgccggctaaagccgccaacgctgtcgagcgggtcaaagacattcagatccacaaacagttgaatggaccactttcgcagtttggacaacgcttctgggacgtgctgtttaacgaccatgaagaagcacagtcactgatgaataacacgcgaattaccggcgttcactataccgatcgctatctgcaaaacccggttgcgctggcgttgttgggatcaattctgagaccgctaaaaacaaagctgaccgatgtcgctgaagtggcgctggatacgctgtttaaagataaagatcgccccggtaaccggcctttccatgactggatgagcatagcggattttcaggatttcgctgatcagtggtttgctgctgcgctgggcaggccgatagaactaacggtgttcgactcgccgcgcgatatccctcaccatcgtaaactgacggtgacttttgaggatggtcaggttttgaagatccgcttcgatcaggggatgggctactggcgtatcaactttgcatcgcaatggcattactttgacttccgcgatgacgtttctttccagttagtcaaaatggctcaggcctgcaatgaaggaaatgtggccaacagcgaagagagctgggcaacggatgtgctggtggaggtgagcgcctcctga

SEQ ID NO: 28723 - DNA, 1947 bp, Escherichia coli 6-319-05_S1_C1
atgttccatagtgaaaccaaccttgcaaatacggattaccgggaaaaccggtccatgatactgtccggtttatcactttgggagaaaggcagtccgctgcataaatctacgcaacaggttagaacccaaggcccgatacggcatgcgggctgcaggcagagaaaactggccgattttctctgcactggagggataatacaagagatgctgggggctcaatatctttctatccgtaatagtaataatgaaacgctcttgcgtcgcaaaatcggtatcttgcctgctgatttcagtattgagataaaaggtggaatgcacgcaaatgaaggcactatcgtaatcaccacacagcatccttgtgtagcaaaacttaaagataaaacattggaggctacacgtaagcgtactgaggggcgaacagagatacaacttaaagcggaaggggtacctccggcatttattacattacaagttctgcctaatttggcggctgaccccatcgacattgagttaccttttcccgctaaaggctgtctcgctcttgatgtaaacggacgtcctctggataaaaacattacgctgcatgatctgctgggttccagagcgtttctgttctccagaaatggtgagccgacaaaatatacattgcagttgtatttgcgctccgttagtggattacaggcatggcatgaatggtgttatacggcgttgagcgatcgtcctgttgaattgaatctctatagtctgcgcgaacatattgagaacctgatttcacttgaggcaggtattgatcaggttgttgagatgcgtattacgggggcaggtgtggtcatggcctggcaaattcgtcgctataaatacagcctgcgctatgattatgaaaaagaactattactcagccagtcagtgaaccatcgtgctgggcagattccttcccccgttatcatgctgttaagtgaacccgagaggaaatccattcccttagcatctagaatgagcgagggagtgcctgtcggtgaatatgagttgagctcaatcgttaacaaaaatggaccgtggttggttgtccctaaaccgggtgaagagatggcttttcgtccctgcttcattcgtggcgaatcttcgttaccggtagaagaaagcaacatccgctcattgcagaaagcgacccagctttttaatccacaggcagaagttaataccatcacacgggttctcggacagatggctaacgatcctgcccattccggctggcaatttatgcgtagcctgtacgatcaattcgggtatttaccactggcaacctttgaagtatggcgtgcactggtgcagcatccgcaggcattggcaatgtcgctcttcaaatttgaaatgtcagcagagtacctgagtcgtattgagaatgagttccctattttatgggagtttttccccatctttgagatcaaagctgcatctgagcgtttcaaattgttcctgagccaaaaaggtgcaccggaggaaacccaaaaattactggttactaatatgtttcaacggctggggctcgtgttcccgacatatgccgatgaaattgagaaatggttaagtaacggatatctccctccgtctattcctgaatcttgtgtccacgggtggtatcaggagctcttacgtgagcacagtgaggctcgctggcctgaatatggctgtaagcgtctgtatgaatggatgatgtcacaaaaaaatccagtgattggtattaatcctgatgcagattaccgctattccgtggcctggttacccgtcttcgccgcagcggtggcaagcggaaatgcttcttttgaatctgtatttgaccgtaaacccggtgccgtatttttcctgaggcaagtcagggatttcgattcccgctggtttaaggccatcttccagtgcagcctgttgcgttatgttgctaaaaaataa

SEQ ID NO: 28724 - DNA, 6345 bp, Escherichia coli 6-319-05_S1_C2; identical to SEQ ID NO: 28682

SEQ ID NO: 28725 - DNA, 1947 bp, Escherichia coli 6-319-05_S1_C2
atgttccatagtgaaaccaaccttgcaaatacggattaccgggaaaaccggtccatgatactgtccggtttatcactttgggagaaaggcagtccgctgcataaatctacgcaacaggttagaacccaaggcccgatacggcatgcggactgcaggcagagaaaactggccgattttctctgcactggagggataatacaagagatgctgggggctcaatatctttctatccgtaatagtaataatgaaacgctcttgcgtcgcaaaatcggtatcttgcctgctgatttcagtattgagataaaaggtggaatgcacgcaaatgaaggcactatcgtaatcaccacacagcatccttgtgtagcaaaacttaaagataaaacattggaggctacacgtaagcgtactgaggggcgaacagagatacaacttaaagcggaaggggtacctccggcatttattacattacaagttctgcctaatttggcggctgaccccatcgacattgagttaccttttcccgctaaaggctgtctcgctcttgatgtaaacggacgtcctctggataaaaacattacgctgcatgatctgctgggttccagagcgtttctgttctccagaaatggtgagccgacaaaatatacattgcagttgtatttgcgctccgttagtggattacaggcatggcatgaatggtgttatacggcgttgagcgatcgtcctgttgaattgaatctctatagtctgcgcgaacatattgagaacctgatttcacttgaggcaggtattgatcaggttgttgagatgcgtattacgggggcaggtgtggtcatggcctggcaaattcgtcgctataaatacagcctgcgctatgattatgaaaaagaactattactcagccagtcagtgaaccatcgtgctgggcagattccttcccccgttatcatgctgttaagtgaacccgagaggaaatccattcccttagcatctagaatgagcgagggagtgcctgtcggtgaatatgagttgagctcaatcgttaacaaaaatggaccgtggttggttgtccctaaaccgggtgaagagatggcttttcgtccctgcttcattcgtggcgaatcttcgttaccggtagaagaaagcaacatccgctcattgcagaaagcgacccagctttttaatccacaggcagaagttaataccatcacacgggttctcggacagatggctaacgatcctgcccattccggctggcaatttatgcgtagcctgtacgatcaattcgggtatttaccactggcaacctttgaagtatggcgtgcactggtgcagcatccgcaggcattggcaatgtcgctcttcaaatttgaaatgtcagcagagtacctgagtcgtattgagaatgagttccctattttatgggagtttttccccatctttgagatcaaagctgcatctgagcgtttcaaattgttcctgagccaaaaaggtgcaccggaggaaacccaaaaattactggttactaatatgtttcaacggctggggctcgtgttcccgacatatgccgatgaaattgagaaatggttaagtaacggatatctccctccgtctattcctgaatcttgtgtccacgggtggtatcaggagctcttacgtgagcacagtgaggctcgctggcctgaatatggctgtaagcgtctgtatgaatggatgatgtcacaaaaaaatccagtgattggtattaatcctgatgcagattaccgctattccgtggcctggttacccgtcttcgccgcagcggtggcaagcggaaatgcttcttttgaatctgtatttgaccgtaaacccggtgccgtatttttcctgaggcaagtcagggatttcgattcccgctggtttaaggccatcttccagtgcagcctgttgcgttatgttgctaaaaaataa

SEQ ID NO: 28726 - DNA, 6345 bp, Escherichia coli 6-319-05_S1_C3; identical to SEQ ID NO: 28682

SEQ ID NO: 28727 - DNA, 1947 bp, Escherichia coli 6-319-05_S1_C3; identical to SEQ ID NO: 28725

SEQ ID NO: 28728 - DNA, 6315 bp, Escherichia coli 6-537-08_S4_C1
atggacgttcagcaactgcattatgcgccacttctaaatcagcttcatcagcgtgcggtgaggtcggtggtaagtcagttggcattgcggagcaagtcgttgactcattatctggaatcacaatattttcagcctcccggtcaggaggggtcactgcttgcagacccggtattcgaaagtacattcggctggatgcctgcggatgaaacaatggaggatttgcgggacaagctgatctccagcccgctggttgatgcattgagcaaagcgccagtgccatttcgtcatcaactcactgcgtggcgaacgattctggaagacaaaaaatccttgttagtgagcagcggtacgggatccgggaaaacagaatgctttatggtacctgttctggaagatcttattcgtcagcaaaaatcgccccgccagtcactaacagggacacaagctattttcttgtatccgttaaatgcattaattaacagccaacaggagcggcttcgcgaatggacgcgcggatttaaggggaaaatacgcttcgcgctatataatggcgaaacccggcataccaaatacgaaattcaggaagatcagttgaaagtacctgaacaagctttgagtcgggaagccatttatgaagcaccaccttccatcatggtgacgaataccaccatgctggaatatatgctgattcgtcgtaaagatgccccaatcatcgaaaagtctcaggggatgttaaagtatatcgtcctggatgaagcccatagttatattggttctcaggctgctgagttagcgctgcttttacgtcgtgttatgcaggctttcaatgttggacccggcacagataaacctgtgcagattatcgcgacctctgccactattggtgaagactctcctgaaggtaataaggagcttgctaaatttgtcgctgatctcgcgggcgttacagaacgtgatgtcaaagtggttcgcggttatcgacaaataccgcgggtatcggagtcgctgattcgtcatgaataccccacatctttaacttctcttaaatccctgagccctcaggatctttaccaacagctttgtcattaccgtgtggcccagcaattgcgtcaggcgttaactcatcccggacggcaggcagtacgtttgagtgagttgctcaatgttgccagaagaacctggccagatattaatcaccgtgagctactgcaactcctcgatctaatggcaagatcgcgagaaggtgaactggcttttacgccattacgtatgcatgggtttatcagaacactggcgggtctatgggcatgttcaaacaaacaatgctcacataaagcacatgaattaaatcagagtgactggccatttggtcaggtatggtttgagcagcgccaatattgtgactgtggtgcgccggtatttgaagttttacgttgctccgggtgtggttcagcttatttgtctgccaaagaggagatgcgcggtgatggaacgaactggttggtagcgcaaccagccgctgccgaagtggatgagtttgctcttgatgtagatgtttattctgaagatgaagacaacgacgaattagacaataactctcaatttgatcgtctgattgcgagcgatggtgaaaaatatatcatttcactggaagaaacgacggcggggaaaattgatagtgaagcgcaaaagcactatgaaataaacctgttaagaccggaatctcgaggtgagggacgcaataactcctttgcttgtgtttgctgtggtgacactcaacggaaaaataatcctttattccgtccgcttcggctcggtgcgcccttttttttaaatgaaattattcctactctgctggagttttctccattaccgcaaacaagagaagagcagttaggaccgtttaatggtcgacgcttgctcacctttacggattcgcgtcagggtaccgctcgcatttcagcccgcttacagcaggatgccgataaagcgacgttgcgagctctttgttaccaggagctggcaaatattacagagccttcagcaaaactcagcccggcacactgtgcactgttagagaaagttattagccagttttctgtcctccctttaaaaaattccatcgacgcgctgaaaaaagcgatggctgcgaatgaggagcttagcccgacggacattcaggcacttaaaattattgagccgatggtgagttccttaagcccggatcatgctgaagcgatgcaaatacttcaggctaactctggcaatcagcagaagaaaaccatgtcatggcaaacgctgtctgaacagctggttggcagtgtggaccttgccgatagaatgagaggcagttttaaagaattgtctgggcttgatcttactaaacaacagtttgcagatttttgtttatacagcgagtttggtcgccgccctaaaaatgcctggaccctcgaaagtcttggtctggtagccattcactatccatttattgataaagttacaacctgcccgcaggactggaagacattattacccgatcccgataagcaattagcggaatggcgtaatttattgaagattactcttgatttctttatccgtgaaaacagtgccgttttttacgaaaacgagcaataccctcgctggatgggggcacgtttcccggtaaaaatgctccaggggccagataaaaaaaacaaagggcagaaacgtgatcaactttggccacaaatacgcgatcgccattataaccgggtcattaagctattaatcgcagtctttccggcaatacaacctgagcaggctcactggaaatcgttagttaaccacttaatgattgaggtctgggatgcaattcgaccctgcttacgtcagtttgagtcgggttatcagctggatattaaacaacaagctgaattttacagtccaaagcaagtgtggcgttgcccctatactcgacgtgcgttagacgtcacgttgctgggatactctccgtatttgccgggtagcaaagaaattgcacctgaaaaagcagtgttgattgaaatgcctgagcttcctgtacgtcactggcgtttgtctggtggtggagaaatcgcccgagaagaacgtctggagtggctggaaagtaatgcgctgattcaacatgcccgcgaggaaggattatggtctactcgcagcgaccgactggccctgaaagatagctggtatcgtctggaggaacactctgcgcagagaacgcctgagcagaaccagtttaatgaaaaacaatttaagtcaggcaaagttaatgtgctgaactgttccacgaccatggagatgggggtggatattggtggtatgagtttggtggcaatgaacaacgttcctccagctccggcaaattatttgcagcgtgcaggccgcgcgggtcgacgtggagagagtgcatctgctgccattacgttatgtaaaaacacggcgcatggaatggaggtattcaaagaccccctctgggcgttcaacactactgccagtgcgccacgggttcgttttgggagcagcagtattgttcaacgacatgttaatgccctggttttaggtctgtttttacgagctgaagttcctgatgcgacaaaactgagttgcaaatggttctttgaaggtgatgagagccagtgttttcgttttctccattggttaaatcaccaggccgatcagctagcggataaacttaaacgccttactcagggaaccgtcctgatgtcattgacggcaacccagctcttgacccgcacacaagcaatgatgcagcaggttgatatccgctggagaagccaacttgcgatactgttggaaaatatcgaagcgttgaaggcggataacagcgcgtgggaagaaacgccagcaggtaaagccatcgcttatcagcttcgtgattatcgcggtgcatatctgttttctaaactcattagtgaagcgttcctgccggggcatggtttcccggttggcgtcgtcaatttcaattatctgacggcagatgagctggaaaaacgtcgcgcaataaaagctactcaggctgaccctaatgaagggggagaaagcttttctcgtcgtattgaaaaattgcccagccgtgatttgcctacagcattacgcgagtatgctccaggtgcagatgtggtattgggcggaaaagtatatcgttcctcgggcattatgcttggcaaggtacttgccagcgggcaggagctgtcaggcgatcatcatattccgtggttctggcattgtcgtaaatgtggtgcgggggcaaccagtactacccgtcctgtcgaatgtagtcactgcaaagcggatatacagcaacttgatgtgaagcgttatttacagcctgttggttttgcgacagatatccgttatcaggcgcataatgatgtatccatgcctgcacaacttccctggaaagatccacgtgttcttgtaccgtcttcggtgtgggtttctttacccgatgctgggctaggacgttaccgttttagccatagtggggaattgttccacttcagtgaaggggaatttgggcacggctacgcaatttgcctctcatgtggtcgggcagaatctcaaactcaaccccagcgtacccctgaaaatctaaagaacccagagagggaaaatacgcattacctgttgcgagggggcagtaacgatcgtcaggggagcaataaattgtgccacggtcatgtgcataaagatctgtggttgggatatagcagtcgtacagatatggttgagctgcaactcaatgatgataatggcctgttgatccgtgatgaggttgccgcgcgttcccttgcggtcgctttgcgtgaagggttagcgcataaattgggtatcgaaaatactgagctgggcgtgacgacgcagcaagcgcgcgatatcaatggctataccggatattccatcttcatatacgacaataatgcgggtggtgcaggttatgcagtgcaattgatcgaccattgggctgatgtctttaattacgccagaaaattgctcgattgcagttgcgataaattctgtcaccactgcttgctcagctacgacagtcagcattatgtcaacagattagatcgtcaccatgcattaaccctgcttaccaatgtacggttgcagcgacttaacctcgcgccagaatatcagtacttcggcgatggtagccgggttgaaactaaccctctgagtttacgtattgcgcaatgcctgaacagcgagatttatgactcctgctcgctggttcttgcggggccgcaggaacagtgggactttgcccaatggccattatttaaagagttgctccagtttgcctcctccggtgggcatgttgagttgctggtggccacgccgctggcaaacttaactgatagctccagacatcaactttccgcgttggcggcgatgccgggaggtcgcttacaagtgaaatccattgccactgcgcagctcatgcaaggaaaggggcgctggcttgcgcaggtgactcgcgaagggcaaagccaacagtgggccgcagacgacagcgctaccgttgcacctggtgaattatggggacaaagtgcgtcttcaccagtagtgacacttaaaggaacgtccggaaaaaccttctcgggtcagaccttaagtgcagaagatttactgcccgccttacccaccggggcggtgcgcatcaatctctgtgaacaactggacgggccgctggaaggttttggttcgcgtttctggtcgttagtcacgcaacagcccgctggctggaagcaggcttttccccgccacaaagagataacgcatgttgagtacagcgatcgttatcttaatagcccattcacggcgcgtttgttaggtgaaatcttaaccgagctggttgaacagggaatggcggaacgcgccagcctcactgtttgcgtcaaaaaattggattacaactctcgccaacacgacgctctctataacgcgtggcttaatgaggaagatcgtcagcaggttgtgaccactttacttgaagaaggatatctggggcctgcgtggccgggagcaattagctggttaacgggggataaccagagtacggagcatggacgagaactgacagtcaccttcagcgatggcagtcagcattatgtcctgctcgacatggggcttagctactggcgctgtattgaagataccttctttgattttgccctgcgattaccgcagcaagttgaacggctggcaaacacgcgagcgcgagctgttgccccgggtaatgaccttaggagttatattatcgctggataa

SEQ ID NO: 28729 - DNA, 3360 bp, Escherichia coli 6-537-08_S4_C1
ttgcttgtgaaaactccagttaacccacttttgcaatggcttaacatgttttttagtcgccgttcattatccggagctgatggacgggcgttatatgcttaccgttgtactgatacagagtacgaaagtttggcagaactactgcgtacatatgccccccgtagttatccaagaacgatattcatttcctatagcgatgttctatttagcatatatgccgcagagtttatccgccggactcatacggtcggacaccctaaatgggacacaattttagattctattaactggaaagttccgtatgttcatcgacagaagctggttaatgatggcattcgctactggaaaagaaagataagaaacctggggcaagcttcgggttatctccatacactggcttgtgaaggtggtttacctatccgcatgattgaaaatgagagcggttatttgattacctatttcagaaggatatatcaggcgcttcgtgggcaatcatctcaatatcctgccgctaaaattgcacaagaattaggcgatacgattcctgtcacaatgcaaaacgaactggtctatgaaatagccggtgaattctgcgagactctctgccgattacttagtgagcatcctcctcatagcagtgatcccgtttctgcattacgtaagctctctccagactggcatcttcaacttccactcgttctccccgaagcgaatgctgcagagattgtaaggcgattactttctcaatcttctgaaatacgcagtgcaagtagtcttcaggttgaaagaatctgggtcgatgttgatgacagttggtattgcgatgcccggttccgattcccggccacaatgcgtacagaacagttaacctctttgtttgaatgccatattcagccggagcagacccgactcatcatttcaggaaaatggaaaaatggcggggcaaggttggcaatgctaagccgttatgagcagcaagattggcggggcgagttattacctatttcgatgcaaaaactctctggtgcagatgcaatggccgaaatctcattgtcgcttcatgaaggtccaattctgttaggtcacacaattccaaaaggcggttatgaacttactgaagaacttccctgggtttttgaagcgatgaatgagagtgaatcgcagctaaaacttgttggtatggggtctgtgagttccaggctaaatgctctgtttatttcgctaccgaaaaatagccatttagatattagtggagaaggtgagtttgatatcccaaggttgctaaaaaacagtgaacgcagcttaactaaaataagtggagtatttagcgttgttttacatgatggtgctgtttgtacaattcgcacccagcaactttatgattctgcgattgaatattatattaaatcgacagaagttgaactggttaaatcggattatcctgtccatcgagcctggccgaagatcggttggaaaaaggatctgcaatatggcattgtaccggagaaagaacttttttggcgttccattcgttcaggtaataatgcctggtattctgtcgcatcagaaatgccaaaaggacagatagaagtccggcgaatagttaatgatgaggttttatttagcggtaaagttgtagttttaccagcagacttcgatattaatattatacctgagagtgctcagcaaggcattattatgctttctggtataacggatactagaattgataaatattcaaacaatgaaaaagtaacacttaagtccgattattcacaaaacgagtgtgctatttattataattcatcgctgatgctggaaaataccgttgatttacgggtctcctggaaagatggttctaatcttaaactattattacctaagccggttagcggtggccgatttgtaactaatgatggttctgttcattttgatggtgtggcatctatagcacatttgcatggaatagatgctgagttattaaccatatcatgtgctggaagaggatatcttaatatcgagttattggatgaaaatccagtagctgaaaaattccgttatttacatgccgaccttcctcttttatcaggacgcaatgacaaattacaacaaatttcactttatgagaactataatttgctaaatgctatgctggcatgtgcatggaacagcaatagtacattatgtgttgatttttactctgacagatttggaaaggataaagcaacactcaatattaaacgctacgatggtagttttattgaacacgatcaagggttactggttgatataaaaaattctgttgtttttcctgcaaatagaatagacgaactggttgttgatgctatttctcttaagaatcctggcttacacatatcattgttaaaaaaagatgagtttgcttataatctttcagctctgaatgttcaggatagtccatggttaattgtgggaaaacttgatggtacagctcgcattgcaccagtaattaaatggatgctacctgtattgcagacaaatgatttattactaaatgctctatgcgaagcagacccagaacagcgcaaaaaaaattttaatgagctaatttttgaaatagataacaacccattgcaaaattattgctgtttattaacagagtatattaagaaatacaaaatgaataatggcttatccttgctggatctggacttgttcagatgtatttcgagtaattaccgcgtggttgttcaattgttaatatcatcatgtctttctggtgatagcgatacgatttatgatatacaggaagaattacccttttcatggggatggattcccgtttcaatctggaaagatgttttccaaaaatgttggacttatctggagaaacagattaacgataaaacattagcattacatatattgcaaccctttattgcttttatgaaccatcgtgcacatatcgatcgtcggctggctccgattgcgaatatgttacttacatatagtgagagcctaccaaccggttgtgatgtattgccaactgttagtcgtgagcagtttaatgaagctaaacagatgctattaaggaaccccgacagctttgggcgtatcagtatcttccctaaagaactttggtctagtgctattactccagagttaaaatctgtttttaataagctttggattgaagataaatatcactcacggcttgaaaaacgttttaatttgatgttagtcgcagcgctgttaacccaaaaagataataacctgatacatcaactgtctgcgctttttgaatttcactatcagcaagccccacagcaattaggggtaatctatcaatattattttgaacaagcaggagtatgtcattga

SEQ ID NO: 28730 - DNA, 6315 bp, Escherichia coli 6-537-08_S4_C2; identical to SEQ ID NO: 28704

SEQ ID NO: 28731 - DNA, 3360 bp, Escherichia coli 6-537-08_S4_C2
ttgcttgtgaaaactccagttaacccacttttgcaatggcttaacatgttttttagtcgccgttcattatccggagctgatggacgggcgttatatgcttaccgttgtactgatacagagtacgaaagtttggcagaactactgcgtacatatgccccccgtagttatccaagaacgatattcatttcctatagcgatgttctatttagcatatatgccgcagagtttatccgccggactcatacggtcggacaccctaaatgggacacaattttagattctattaactggaaagttccgtatgttcatcgacagaagctggttaatgatggcattcgctactggaaaagaaagataagaaacctggggcaagcttcgggttatctccatacactggcttgtgaaggtggtttacctatccgcatgattgaaaatgagagcggttatttgattacctatttcagaaggatatatcaggcgcttcgtgggcaatcatctcaatatcctgccgctaaaattgcacaagaattaggcgatacgattcctgtcacaatgcaaaacgaactggtctatgaaatagccggtgaattctgcgagactctctgccgattacttagtgagcatcctcctcatagcagtgatcccgtttctgcattacgtaagctctctccagactggcatcttcaacttccactcgttctccccgaagcgaatgctgcagagattgtaaggcgattactttctcaatcttctgaaatacgcagtgcaagtagtcttcaggttgaaagaatctgggtcgatgttgatgacagttggtattgcgatgcccggttccgattcccggccacaatgcgtacagaacagttaacctctttgtttgaatgccatattcagccggagcagacccgactcatcatttcaggaaaatggaaaaatggcggggcaaggttggcaatgctaagccgttatgagcagcaagattggcgggtcgagttattacctattgcgatgcaaaaactctctggtgcagatgcaatggccgaaatctcattgtcgcttcatgaaggtccaattctgttaggtcacacaattccaaaaggcggttatgaacttactgaagaacttccctgggtttttgaagcgatgaatgagagtgaatcgcagctaaaacttgttggtatggggtctgtgagttccaggctaaatgctctgtttatttcgctaccgaaaaatagccatttagatattagtggagaaggtgagtttgatatcccaaggttgctaaaaaacagtgaacgcagcttaactaaaataagtggagtatttagcgttgttttacatgatggtgctgtttgtacaattcgcacccagcaactttatgattctgcgattgaatattatattaaatcgacagaagttgaactggttaaatcggattatcctgtccatcgagcctggccgaagatcggttggaaaaaggatctgcaatatggcattgtaccggagaaagaacttttttggcgttccattcgttcaggtaataatgcctggtattctgtcgcatcagaaatgccaaaaggacagatagaagtccggcgaatagttaatgatgaggttttatttagcggtaaagttgtagttttaccagcagacttcgatattaatattatacctgagagtgctcagcaaggcattattatgctttctggtataacggatactagaattgataaatattcaaacaatgaaaaagtaacacttaagtccgattattcacaaaacgagtgtgctatttattataattcatcgctgatgctggaaaataccgttgatttacgggtctcctggaaagatggttctaatcttaaactattattacctaagccggttagcggtggccgatttgtaactaatgatggttctgttcattttgatggtgtggcatctatagcacatttgcatggaatagatgctgagttattaaccatatcatgtgctggaagaggatatcttaatatcgagttattggatgaaaatccagtagctgaaaaattccgttatttacatgccgaccttcctcttttatcaggacgcaatgacaaattacaacaaatttcactttatgagaactataatttgctaaatgctatgctggcatgtgcatggaacagcaatagtacattatgtgttgatttttactctgacagatttggaaaggataaagcaacactcaatattaaacgctacgatggtagttttattgaacacgatcaagggttactggttgatataaaaaattctgttgtttttcctgcaaatagaatagacgaactggttgttgatgctatttctcttaagaatcctggcttacacatatcattgttaaaaaaagatgagtttgcttataatctttcagctctgaatgttcaggatagtccatggttaattgtgggaaaacttgatggtacagctcgcattgcaccagtaattaaatggatgctacctgtattgcagacaaatgatttattactaaatgctctatgcgaagcagacccagaacagcgcaaaaaaaattttaatgagctaatttttgaaatagataacaacccattgcaaaattattgctgtttattaacagagtatattaagaaatacaaaatgaataatggcttatccttgctggatctggacttgttcagatgtatttcgagtaattaccgcgtggttgttcaattgttaatatcatcatgtctttctggtgatagcgatacgatttatgatatacaggaagaattacccttttcatggggatggattcccgtttcaatctggaaagatgttttccaaaaatgttggacttatctggagaaacagattaacgataaaacattagcattacatatattgcaaccctttattgcttttatgaaccatcgtgcacatatcgatcgtcggctggctccgattgcgaatatgttacttacatatagtgagagcctaccaaccggttgtgatgtattgccaactgttagtcgtgagcagtttaatgaagctaaacagatgctattaaggaaccccgacagctttgggcgtatcagtatcttccctaaagaactttggtctagtgctattactccagagttaaaatctgtttttaataagctttggattgaagataaatatcactcacggcttgaaaaacgttttaatttgatgttagtcgcagcgctgttaacccaaaaagataataacctgatacatcaactgtctgcgctttttgaatttcactatcagcaagccccacagcaattaggggtaatctatcaatattattttgaacaagcaggagtatgtcattga

SEQ ID NO: 28732 - DNA, 6315 bp, Escherichia coli 7.1982
atggacgttcagcaactgcattatgcgccacttctaaatcagcttcatcagcgtgcggtgaggtcggtggtaagtcagttggcattgcggagcaagtcgttgactcattatctggaatcacaatattttcagcctcccggtcaggaggggtcactgcttgcagacccggtattcgaaagtacattcggctggatgcctgcggatgaaacaatggaggatttgcgggacaagctgatctccagcccgctggttgatgcattgagcaaagcgccagtgccatttcgtcatcaacttactgcgtggcgaacgattctggaagacaaaaaatccttgttagtgagcagcggtacgggatccgggaaaacagaatgctttatggtaccggttctggaagatcttattcgtcagcaaaaatcgacccgccagtcactaacagggacacaagctattttcttgtatccgttaaatgcattaattaacagccaacaggagcggcttcgcgaatggacgcgcggatttaaggggaaaatacgcttcgcgctatataatggcgaaacccggcataccaaatacgaaattcaggaagatcagttgaaagtacctgaacaagctttgagtcgggaagccatttatgaagcaccaccttccatcatggtgacgaataccaccatgctggaatatatgctgattcgtcgtaaagatgccccaatcatcgaaaagtctcaggggatgttaaagtatatcgtcctggatgaagcccatagttatattggttctcaggctgctgagttagcgctgcttttacgtcgtgttatgcaggctttcaatgttggacccggcacagataaacctgtgcagattatcgcgacctctgccactattggtgaagactctcctgaaggtaataaggagcttgctaaatttgtcgctgatctcgcgggcgttacagaacgtgatgtcaaagtggttcgcggttatcgacaaataccgcgggtatcggagtcgctgattcgtcatgaataccccacatctttaacttctcttaaatccctgagccctcaggatctttaccaacagctttgtcattaccgtgtggcccagcaattgcgtcaggcgttaactcatcccggacggcaggcagtacgtttgagtgagttgctcaatgttgccagaagaacctggccagatattaatcaccgtgagctactgcaactcctcgatctaatggcaagatcgcgagaaggtgaactggcttttacgccattacgtatgcatgggtttatcagaacactggcgggtctatgggcatgttcaaacaaacaatgctcacataaagcacatgaattaaatcagagtgactggccatttggtcaggtatggtttgagcagcgccaatattgtgactgtggagcgccggtatttgaagttttacgttgctccgggtgtggttcagcttatttgtctgccaaagaggagatgcgcggtgatggaacgaactggttggtagcgcaaccagccgctgccgaagtggatgagtttgctcttgatgtagatgtttattctgaagatgaagacaacgacgaattagacaataactctcaatttgatcgtctgattgcgagcgatggtgaaaaatatatcatttcactggaagaaacgacggcggggaaaattgatagtgaagcgcaaaagcactatgaaataaacctgttaagaccggaatctcgaggtgagggacgcaataactcctttgcttgtgtttgctgtggtgacactcaacggaaaaataatcctttattccgtccgcttcggctcggcgcgcccttttttttaaatgaaattattcctactctgctggagttttctccattaccgcaaacaagagaagagcagttaggaccgtttaatggtcgacgcttgctcacctttacggattcgcgtcagggtaccgctcgcatttcagcccgcttacagcaggatgccgataaagcgacgttgcgagctctttgttaccaggagctggcaaatattacagagccttcagcaaaactcagcccggcacactgtgcactgttagagaaagttattagccagttttctgtcctccctttaaaaaattccatcgacgcgctgaaaaaagcgatggctgcgaatgaggagcttagcccgacggacattcaggcacttaaaattattgagccgatggtgagttccttaagcacggagcatgctgaagcgatgcaaatacttcaggctaactctggcaatcagcagaagaaaaccatgtcatggcaaacgctgtctgaacagctggttggcagtgtggaccttgccgatagaatgagaggcagttttaaagaattgtctgggcttgatcttactaaacaacagtttgcagatttttgtttatacagcgagtttggtcgccgccctaaaaatgcctggaccctcgaaagtctgggtctggtagccattcactatccattcattgataaagttacaacctgcccgcaggactggaagacattattacccgatcccgataagcaattagcggaatggcgtaatttattgaagattactcttgatttctttatccgtgaaaacagtgccgttttttacgaaaacgagcaataccctcgctggatgggggcacgtttcccggtaaaaatgctccaggggccagataaaaaaaacaaagggcagaaacgtgatcaactttggccacaaatacgcgatcgccattataaccgggtcattaagctattaatcgcagtctttccggcaatacaacctgagcaggctcactggaaatcgttagttaaccacttaatgattgaggtctgggatgcaattcgaccctgcttacgtcagtttgagtcgggttatcagctggatattaaacaacaagctgaattttacagtccaaagcaagtgtggcgttgcccctatactcgacgtgcgttagacgtcacgttgctgggatactctccgtatttgccgggtagcaaagaaattgcacctgaaaaagcagtgttgattgaaatgcctgagcttcctgtacgtcactggcgtttgtctggtggtggagaaatcgcccgagaagaacgtctggagtggctggaaagtaatgcgctgattcaacatgcccgcgaggaaggattatggtctactcgcagcgaccgactggccctgaaagatagctggtatcgtctggaggaacactctgcgcagagaacgcctgagcagaaccagtttaatgaaaaacaatttaagtcaggcaaagttaatgtgctgaactgttccacgaccatggagatgggggtggatattggtggtatgagtttggtggcaatgaacaacgttcctccagcgccggcaaattatttgcaacgtgcaggtcgcgcggggcgtcgtggagagagtgcatctgctgccattacgttatgtaaaaacacggcgcatggaatggaggtattcaaagaccccctctgggcgttcaacactactgccagtgcgccacgggttcgttttgggagcagtagtattgttcaacgacatgttaatgccctggttttaggtctgtttttacgagctgaagttcctgatgcgacaaaactgagttgcaaatggttctttgaaggtgatgagagccagtgtcttcgttttctccattggttaaatcaccaggccgatcagctggcggataaacttaaacgccttactcagggaaccgtactgatgtcattgacggcaacccagctcttgacccgcacacaagcaatgatgcagcaggttgatatccgctggagaagccaacttgcgatactgttggaaaatatcgaagcgttgaaggcggataacagcgcgtgggaagaaacaccagcaggtaaagccatcgcttatcagcttcgtgattatcgcggtgcatatctgttttctaaactcattagtgaagcgttcctgccggggcatggtttcccggttggcgtagtcaatttcaattatctgacggcagatgagctggaaaaacgtcgcgcaataaaagccactcaggctgaccctaatgaagggggagaaagcttttctcgtcgtattgaaaaattgcccagccgtgatttgcctacagcattacgcgagtatgcgcctggtgcagatgtggtattgggcggaaaagtatatcgttcctcgggcattatgcttggcaaggtgcttgccagcgggcaggagctgtcaggcgatcatcatattccgtggttctggcattgccgtaaatgtggtgcgggggcaaccagtactacccatcctgtcgaatgtagtcactgcaaagcggatatacagcaacttgatgtgaagcgttatttacagcctgttggttttgcgacagatattcgttatcaggcacataatgatgtatccatgcctgcacaacttccccggaaagatccacgtgttcttgtaccgtcttcggtgtgggtttctttacccgatgctgggctaggacgttaccgttttagccatagtggggaattgttccacttcagtgaaggggaatttgggcacggctacgcaatttgcctctcatgtggtcgggcagaatctcaaactcaaccccagcgtacccctgaaaatctaaagaacccagagagggaaaatacgcattacctgttgcgagggggcagtaacgatcgtcaggggagcaataaattgtgccacggtcatgtgcataaagatctgtggttgggatatagcagtcgtacagatatggttgagctgcaactcaatgatgataatggcctgttgatccgtgatgaggttgccgcgcgttcccttgcggtcgctttgcgtgaagggttagcgcataaattgggtatcgaaaatactgagctgggcgtgacgacgcagcaagcgcgcgatatcaatggctataccggatattccatcttcatttacgacaataatgcgggtggtgcaggttatgcagtgcaattgatcgaccattgggctgatgtctttaattacgccagaaaattgctcgattgcagttgcgataaattctgtcaccactgcttgctcagctacgacagtcagcattatgtcaacagattagatcgtcaccatgcattaaccctgcttaccaatgtacggttgcagcgacttaacctcgcgccagaatatcagtacttcggcgatggtagccgggttgaaactaaccctctgagtttacgtattgcgcaatgcctgaacagcgagatttatgactcctgctcgctggttcttgcggggccgcaggaacagtgggactttgcccaatggccattatttaaagagttgctccagtttgcctcctccggtgggaatgttgagttgctggtggccacgccgctggcaaacttaactgatagctccagacatcagctttccgcgttggcggcgatgccgggaggtcgcttacaagtgaaatccattgccactgcgcagctcatgcaaggaaaggggcgctggcttgcgcaggtgactcgcgaagggcaaagccaacagtgggccgcagacgacagcgctaccgttgcacctggtgaattatggggacaaagtgcgtcttcaccagtagtgacacttaaaggaacgtccggaaaaaccttctcgggtcagaccttaagtgcagaagatttactgcccgccttacccaccggggcggtgcgcatcaatctctgtgaacaactggacgggccgctggaaggttttggttcgcgtttctggtcgttagtcacgcaacagcacgctggctggaagcaggcatttacccgccacaaagagataacgcatgttgagtacagcgatcgttatcttaatagcccattcacggcgcgtttgttaggtgaaatcttaaccgagctggttgaacagggaatggcggaacgcgccagcctcactgtttgcgtcaaaaaattggattacaactctcgccaacacgacgctctctataacgcgtggcttaatgaggaagatcgtcagcaggttgtgaccactttacttgaagaaggatatctggggcctgcgtggccgggagcaattagctggttaacgggggataaccagagtacggagcatggacgagaactgacagtcaccttcagcgatggcagtcagcattatgtcctgctcgacatggggcttagctactggcgctgtattgaagataccttctttgattttgccctgcgagtaccgcagcaagttgaacggctggcaaacacgcgagcgcgagctgttgccccgggtaatgaccttaggagttatattatcgctggataa

SEQ ID NO: 28733 - DNA, 2937 bp, Escherichia coli 7.1982
atgattgaaaatgagagcggttatttgattacctatttcagaaggatatatcaggcgcttcgtgggcaatcatctcaatatcctgccgctaaaattgcacaagaattaggcgatacgattcctgtcacaatgcaaaacgaactggtctatgaaatagccggtgaattctgcgagactctctcccgattacttagtgagcatcctcctcatagcagtgatcccgtttctgcattacgtaagctctctccagactggcatcttcaacttccactcgttctccccgaagcgaatgctgcagagattgtaaggcgattactttctcaatcttctgaaatacgcagtgcaagtagtcttcaggttgaaagaatctgggtcgatgttgatgacagttggtattgcgatgcccggttccgattcccggccacaatgcgtacagaacagttaacctctttgtttgaatgccatattcagccggagcagacccgactcatcatttcaggaaaatggaaaaatggcggggcaaggttggcaatgctaagccgttatgagcagcaagattggcgggtcgagttattacctattgcgatgcaaaaactctctggtgcagatgcaatggccgaaatctcattgtcgcttcatgaaggtccaattctgttaggtcacacaattccaaaaggcggttatgaacttactgaagaacttccctgggtttttgaagcgatgaatgagagtgaatcgcagctaaaacttgttggtatggggtctgtgagttccaggctaaatgctctgtttatttcgctaccgaaaaatagccatttagatattagtggagaaggtgagtttgatatcccaaggttgctgaaaaacagtgaacgcagcttaactaaaataagtggagtatttagcgttgttttacatgatggtgctgtttgtacaattcgcacccagcaactttatgattctgcgattgaatattatattaaatcgacagaagttgaactggttaaatcggattatcctgtccatcgagcctggccgaagatcggttggaaaaaggatctgcaatatggcattgtaccggagaaagaacttttttggcgttccattcgttcaggtaataatgcctggtattctgtcgcatcagaaatgccaaaaggacagatagaagtccggcgaatagttaatgatgaggttttatttagcggtaaagttgtagttttaccagcagacttcgatattaatattatacctgagagtgctcagcaaggcattattatgctttctggtataacggatactagaattgataaatattcaaacaatgaaaaagtaacacttaagtccgattattcacaaaacgagtgtgctatttattataattcatcgctgatgctggaaaataccgttgatttacgggtctcctggaaagatggttctaatcttaaactattattacctaagccggttagcggtggccgatttgtaactaatgatggttctgttcattttgatggtgtggcatctatagcacatttgcatggaatagatgctgagttattaaccatatcatgtgctggaagaggatatcttaatatcgagttattggatgaaaatccagtagctgaaaaattccgctatttacatgccgaccttcctcttttatcaggacgcaatgacaaattacaacaaatttcactttatgagaactataatttgctaaatgctatgctggcatgtgcatggaacagcaatagtacattatgtgttgatttttactctgacagatttggaaaggataaagcaacactcaatattaaacgctacgatggtagttttattgaacacgatcaagggttactggttgatataaaaaattctgttgtttttcctgcaaatagaatagacgaactggttgttgatgctatttctcttaagaatcctggcttacacatatcattgttaaaaaaagatgagtttgcttatgatctttcagctctgaatgttcaggatagtccatggttaattgtgggaaaacttgatggtacagctcgcattgcaccagtaattaaatggatgctacctgtattgcagacaaatgatttattactaaatgctctatgcgaagcagacccagaacagcgcaaaaaaaattttaatgagctaatttttgaaatagataacaacccattgcaaaattattgctgtttattaacagagtatattaagaaatacaaaatgaataatggcttatccttgctggatctggacttgttcagaggtatttcgagtaattaccgcgtggttgttcaattgttaatatcatcatgtctttctggtgatagcgatacgatttatgatatacaggaagaattacccttttcatggggatggattcccgtttcaatctggaaagatgttttccaaaaatgttggacttatctggagaaacagattaacgataaaacattagcattacatatattgcaaccctttattgcttttatgaaccatcgtgcacatatcgatcgtcggctggctccgattgcgaatatgttacttacatatagtgagagcctaccaaccggttgtgatgtattgccaactgttagtcgtgagcagtttaatgaagctaaacagatgctattaaggaaccccgacagctttgggcgtatcagtatcttccctaaagaactttggtctagtgctattactccagagttaaaatctgtttttaataagctttggattgaagataaatatcactcacggcttgaaaaacgttttaatttgatgttagtcgcagcgctgttaacccaaaaagataataacctgatacatcaactgtctgcgctttttgaatttcactatcagcaagccccacagcaattaggggtaatctatcaatattattttgaacaagcaggagtatgtcattga

SEQ ID NO: 28734 - DNA, 6315 bp, Escherichia coli 8.0416
atggacgttcagcaactgcattatgcgccacttctaaatcagcttcatcagcgtgcggtgaggtcggtggtaagtcagttggcattgcggagcaagtcgttgactcattatctggaatcacaatattttcagcctcccggtcaggaggggtcactgcttgcagacccggtattcgaaagtacattcggctggatgcctgcggatgaaacaatggaggatttgcgggacaagctgatctccagcccgctggttgatgcattgagcaaagcgccagtgccatttcgtcatcaacttactgcgtggcgaacgattctggaagacaaaaaatccttgttagtgagcagcggtacgggatccgggaaaacagaatgctttatggtaccggttctggaagatcttattcgtcagcaaaaatcgacccgccagtcactaacagggacacaagctattttcttgtatccgttaaatgcattaattaacagccaacaggagcggcttcgcgaatggacgcgcggatttaaggggaaaatacgcttcgcgctatataatggcgaaacccggcataccaaatacgaaattcaggaagatcagttgaaagtacctgaacaagctttgagtcgggaagccatttatgaagcaccaccttccatcatggtgacgaataccaccatgctggaatatatgctgattcgtcgtaaagatgccccaatcatcgaaaagtctcaggggatgttaaagtatatcgtcctggatgaagcccatagttatattggttctcaggctgctgagttagcgctgcttttacgtcgtgttatgcaggctttcaatgttggacccggcacagataaacctgtgcagattatcgcgacctctgccactattggtgaagactctcctgaaggtaataaggagcttgctaaatttgtcgctgatctcgcgggcgttacagaacgtgatgtcaaagtggttcgcggttatcgacaaataccgcgggtatcggagtcgctgattcgtcatgaataccccacatctttaacttctcttaaatccctgagccctcaggatctttaccaacagctttgtcattaccgtgtggcccagcaattgcgtcaggcgttaactcatcccggacggcaggcagtacgtttgagtgagttgctcaatgttgccagaagaacctggccagatattaatcaccgtgagctactgcaactcctcgatctaatggcaagatcgcgagaaggtgaactggcttttacgccattacgtatgcatgggtttatcagaacactggcgggtctatgggcatgttcaaacaaacaatgctcacataaagcacatgaattaaatcagagtgactggccatttggtcaggtatggtttgagcagcgccaatattgtgactgtggagcgccggtatttgaagttttacgttgctccgggtgtggttcagcttatttgtctgccaaagaggagatgcgcggtgatggaacgaactggttggtagcgcaaccagccgctgccgaagtggatgagtttgctcttgatgtagatgtttattctgaagatgaagacaacgacgaattagacaataactctcaatttgatcgtctgattgcgagcgatggtgaaaaatatatcatttcactggaagaaacgacggcggggaaaattgatagtgaagcgcaaaagcactatgaaataaacctgttaagaccggaatctcgaggtgagggacgcaataactcctttgcttgtgtttgctgtggtgacactcaacggaaaaataatcctttattccgtccgcttcggctcggcgcgcccttttttttaaatgaaattattcctactctgctggagttttctccattaccgcaaacaagagaagagcagttaggaccgtttaatggtcgacgcttgctcacctttacggattcgcgtcagggtaccgctcgcatttcagcccgcttacagcaggatgccgataaagcgacgttgcgagctctttgttaccaggagctggcaaatattacagagccttcagcaaaactcagcccggcacactgtgcactgttagagaaagttattagccagttttctgtcctccctttaaaaaattccatcgacgcgctgaaaaaagcgatggctgcgaatgaggagcttagcccgacggacattcaggcacttaaaattattgagccgatggtgagttccttaagcacggagcatgctgaagcgatgcaaatacttcaggctaactctggcaatcagcagaagaaaaccatgtcatggcaaacgctgtctgaacagctggttggcagtgtggaccttgccgatagaatgagaggcagttttaaagaattgtctgggcttgatcttactaaacaacagtttgcagatttttgtttatacagcgagtttggtcgccgccctaaaaatgcctggaccctcgaaagtctgggtctggtagccattcactatccattcattgataaagttacaacctgcccgcaggactggaagacattattacccgatcccgataagcaattagcggaatggcgtaatttattgaagattactcttgatttctttatccgtgaaaacagtgccgttttttacgaaaacgagcaataccctcgctggatgggggcacgtttcccggtaaaaatgctccaggggccagataaaaaaaacaaagggcagaaacgtgatcaactttggccacaaatacgcgatcgccattataaccgggtcattaagctattaatcgcagtctttccggcaatacaacctgagcaggctcactggaaatcgttagttaaccacttaatgattgaggtctgggatgcaattcgaccctgcttacgtcagtttgagtcgggttatcagctggatattaaacaacaagctgaattttacagtccaaagcaagtgtggcgttgcccctatactcgacgtgcgttagacgtcacgttgctgggatactctccgtatttgccgggtagcaaagaaattgcacctgaaaaagcagtgttgattgaaatgcctgagcttcctgtacgtcactggcgtttgtctggtggtggagaaatcgcccgagaagaacgtctggagtggctggaaagtaatgcgctgattcaacatgcccgcgaggaaggattatggtctactcgcagcgaccgactggccctgaaagatagctggtatcgtctggaggaacactctgcgcagagaacgcctgagcagaaccagtttaatgaaaaacaatttaagtcaggcaaagttaatgtgctgaactgttccacgaccatggagatgggggtggatattggtggtatgagtttggtggcaatgaacaacgttcctccagcgccggcaaattatttgcaacgtgcaggtcgcgcggggcgtcgtggagagagtgcatctgctgccattacgttatgtaaaaacacggcgcatggaatggaggtattcaaagaccccctctgggcgttcaacactactgccagtgcgccacgggttcgttttgggagcagtagtattgttcaacgacatgttaatgccctggttttaggtctgtttttacgagctgaagttcctgatgcgacaaaactgagttgcaaatggttctttgaaggtgatgagagccagtgtcttcgttttctccattggttaaatcaccaggccgatcagctggcggataaacttaaacgccttactcagggaaccgtactgatgtcattgacggcaacccagctcttgacccgcacacaagcaatgatgcagcaggttgatatccgctggagaagccaacttgcgatactgttggaaaatatcgaagcgttgaaggcggataacagcgcgtgggaagaaacaccagcaggtaaagccatcgcttatcagcttcgtgattatcgcggtgcatatctgttttctaaactcattagtgaagcgttcctgccggggcatggtttcccggttggcgtagtcaatttcaattatctgacggcagatgagctggaaaaacgtcgcgcaataaaagccactcaggctgaccctaatgaagggggagaaagcttttctcgtcgtattgaaaaattgcccagccgtgatttgcctacagcattacgcgagtatgcgcctggtgcagatgtggtattgggcggaaaagtatatcgttcctcgggcattatgcttggcaaggtgcttgccagcgggcaggagctgtcaggcgatcatcatattccgtggttctggcattgccgtaaatgtggtgcgggggcaaccagtactacccatcctgtcgaatgtagtcactgcaaagcggatatacagcaacttgatgtgaagcgttatttacagcctgttggttttgcgacagatattcgttatcaggcacataatgatgtatccatgcctgcacaacttccctggaaagatccacgtgttcttgtaccgtcttcggtgtgggtttctttacccgatgctgggctaggacgttaccgttttagccatagtggggaattgttccacttcagtgaaggggaatttgggcacggctacgcaatttgcctctcatatggtcgggcagaatctcaaactcaaccccagcgtacccctgaaaatctaaagaacccagagagggaaaatacgcattacctgttgcgagggggcagtaacgatcgtcaggggagcaataaattgtgccacggtcatgtgcataaagatctgtggttgggatatagcagtcgtacagatatggttgagctgcaactcaatgatgataatggcctgttgatccgtgatgaggttgccgcgcgttcccttgcggtcgctttgcgtgaagggttagcgcataaattgggtatcgaaaatactgagctgggcgtgacgacgcagcaagcgcgcgatatcaatggctataccggatattccatcttcatttacgacaataatgcgggtggtgcaggttatgcagtgcaattgatcgaccattgggctgatgtctttaattacgccagaaaattgctcgattgcagttgcgataaattctgtcaccactgcttgctcagctacgacagtcagcattatgtcaacagattagatcgtcaccatgcattaaccctgcttaccaatgtacggttgcagcgacttaacctcgcgccagaatatcagtacttcggcgatggtagccgggttgaaactaaccctctgagtttacgtattgcgcaatgcctgaacagcgagatttatgactcctgctcgctggttcttgcggggccgcaggaacagtgggactttgcccaatggccattatttaaagagttgctccagtttgcctcctccggtgggaatgttgagttgctggtggccacgccgttggcaaacttaactgatagctccagacatcagctttccgcgttggcggcgatgccgggaggtcgcttacaagtgaaatccattgccactgcgcagctcatgcaaggaaaggggcgctggcttgcgcaggtgactcgcgaagggcaaagccaacagtgggccgcagacgacagcgctaccgttgcacctggtgaattatggggacaaagtgcgtcttcaccagtagtgacacttaaaggaacgtccggaaaaaccttctcgggtcagaccttaagtgcagaagatttactgcccgccttacccaccggggcggtgcgcatcaatctctgtgaacaactggacgggccgctggaaggttttggttcgcgtttctggtcgttagtcacgcaacagcacgctggctggaagcaggcatttacccgccacaaagagataacgcatgttgagtacagcgatcgttatcttaatagcccattcacggcgcgtttgttaggtgaaatcttaaccgagctggttgaacagggaatggcggaacgcgccagcctcactgtttgcgtcaaaaaattggattacaactctcgccaacacgacgctctctataacgcgtggcttaatgaggaagatcgtcagcaggttgtgaccactttacttgaagaaggatatctggggcctgcgtggccgggagcaattagctggttaacgggggataaccagagtacggagcatggacgagaactgacagtcaccttcagcgatggcagtcagcattatgtcctgctcgacatggggcttagctactggcgctgtattgaagataccttctttgattttgccctgcgagtaccgcagcaagttgaacggctggcaaacacgcgagcgcgagctgttgccccgggtaatgaccttaggagttatattatcgctggataa

SEQ ID NO: 28735 - DNA, 2217 bp, Escherichia coli 8.0416
atgaatgagagtgaatcgcagctaaaacttgttggtatggggtctgtgagttccaggctaaatgctctgtttatttcgctaccgaaaaatagccatttagatattagtggagaaggtgagtttgatatcccaaggttgctgaaaaacagtgaacgcagcttaactaaaataagtggagtatttagcgttgttttacatgatggtgctgtttgtacaattcgcacccagcaactttatgattctgcgattgaatattatattaaatcgacagaagttgaactggttaaatcggattatcctgtccatcgagcctggccgaagatcggttggaaaaaggatctgcaatatggcattgtaccggagaaagaacttttttggcgttccattcgttcaggtaataatgcctggtattctgtcgcatcagaaatgccaaaaggacagatagaagtccggcgaatagttaatgatgaggttttatttagcggtaaagttgtagttttaccagcagacttcgatattaatattatacctgagagtgctcagcaaggcattattatgctttctggtataacggatactagaattgataaatattcaaacaatgaaaaagtaacacttaagtccgattattcacaaaacgagtgtgctatttattataattcatcgctgatgctggaaaataccgttgatttacgggtctcctggaaagatggttctaatcttaaactattattacctaagccggttagcggtggccgatttgtaactaatgatggttctgttcattttgatggtgtggcatctatagcacatttgcatggaatagatgctgagttattaaccatatcatgtgctggaagaggatatcttaatatcgagttattggatgaaaatccagtagctgaaaaattccgctatttacatgccgaccttcctcttttatcaggacgcaatgacaaattacaacaaatttcactttatgagaactataatttgctaaatgctatgctggcatgtgcatggaacagcaatagtacattatgtgttgatttttactctgacagatttggaaaggataaagcaacactcaatattaaacgctacgatggtagttttattgaacacgatcaagggttactggttgatataaaaaattctgttgtttttcctgcaaatagaatagacgaactggttgttgatgctatttctcttaagaatcctggcttacacatatcattgttaaaaaaagatgagtttgcttatgatctttcagctctgaatgttcaggatagtccatggttaattgtgggaaaacttgatggtacagctcgcattgcaccagtaattaaatggatgctacctgtattgcagacaaatgatttattactaaatgctctatgcgaagcagacccagaacagcgcaaaaaaaattttaatgagctaatttttgaaatagataacaacccattgcaaaattattgctgtttattaacagagtatattaagaaatacaaaatgaataatggcttatccttgctggatctggacttgttcagaggtatttcgagtaattaccgcgtggttgttcaattgttaatatcatcatgtctttctggtgatagcgatacgatttatgatatacaggaagaattacccttttcatggggatggattcccgtttcaatctggaaagatgttttccaaaaatgttggacttatctggagaaacagattaacgataaaacattagcattacatatattgcaaccctttattgcttttatgaaccatcgtgcacatatcgatcgtcggctggctccgattgcgaatatgttacttacatatagtgagagcctaccaaccggttgtgatgtattgccaactgttagtcgtgagcagtttaatgaagctaaacagatgctattaaggaaccccgacagctttgggcgtatcagtatcttccctaaagaactttggtctagtgctattactccagagttaaaatctgtttttaataagctttggattgaagataaatatcactcacggcttgaaaaacgttttaatttgatgttagtcgcagcgctgttaacccaaaaagataataacctgatacatcaactgtctgcgctttttgaatttcactatcagcaagccccacagcaattaggggtaatctatcaatattattttgaacaagcaggagtatgtcattga

SEQ ID NO: 28736 - DNA, 6315 bp, Escherichia coli 8.0586; identical to SEQ ID NO: 28464

SEQ ID NO: 28737 - DNA, 2937 bp, Escherichia coli 8.0586; identical to SEQ ID NO: 28445

SEQ ID NO: 28738 - DNA, 6315 bp, Escherichia coli 8.2524; identical to SEQ ID NO: 28540

SEQ ID NO: 28739 - DNA, 2937 bp, Escherichia coli 8.2524
atgattgaaaatgagagcggttatttgattacctatttcagaaggatatatcaggcgcttcgtgggcaatcatctcaatatcctgccgctaaaattgcacaagaattaggcgatacgattcctgtcacaatgcaaaacgaactggtctatgaaatagccggtgaattctgcgagactctctgccgattacttagtgagcatcctcctcatagcagtgatcccgtttctgcattacgtaagctctctccagactggcatcttcaacttccactcgttctccccgaagcgaatgctgcagagattgtaaggcgattactttctcaatcttctgaaatacgcagtgcaagtagtcttcaggttgaaagaatctgggtcgatgttgatgacagttggtattgcgatgcccggttccgattcccggccacaatgcgtacagaacagttaacctctttgtttgaatgccatattcagccggagcagacccgactcatcatttcaggaaaatggaaaaatggcggggcaaggttggcaatgctaagccgttatgagcagcaagattggcgggtcgagttattacctattgcgatgcaaaaactctctggtgcagatgcaatggccgaaatctcattgtcgcttcatgaaggtccaattctgttaggtcacacaattccaaaaggcggttatgaacttactgaagaacttccctgggtttttgaagcgatgaatgagagtgaatcgcagctaaaacttgttggtatggggtctgtgagttccaggctaaatgctctgtttatttcgctaccgaaaaatagccatttagatattagtggagaaggtgagtttgatatcccaaggttgctgaaaaacagtgaacgcagcttaactaaaataagtggagtatttagcgttgttttacatgatggtgctgtttgtacaattcgcacccagcaactttatgattctgcgattgaatattatattaaatcgacagaagttgaactggttaaatcggattatcctgtccatcgagcctggccgaagatcggttggaaaaaggatctgcaatatggcattgtaccggagaaagaacttttttggcgttccattcgttcaggtaataatgcctggtattctgtcgcatcagaaatgccaaaaggacagatagaagtccggcgaatagttaatgatgaggttttatttagcggtaaagttgtagttttaccagcagacttcgatattaatattatacctgagagtgctcagcaaggcattattatgctttctggtataacggatactagaattgataaatattcaaacaatgaaaaagtaacacttaagtccgattattcacaaaacgagtgtgctatttattataattcatcgctgatgctggaaaataccgttgatttacgggtctcctggaaagatggttctaatcttaaactattattacctaagccggttagcggtggccgatttgtaactaatgatggttctgttcattttgatggtgtggcatctatagcacatttgcatggaatagatgctgagttattaaccatatcatgtgctggaagaggatatcttaatatcgagttattggatgaaaatccagtagctgaaaaattccgctatttacatgccgaccttcctcttttatcaggacgcaatgacaaattacaacaaatttcactttatgagaactataatttgctaaatgctatgctggcatgtgcatggaacagcaatagtacattatgtgttgatttttactctgacagatttggaaaggataaagcaacactcaatattaaacgctacgatggtagttttattgaacacgatcaagggttactggttgatataaaaaattctgttgtttttcctgcaaatagaatagacgaactggttgttgatgctatttctcttaagaatcctggcttacacatatcattgttaaaaaaagatgagtttgcttatgatctttcagctctgaatgttcaggatagtccatggttaattgtgggaaaacttgatggtacagctcgcattgcaccagtaattaaatggatgctacctgtattgcagacaaatgatttattactaaatgctctatgcgaagcagacccagaacagcgcaaaaaaatttttaatgagctaatttttgaaatagataacaacccattgcaaaattattgctgtttattaacagagtatattaagaaatacaaaatgaataatggcttatccttgctggatctggacttgttcagaggtatttcgagtaattaccgcgtggttgttcaattgttaatatcatcatgtctttctggtgatagcgatacgatttatgatatacaggaagaattacccttttcatggggatggattcccgtttcaatctggaaagatgttttccaaaaatgttggacttatctggagaaacagattaacgataaaacattagcattacatatattgcaaccctttattgcttttatgaaccatcgtgcacatatcgatcgtcggctggctccgattgcgaatatgttacttacatatagtgagagcctaccaaccggttgtgatgtattgccaactgttagtcgtgagcagtttaatgaagctaaacagatgctattaaggaaccccgacagctttgggcgtatcagtatcttccctaaagaactttggtctagtgctattactccagagttaaaatctgtttttaataagctttggattgaagataaatatcactcacggcttgaaaaacgttttaatttgatgttagtcgcagcgctgttaacccaaaaagataataacctgatacatcaactgtctgcgctttttgaatttcactatcagcaagccccacagcaattaggggtaatctatcaatattattttgaacaagcaggagtatgtcattga

SEQ ID NO: 28740 - DNA, 6315 bp, Escherichia coli 88.0221; identical to SEQ ID NO: 28540

SEQ ID NO: 28741 - DNA, 2937 bp, Escherichia coli 88.0221; identical to SEQ ID NO: 28445

SEQ ID NO: 28742 - DNA, 6315 bp, Escherichia coli 88.1042; identical to SEQ ID NO: 28464

SEQ ID NO: 28743 - DNA, 2937 bp, Escherichia coli 88.1042; identical to SEQ ID NO: 28445

SEQ ID NO: 28744 - DNA, 6315 bp, Escherichia coli 89.0511; identical to SEQ ID NO: 28464

SEQ ID NO: 28745 - DNA, 2937 bp, Escherichia coli 89.0511; identical to SEQ ID NO: 28445

SEQ ID NO: 28746 - DNA, 6315 bp, Escherichia coli 90.0091; identical to SEQ ID NO: 28464

SEQ ID NO: 28747 - DNA, 2937 bp, Escherichia coli 90.0091; identical to SEQ ID NO: 28445

SEQ ID NO: 28748 - DNA, 6315 bp, Escherichia coli 90.2281; identical to SEQ ID NO: 28464

SEQ ID NO: 28749 - DNA, 2937 bp, Escherichia coli 90.2281; identical to SEQ ID NO: 28445

SEQ ID NO: 28750 - DNA, 6315 bp, Escherichia coli 907672; identical to SEQ ID NO: 28572

SEQ ID NO: 28751 - DNA, 3315 bp, Escherichia coli 907672
atgttttttagtcgccgttcattatccggagctgatggacgggcgttatatgcttaccgttgtactgatacagagtacgaaagtttggcagaactactgcgtacatatgccccccgtagttatccaagaacgatattcatttcctatagcgatgttctatttagcatatatgccgcagagtttatccgccggactcatacggtcggacaccctaaatgggacacaattttagattctattgactggaaagttccgtatgttcatcgacagaagctggttaatgatggcattcgctactggaaaagaaagataagaaacctggggcaagcttcgggttatctgcatacactggcttgtgaaggtggtttacctatccgcatgattgaaaatgagagcggttatttgattacctatttcagaaggatatatcaggcgcttcgtgggcaagcatctcaatatcctgccgctaaaattgcacaagaattaggcgatacgattcctgtcacaatgcaaaacgaactggtctatgaaatagccggtgaattctgcgagactctctgccgattacttagtgagcatccacctcaaagcagtgatcccgtttctgcattacgtaagctctctccagactggcaccttcaacttccactcgttctccccgaagcgaatgctgcagagattgtaaggcgattactttctcaatcttctgaaatacgcagtgcaagtagtcttcaggttgaaagaatctgggtcgatgttgatgacagttggtattgtgatgcccggttccgattcccggccacaatgcgtacagaacagttaacctctttgtttgaatgcaatattcagccggagcagacccgactcatcatttcaggaaaatggagaaatggcggggcaaggttggcaatgctaagccgttatgagcagcaagattggcgggtcgagttattacctattgcgatgcaaaagctctctggtgcagatgcaatggccgaaatctcgttgtcgcttcatgaaggtccaattctgttaggccacacaattccaaaaggcggttatgaacttactgaagaactcccctgggtttttgaagcgatgaatgagagtgaatcgcagctaaaacttgtcggtatggggtctgtgagttccaggctaaatgctctgtttatttcgctaccgaaaaatagccatttagatattagtggagaaggtgagtttgatatcccaaggttgctgaaaaacagtgaacgcagcttaactaaaataagtggagtatttagcgttgttttacatgatggtgcagtttgtacaattcgcacccagcaactttatgattctgcgattgaatattatattaaatcgacagaagttgaactggttaaatcggattatcctgtccatcgagcctggccgaagatcggttggaaaaaggatctgcaatatggcattgtaccggagaaagaacttttttggcgttccattcgttcaggtaacaatgcctggtattctgtcgcatcaaaaatgccaaaaggacagatagaagtcagacgaatagttaatgatgaggttttatttagcggtaaagttgtagttttaccagctgacttcgatattaatattatacctgagagtgctcagcaaggcatcataatgctttctggtataacggatactagaattgacaaatattcaaacaatgaaaaagtaacacttaagtccgattattcacaaaacgagtgtgctatttattataattcatcggagatgctggaaaataccgttgatttacgggtctcctggaaagatggttctaatcttaaactattattacctaagccggttagcggtggccgatttgtaactcatgatggttctgttcattttgatggtgtggcatctatagcgcatttgcatggaatagatgctgagttgttaaccatatcttgtgctggaagaggatatcttaatatcgagttgttggatgaaaatccagtagctgaaaaattccgttatttacatgccgaccttcctcttttatcaggatgcaatgacaaattaaaacaaatttcactttatgagaactataatttgctaaatgctatgctggcatgtgcatggagcagcaatagtacattatgtgttgatttttactctgacagatttggaaaggataaagcaacactcagtattaaacgctacgatggtagttttattgaacacgatcaagggttactggttgatataaaaaattctgttgtttttcctgcaaatagaatagacgagctggttgttgatgctatttctcttaaggatcctggcttacacatatcgttgctaaaaaaagatgaatttgcttatgatctttcagctctgaatgttcaggatagcccatggttaattgtggggaaacttgatggtacagctcgcattgcaccagtaattaaatgggggctacctgtattacagacaaatgatttattacttaatgctctatgcgaagcggattccgaacagcgaaaaaaatattttaatgagctaatttttgaaatagataacaatcctttgcaaaattattgctgtttattaacggagtatattaagaaatacaaaatgaataatggcttatccttgctggatctggatttgttcagaggtatttcgagtaattaccgcgtagttgttcagttgttaatatcatcatgtctttctggtgatagcgatacgatttatgatatacaggaagaattacccttttcatggggatggattcccgtttcaatctggaaagatgtttttcaaaagtgttgggcttatctggaaaaacagattaacgataaaacattagcattacatatattgcaaccctttattgcttttatgaaccatcgtgcacatatcgatcgtcgtctggctcccattgcgaatatgttacttacatatagcaaactcctaccagccggttgtaatgtcttgccaactgttagtcgtgagcagtttaatgaagctaaacagatgctattaaggaaccccgacagctttgggcgtatcagtatcttccctaaagaactttggtctagtgcgattactccagagttaaaatctgtttttaataagctttggattaaaaataaatatcactcacggcttgaaaaacgttttaatttgatgttagtcgcagcgctgttaacccaaaaagataataacttgatacatcaactgtctgcgctttttgaattccactatcagcaagccccgcagcaattaggggtaatctatcaatattattttgaacaagcaggagtatgtcattga

SEQ ID NO: 28752 - DNA, 6273 bp, Escherichia coli 907713; identical to SEQ ID NO: 28604

SEQ ID NO: 28753 - DNA, 3339 bp, Escherichia coli 907713; identical to SEQ ID NO: 28605

SEQ ID NO: 28754 - DNA, 6273 bp, Escherichia coli 907715; identical to SEQ ID NO: 28604

SEQ ID NO: 28755 - DNA, 1202 bp, Escherichia coli 907715
taacaggtgtctggaaatataggggcaaatccaaggcaggtattgaccaggttgttgagatgcgtattacgggggcgggtgtggtcatggcctggcaaattcgtcgctataaatacagtctgcgctatgattatgaaaaagaactattactcagccagtcagtgaaccatcgtgctggacagattccttcccccgttatcatgctgttaagtgaacccgagaggaaatccatccccttagcatcaagaatgagcgagggagtgcctgtcggtgaatatgagttgagctcaatcgttaacaaaaatggaccgtggttggttgtccctaaaccgggtgaagagatggcttttcgtccctgcttcattcgtggcgaatcttcgttaccggtagaagaaagcaacatccgctcattgcagaaagcgacccagctttttaatccacaggcagaagttaataccatcacactggttctcggacagatggctaacgatcctgcccattccggctggcaatttatgcgtagcctgtacgatcaatttggttatttaccactggcaacctttgaagtatggcgtgcactggtgcagcatccgcaggcattggcaatgtcgctcttcaaatttgaaatgtcagcagagtacctgagtcgtattgagaatgagttccctattctatgggagtttttccccatctttgagatcaaagcggcatctgagcgtttcaaattgttcctgagccaaaaaggtgcaccggaggaaacccagaaattactggttactaatatgtttcaacggctggggctcgtgttcccgacatatgccgatgaaattgagaaatggttaagtaacggacatctccccccgtctattcctgagtcttttgtccacgtgtggtatcaggagcttttacgtgagcatagtgaagctcaatggccagagtacggcagcaagcggctgcatagctggatggcatcacaaaaaaatccagtgattggtattaatcctgacgcaaatcaccgctattccgtggccttgttacccgtcttcgctgcagctgtggcaagcggaaatgcttcttttgaatctgtatttgaccgtaaacccggtgccgtatttttcctgaggcaagtcagggatttcgattcccgctggtttaaggccatcttccagtgcagcctgttgcgttatgttgctaaaaaataa

SEQ ID NO: 28756 - DNA, 6273 bp, Escherichia coli 908521; identical to SEQ ID NO: 28604

SEQ ID NO: 28757 - DNA, 3339 bp, Escherichia coli 908521; identical to SEQ ID NO: 28605

SEQ ID NO: 28758 - DNA, 6273 bp, Escherichia coli 908522; identical to SEQ ID NO: 28604

SEQ ID NO: 28759 - DNA, 1770 bp, Escherichia coli 908522
tcaattgagcaatgtcatatacaagagatgctgggggctcaatatctttctatccgtaatagtaagaatgaaacgctcttgcgtcgcaaaatcggtattttgcctgctgatttcagtattgagataaaaggtggaatacacgcaaatgaaggcactatcgtaatcaccacacagcatccttgtgtagcaaaacttaaagataaaacattggaggctacacgtaagcgtactgaggggcgaacagagatacaactcaaagcggaaggggtacctccggcatttattacattacaagttctgcctaatttggcggctgaccccatcgatattgagttaccttttcccgctaaaggctgtctcgctcttgatgtaaacggacgtcctctggataaaaacattacgctgcatgatctgctgggttccagagcgtttctgttctccagaaatggcgagccgacaagatatacattgcagttgcatttgcgctccgttagtggattacaggcatggcacgaatggtgttatacggcgttgagcgatcgtcctgttgaattgaatctctatagtctgcgcgaacatattgagaacctgatttcacttgaggcaggtattgaccaggttgttgagatgcgtattacgggggcgggtgtggtcatggcctggcaaattcgtcgctataaatacagtctgcgctatgattatgaaaaagaactattactcagccagtcagtgaaccatcgtgctggacagattccttcccccgttatcatgctgttaagtgaacccgagaggaaatccatccccttagcatcaagaatgagcgagggagtgcctgtcggtgaatatgagttgagctcaatcgttaacaaaaatggaccgtggttggttgtccctaaaccgggtgaagagatggcttttcgtccctgcttcattcgtggcgaatcttcgttaccggtagaagaaagcaacatccgctcattgcagaaagcgacccagctttttaatccacaggcagaagttaataccatcacactggttctcggacagatggctaacgatcctgcccattccggctggcaatttatgcgtagcctgtacgatcaatttggttatttaccactggcaacctttgaagtatggcgtgcactggtgcagcatccgcaggcattggcaatgtcgctcttcaaatttgaaatgtcagcagagtacctgagtcgtattgagaatgagttccctattctatgggagtttttccccatctttgagatcaaagcggcatctgagcgtttcaaattgttcctgagccaaaaaggtgcaccggaggaaacccagaaattactggttactaatatgtttcaacggctggggctcgtgttcccgacatatgccgatgaaattgagaaatggttaagtaacggacatctccccccgtctattcctgagtcttttgtccacgtgtggtatcaggagcttttacgtgagcatagtgaagctcaatggccagagtacggcagcaagcggctgcatagctggatggcatcacaaaaaaatccagtgattggtattaatcctgacgcaaatcaccgctattccgtggccttgttacccgtcttcgctgcagctgtggcaagcggaaatgcttcttttgaatctgtatttgaccgtaaacccggtgccgtatttttcctgaggcaagtcagggatttcgattcccgctggtttaaggccatcttccagtgcagcctgttgcgttatgttgctaaaaaataa

SEQ ID NO: 28760 - DNA, 6315 bp, Escherichia coli 908525; identical to SEQ ID NO: 28572

SEQ ID NO: 28761 - DNA, 3315 bp, Escherichia coli 908525
atgttttttagtcgccgttcattatccggagctgatggacgggcgttatatgcttaccgttgtactgatacagagtacgaaagtttggcagaactactgcgtacatatgccccccgtagttatccaagaacgatattcatttcctatagcgatgttctatttagcatatatgccgcagagtttatccgccggactcatacggtcggacaccctaaatgggacacaattttagattctattgactggaaagttccgtatgttcatcgacagaagctggttaatgatggcattcgctactggaaaagaaagataagaaacctggggcaagcttcgggttatctgcatacactggcttttgaaggtggtttacctatccgcatgattgaaaatgagagcggttatttgattacctatttcagaaggatatatcaggcgcttcgtgggcaagcatctcaatatcctgccgctaaaattgcacaagaattaggcgatacgattcctgtcacaatgcaaaacgaactggtctatgaaatagccggtgaattctgcgagactctctgccgattacttagtgagcatccacctcaaagcagtgatcccgtttctgcattacgtaagctctctccagactggcaccttcaacttccactcgttctccccgaagcgaatgctgcagagattgtaaggcgattactttctcaatcttctgaaatacgcagtgcaagtagtcttcaggttgaaagaatctgggtcgatgttgatgacagttggtattgtgatgcccggttccgattcccggccacaatgcgtacagaacagttaacctctttgtttgaatgcaatattcagccggagcagacccgactcatcatttcaggaaaatggagaaatggcggggcaaggttggcaatgctaagccgttatgagcagcaagattggcgggtcgagttattacctattgcgatgcaaaagctctctggtgcagatgcaatggccgaaatctcgttgtcgcttcatgaaggtccaattctgttaggccacacaattccaaaaggcggttatgaacttactgaagaactcccctgggtttttgaagcgatgaatgagagtgaatcgcagctaaaacttgtcggtatggggtctgtgagttccaggctaaatgctctgtttatttcgctaccgaaaaatagccatttagatattagtggagaaggtgagtttgatatcccaaggttgctgaaaaacagtgaacgcagcttaactaaaataagtggagtatttagcgttgttttacatgatggtgcagtttgtacaattcgcacccagcaactttatgattctgcgattgaatattatattaaatcgacagaagttgaactggttaaatcggattatcctgtccatcgagcctggccgaagatcggttggaaaaaggatctgcaatatggcattgtaccggagaaagaacttttttggcgttccattcgttcaggtaacaatgcctggtattctgtcgcatcaaaaatgccaaaaggacagatagaagtcagacgaatagttaatgatgaggttttatttagcggtaaagttgtagttttaccagctgacttcgatattaatattatacctgagagtgctcagcaaggcatcataatgctttctggtataacggatactagaattgacaaatattcaaacaatgaaaaagtaacacttaagtccgattattcacaaaacgagtgtgctatttattataattcatcggagatgctggaaaataccgttgatttacgggtctcctggaaagatggttctaatcttaaactattattacctaagccggttagcggtggccgatttgtaactcatgatggttctgttcattttgatggtgtggcatctatagcgcatttgcatggaatagatgctgagttgttaaccatatcttgtgctggaagaggatatcttaatatcgagttgttggatgaaaatccagtagctgaaaaattccgttatttacatgccgaccttcctcttttatcaggatgcaatgacaaattaaaacaaatttcactttatgagaactataatttgctaaatgctatgctggcatgtgcatggagcagcaatagtacattatgtgttgatttttactctgacagatttggaaaggataaagcaacgctcagtattaaacgctacgatggtagttttattgaacacgatcaagggttactggttgatataaaaaattctgttgtttttcctgcaaatagaatagacgagctggttgttgatgctatttctcttaaggatcctggcttacacatatcgttgctaaaaaaagatgaatttgcttatgatctttcagctctgaatgttcaggatagcccatggttaattgtggggaaacttgatggtacagctcgcattgcaccagtaattaaatgggggctacctgtattacagacaaatgatttattacttaatgctctatgcgaagcggattccgaacagcgaaaaaaatattttaatgagctaatttttgaaatagataacaatcctttgcaaaattattgctgtttattaacggagtatattaagaaatacaaaatgaataatggcttatccttgctggatctggatttgttcagaggtatttcgagtaattaccgcgtagttgttcagttgttaatatcatcatgtctttctggtgatagcgatacgatttatgatatacaggaagaattacccttttcatggggatggattcccgtttcaatctggaaagatgtttttcaaaagtgttgggcttatctggaaaaacagattaacgataaaacattagcattacatatattgcaaccctttattgcttttatgaaccatcgtgcacatatcgatcgtcgtctggctcccattgcgaatatgttacttacatatagcaaactcctaccagccggttgtaatgtcttgccaactgttagtcgtgagcagtttaatgaagctaaacagatgctattaaggaaccccgacagctttgggcgtatcagtatcttccctaaagaactttggtctagtgcgattactccagagttaaaatctgtttttaataagctttggattaaaaataaatatcactcacggcttgaaaaacgttttaatttgatgttagtcgcagcgctgttaacccaaaaagataataacttgatacatcaactgtctgcgctttttgaattccactatcagcaagccccgcagcaattaggggtaatctatcaatattattttgaacaagcaggagtatgtcattga

SEQ ID NO: 28762 - DNA, 6273 bp, Escherichia coli 908585; identical to SEQ ID NO: 28604

SEQ ID NO: 28763 - DNA, 3339 bp, Escherichia coli 908585; identical to SEQ ID NO: 28605

SEQ ID NO: 28764 - DNA, 6273 bp, Escherichia coli 908616; identical to SEQ ID NO: 28604

SEQ ID NO: 28765 - DNA, 3339 bp, Escherichia coli 908616; identical to SEQ ID NO: 28605

SEQ ID NO: 28766 - DNA, 6315 bp, Escherichia coli 93.0055; identical to SEQ ID NO: 28464

SEQ ID NO: 28767 - DNA, 2937 bp, Escherichia coli 93.0055; identical to SEQ ID NO: 28445

SEQ ID NO: 28768 - DNA, 6315 bp, Escherichia coli 93.0056; identical to SEQ ID NO: 28464

SEQ ID NO: 28769 - DNA, 2937 bp, Escherichia coli 93.0056; identical to SEQ ID NO: 28445

SEQ ID NO: 28770 - DNA, 6315 bp, Escherichia coli 93-001; identical to SEQ ID NO: 28464

SEQ ID NO: 28771 - DNA, 2949 bp, Escherichia coli 93-001; identical to SEQ ID NO: 28645

SEQ ID NO: 28772 - DNA, 6315 bp, Escherichia coli 94.0618; identical to SEQ ID NO: 28464

SEQ ID NO: 28773 - DNA, 2937 bp, Escherichia coli 94.0618; identical to SEQ ID NO: 28445

SEQ ID NO: 28774 - DNA, 6315 bp, Escherichia coli 95.0083; identical to SEQ ID NO: 28464

SEQ ID NO: 28775 - DNA, 2937 bp, Escherichia coli 95.0083; identical to SEQ ID NO: 28445

SEQ ID NO: 28776 - DNA, 6315 bp, Escherichia coli 95.1288; identical to SEQ ID NO: 28464

SEQ ID NO: 28777 - DNA, 702 bp, Escherichia coli 95.1288
atgaataatggcttatccttgctggatctggacttgttcagaggtatttcgagtaattaccgcgtggttgttcaattgttaatatcatcatgtctttctggtgatagcgatacgatttatgatatacaggaagaattacccttttcatggggatggattcccgtttcaatctggaaagatgttttccaaaaatgttggacttatctggagaaacagattaacgataaaacattagcattacatatattgcaaccctttattgcttttatgaaccatcgtgcacatatcgatcgtcggctggctccgattgcgaatatgttacttacatatagtgagagcctaccaaccggttgtgatgtattgccaactgttagtcgtgagcagtttaatgaagctaaacagatgctattaaggaaccccgacagctttgggcgtatcagtatcttccctaaagaactttggtctagtgctattactccagagttaaaatctgtttttaataagctttggattgaagataaatatcactcacggcttgaaaaacgttttaatttgatgttagtcgcagcgctgttaacccaaaaagataataacctgatacatcaactgtctgcgctttttgaatttcactatcagcaagccccacagcaattaggggtaatctatcaatattattttgaacaagcaggagtatgtcattga

SEQ ID NO: 28778 - DNA, 6315 bp, Escherichia coli 96.0107; identical to SEQ ID NO: 28464

SEQ ID NO: 28779 - DNA, 2937 bp, Escherichia coli 96.0107; identical to SEQ ID NO: 28445

SEQ ID NO: 28780 - DNA, 6315 bp, Escherichia coli 96.0109; identical to SEQ ID NO: 28464

SEQ ID NO: 28781 - DNA, 2937 bp, Escherichia coli 96.0109; identical to SEQ ID NO: 28445

SEQ ID NO: 28782 - DNA, 6315 bp, Escherichia coli 96.0427; identical to SEQ ID NO: 28464

SEQ ID NO: 28783 - DNA, 2937 bp, Escherichia coli 96.0427; identical to SEQ ID NO: 28445

SEQ ID NO: 28784 - DNA, 6315 bp, Escherichia coli 96.0428; identical to SEQ ID NO: 28464

SEQ ID NO: 28785 - DNA, 2937 bp, Escherichia coli 96.0428; identical to SEQ ID NO: 28445

SEQ ID NO: 28786 - DNA, 6315 bp, Escherichia coli 96.0932; identical to SEQ ID NO: 28732

SEQ ID NO: 28787 - DNA, 2937 bp, Escherichia coli 96.0932; identical to SEQ ID NO: 28733

SEQ ID NO: 28788 - DNA, 6315 bp, Escherichia coli 97.0003; identical to SEQ ID NO: 28464

SEQ ID NO: 28789 - DNA, 2949 bp, Escherichia coli 97.0003; identical to SEQ ID NO: 28645

SEQ ID NO: 28790 - DNA, 6315 bp, Escherichia coli 97.0007; identical to SEQ ID NO: 28464

SEQ ID NO: 28791 - DNA, 2937 bp, Escherichia coli 97.0007; identical to SEQ ID NO: 28445

SEQ ID NO: 28792 - DNA, 6315 bp, Escherichia coli 97.0010; identical to SEQ ID NO: 28464

SEQ ID NO: 28793 - DNA, 3354 bp, Escherichia coli 97.0010
gtgaaaactccagttaacccacttttgcaatggcttaacatgttttttagtcgccgttcattatccggagctgatggacgggcgttatatgcttaccgttgtactgatacagagtacgaaagtttggcagaactactgcgtacatatgccccccgtagttatccaagaacgatattcatttcctatagcgatgttctatttagcatatatgccgcagagtttatccgccggactcatacggtcggacaccctaaatgggacacaattttagattctattaactggaaagttccgtatgttcatcgacagaagctggttaatgatggcattcgctactggaaaagaaagataagaaacctgggacaagcttcgggttatctgcatacactggcttgtgaaggtggtttgcctatccgcatgattgaaaatgagagcggttatttgattacctatttcagaaggatatatcaggcgcttcgtgggcaatcatctcaatatcctgccgctaaaattgcacaagaattaggcgatacgattcctgtcacaatgcaaaacgaactggtctatgaaatagccggtgaattctgcgagactctctgccgattacttagtgagcatcctcctcatagcagtgatcccgtttctgcattacgtaagctctctccagactggcatcttcaacttccactcgttctccccgaagcgaatgctgcagagattgtaaggcgattactttctcaatcttctgaaatacgcagtgcaagtagtcttcaggttgaaagaatctgggtcgatgttgatgacagttggtattgcgatgcccggttccgattcccggccacaatgcgtacagaacagttaacctctttgtttgaatgccatattcagccggagcagacccgactcatcatttcaggaaaatggaaaaatggcggggcaaggttggcaatgctaagccgttatgagcagcaagattggcgggtcgagttattacctattgcgatgcaaaaactctctggtgcagatgcaatggccgaaatctcattgtcgcttcatgaaggtccaattctgttaggtcacacaattccaaaaggcggttatgaacttactgaagaacttccctgggtttttgaagcgatgaatgagagtgaatcgcagctaaaacttgttggtatggggtctgtgagttccaggctaaatgctctgtttatttcgctaccgaaaaatagccatttagatattagtggagaaggtgagtttgatatcccaaggttgctgaaaaacagtgaacgcagcttaactaaaataagtggagtatttagcgttgttttacatgatggtgctgtttgtacaattcgcacccagcaactttatgattctgcgattgaatattatattaaatcgacagaagttgaactggttaaatcggattatcctgtccatcgagcctggccgaagatcggttggaaaaaggatctgcaatatggcattgtaccggagaaagaacttttttggcgttccattcgttcaggtaataatgcctggtattctgtcgcatcagaaatgccaaaaggacagatagaagtccggcgaatagttaatgatgaggttttatttagcggtaaagttgtagttttaccagcagacttcgatattaatattatacctgagagtgctcagcaaggcattattatgctttctggtataacggatactagaattgataaatattcaaacaatgaaaaagtaacacttaagtccgattattcacaaaacgagtgtgctatttattataattcatcgctgatgctggaaaataccgttgatttacgggtctcctggaaagatggttctaatcttaaactattattacctaagccggttagcggtggccgatttgtaactaatgatggttctgttcattttgatggtgtggcatctatagcacatttgcatggaatagatgctgagttattaaccatatcatgtgctggaagaggatatcttaatatcgagttattggatgaaaatccagtagctgaaaaattccgctatttacatgccgaccttcctcttttatcaggacgcaatgacaaattacaacaaatttcactttatgagaactataatttgctaaatgctatgctggcatgtgcatggaacagcaatagtacattatgtgttgatttttactctgacagatttggaaaggataaagcaacactcaatattaaacgctacgatggtagttttattgaacacgatcaagggttactggttgatataaaaaattctgttgtttttcctgcaaatagaatagacgaactggttgttgatgctatttctcttaagaatcctggcttacacatatcattgttaaaaaaagatgagtttgcttatgatctttcagctctgaatgttcaggatagtccatggttaattgtgggaaaacttgatggtacagctcgcattgcaccagtaattaaatggatgctacctgtattgcagacaaatgatttattactaaatgctctatgcgaagcagacccagaacagcgcaaaaaaaattttaatgagctaatttttgaaatagataacaacccattgcaaaattattgctgtttattaacagagtatattaagaaatacaaaatgaataatggcttatccttgctggatctggacttgttcagaggtatttcgagtaattaccgcgtggttgttcaattgttaatatcatcatgtctttctggtgatagcgatacgatttatgatatacaggaagaattacccttttcatggggatggattcccgtttcaatctggaaagatgttttccaaaaatgttggacttatctggagaaacagattaacgataaaacattagcattacatatattgcaaccctttattgcttttatgaaccatcgtgcacatatcgatcgtcggctggctccgattgcgaatatgttacttacatatagtgagagcctaccaaccggttgtgatgtattgccaactgttagtcgtgagcagtttaatgaagctaaacagatgctattaaggaaccccgacagctttgggcgtatcagtatcttccctaaagaactttggtctagtgctattactccagagttaaaatctgtttttaataagctttggattgaagataaatatcactcacggcttgaaaaacgttttaatttgatgttagtcgcagcgctgttaacccaaaaagataataacctgatacatcaactgtctgcgctttttgaatttcactatcagcaagccccacagcaattaggggtaatctatcaatattattttgaacaagcaggagtatgtcattga

SEQ ID NO: 28794 - DNA, 6315 bp, Escherichia coli 97.1742; identical to SEQ ID NO: 28540

SEQ ID NO: 28795 - DNA, 2937 bp, Escherichia coli 97.1742; identical to SEQ ID NO: 28445

SEQ ID NO: 28796 - DNA, 6315 bp, Escherichia coli 99.0670; identical to SEQ ID NO: 28464

SEQ ID NO: 28797 - DNA, 2937 bp, Escherichia coli 99.0670; identical to SEQ ID NO: 28445

SEQ ID NO: 28798 - DNA, 6315 bp, Escherichia coli 99.0678; identical to SEQ ID NO: 28636

SEQ ID NO: 28799 - DNA, 2937 bp, Escherichia coli 99.0678; identical to SEQ ID NO: 28445

SEQ ID NO: 28800 - DNA, 6315 bp, Escherichia coli 99.0713; identical to SEQ ID NO: 28464

SEQ ID NO: 28801 - DNA, 2937 bp, Escherichia coli 99.0713; identical to SEQ ID NO: 28445

SEQ ID NO: 28802 - DNA, 6315 bp, Escherichia coli 99.0839; identical to SEQ ID NO: 28636

SEQ ID NO: 28803 - DNA, 2937 bp, Escherichia coli 99.0839; identical to SEQ ID NO: 28445

SEQ ID NO: 28804 - DNA, 6315 bp, Escherichia coli 99.0848; identical to SEQ ID NO: 28636

SEQ ID NO: 28805 - DNA, 2937 bp, Escherichia coli 99.0848; identical to SEQ ID NO: 28445

SEQ ID NO: 28806 - DNA, 6315 bp, Escherichia coli 99.1753; identical to SEQ ID NO: 28464

SEQ ID NO: 28807 - DNA, 2937 bp, Escherichia coli 99.1753; identical to SEQ ID NO: 28445

SEQ ID NO: 28808 - DNA, 6315 bp, Escherichia coli 99.1762; identical to SEQ ID NO: 28540

SEQ ID NO: 28809 - DNA, 2937 bp, Escherichia coli 99.1762; identical to SEQ ID NO: 28445

SEQ ID NO: 28810 - DNA, 6315 bp, Escherichia coli 99.1775; identical to SEQ ID NO: 28464

SEQ ID NO: 28811 - DNA, 2937 bp, Escherichia coli 99.1775; identical to SEQ ID NO: 28445

SEQ ID NO: 28812 - DNA, 6315 bp, Escherichia coli 99.1781; identical to SEQ ID NO: 28464

SEQ ID NO: 28813 - DNA, 3360 bp, Escherichia coli 99.1781
ttgcttgtgaaaactccagttaacccacttttgcaatggcttaacatgttttttagtcgccgttcattatccggagctgatggacgggcgttatatgcttaccgttgtactgatacagagtacgaaagtttggcagaactactgcgtacatatgccccccgtagttatccaagaacgatattcatttcctatagcgatgttctatttagcatatatgccgcagagtttatccgccggactcatacggtcggacaccctaaatgggacacaattttagattctattaactggaaagttccgtatgttcatcgacagaagctggttaatgatggcattcgctactggaaaagaaagataagaaacctgggacaagcttcgggttatctgcatacactggcttgtgaaggtggtttgcctatccgcatgattgaaaatgagagcggttatttgattacctatttcagaaggatatatcaggcgcttcgtgggcaatcatctcaatatcctgccgctaaaattgcacaagaattaggcgatacgattcctgtcacaatgcaaaacgaactggtctatgaaatagccggtgaattctgcgagactctctgccgattacttagtgagcatcctcctcatagcagtgatcccgtttctgcattacgtaagctctctccagactggcatcttcaacttccactcgttctccccgaagcgaatgctgcagagattgtaaggcgattactttctcaatcttctgaaatacgcagtgcaagtagtcttcaggttgaaagaatctgggtcgatgttgatgacagttggtattgcgatgcccggttccgattcccggccacaatgcgtacagaacagttaacctctttgtttgaatgccatattcagccggagcagacccgactcatcatttcaggaaaatggaaaaatggcggggcaaggttggcaatgctaagccgttatgagcagcaagattggcgggtcgagttattacctattgcgatgcaaaaactctctggtgcagatgcaatggccgaaatctcattgtcgcttcatgaaggtccaattctgttaggtcacacaattccaaaaggcggttatgaacttactgaagaacttccctgggtttttgaagcgatgaatgagagtgaatcgcagctaaaacttgttggtatggggtctgtgagttccaggctaaatgctctgtttatttcgctaccgaaaaatagccatttagatattagtggagaaggtgagtttgatatcccaaggttgctgaaaaacagtgaacgcagcttaactaaaataagtggagtatttagcgttgttttacatgatggtgctgtttgtacaattcgcacccagcaactttatgattctgcgattgaatattatattaaatcgacagaagttgaactggttaaatcggattatcctgtccatcgagcctggccgaagatcggttggaaaaaggatctgcaatatggcattgtaccggagaaagaacttttttggcgttccattcgttcaggtaataatgcctggtattctgtcgcatcagaaatgccaaaaggacagatagaagtccggcgaatagttaatgatgaggttttatttagcggtaaagttgtagttttaccagcagacttcgatattaatattatacctgagagtgctcagcaaggcattattatgctttctggtataacggatactagaattgataaatattcaaacaatgaaaaagtaacacttaagtccgattattcacaaaacgagtgtgctatttattataattcatcgctgatgctggaaaataccgttgatttacgggtctcctggaaagatggttctaatcttaaactattattacctaagccggttagcggtggccgatttgtaactaatgatggttctgttcattttgatggtgtggcatctatagcacatttgcatggaatagatgctgagttattaaccatatcatgtgctggaagaggatatcttaatatcgagttattggatgaaaatccagtagctgaaaaattccgctatttacatgccgaccttcctcttttatcaggacgcaatgacaaattacaacaaatttcactttatgagaactataatttgctaaatgctatgctggcatgtgcatggaacagcaatagtacattatgtgttgatttttactctgacagatttggaaaggataaagcaacactcaatattaaacgctacgatggtagttttattgaacacgatcaagggttactggttgatataaaaaattctgttgtttttcctgcaaatagaatagacgaactggttgttgatgctatttctcttaagaatcctggcttacacatatcattgttaaaaaaagatgagtttgcttatgatctttcagctctgaatgttcaggatagtccatggttaattgtgggaaaacttgatggtacagctcgcattgcaccagtaattaaatggatgctacctgtattgcagacaaatgatttattactaaatgctctatgcgaagcagacccagaacagcgcaaaaaaaattttaatgagctaatttttgaaatagataacaacccattgcaaaattattgctgtttattaacagagtatattaagaaatacaaaatgaataatggcttatccttgctggatctggacttgttcagaggtatttcgagtaattaccgcgtggttgttcaattgttaatatcatcatgtctttctggtgatagcgatacgatttatgatatacaggaagaattacccttttcatggggatggattcccgtttcaatctggaaagatgttttccaaaaatgttggacttatctggagaaacagattaacgataaaacattagcattacatatattgcaaccctttattgcttttatgaaccatcgtgcacatatcgatcgtcggctggctccgattgcgaatatgttacttacatatagtgagagcctaccaaccggttgtgatgtattgccaactgttagtcgtgagcagtttaatgaagctaaacagatgctattaaggaaccccgacagctttgggcgtatcagtatcttccctaaagaactttggtctagtgctattactccagagttaaaatctgtttttaataagctttggattgaagataaatatcactcacggcttgaaaaacgttttaatttgatgttagtcgcagcgctgttaacccaaaaagataataacctgatacatcaactgtctgcgctttttgaatttcactatcagcaagccccacagcaattaggggtaatctatcaatattattttgaacaagcaggagtatgtcattga

SEQ ID NO: 28814 - DNA, 6315 bp, Escherichia coli 99.1793
atggacgttcagcaactgcattatgcgccacttctaaatcagcttcatcagcgtgcggtgaggtcggtggtaagtcagttggcattgcggagcaagtcgttgactcattatctggaatcacaatattttcagcctcccggtcaggaggggtcactgcttgcagacccggtattcgaaagtacattcggctggatgcctgcggatgaaacaatggaggatttgcgggacaagctgatctccagcccgctggttgatgcattgagcaaagcgccagtgccatttcgtcatcaacttactgcgtggcgaacgattctggaagacaaaaaatccttgttagtgagcagcggtacgggatccgggaaaacagaatgctttatggtaccggttctggaagatcttattcgtcagcaaaaatcgacccgccagtcactaacagggacacaagctattttcttgtatccgttaaatgcattaattaacagccaacaggagcggcttcgcgaatggacgcgcggatttaaggggaaaatacgcttcgcgctatataatggcgaaacccggcataccaaatacgaaattcaggaagatcagttgaaagtacctgaacaagctttgagtcgggaagccatttatgaagcaccaccttccatcatggtgacgaataccaccatgctggaatatatgctgattcgtcgtaaagatgccccaatcatcgaaaagtctcaggggatgttaaagtatatcgtcctggatgaagcccatagttatattggttctcaggctgctgagttagcgctgcttttacgtcgtgttatgcaggctttcaatgttggacccggcacagataaacctgtgcagattatcgcgacctctgccactattggtgaagactctcctgaaggtaataaggagcttgctaaatttgtcgctgatctcgcgggcgttacagaacgtgatgtcaaagtggttcgcggttatcgacaaataccgcgggtatcggagtcgctgattcgtcatgaataccccacatctttaacttctcttaaatccctgagccctcaggatctttaccaacagctttgtcattaccgtgtggcccagcaattgcgtcaggcgttaactcatcccggacggcaggcagtacgtttgagtgagttgctcaatgttgccagaagaacctggccagatattaatcaccgtgagctactgcaactcctcgatctaatggcaagatcgcgagaaggtgaactggcttttacgccattacgtatgcatgggtttatcagaacactggcgggtctatgggcatgttcaaacaaacaatgctcacataaagcacatgaattaaatcagagtgactggccatttggtcaggtatggtttgagcagcgccaatattgtgactgtggagcgccggtatttgaagttttacgttgctccgggtgtggttcagcttatttgtctgccaaagaggagatgcgcggtgatggaacgaactggttggtagcgcaaccagccgctgccgaagtggatgagtttgctcttgatgtagatgtttattctgaagatgaagacaacgacgaattagacaataactctcaatttgatcgtctgattgcgagcgatggtgaaaaatatatcatttcactggaagaaacgacggcggggaaaattgatagtgaagcgcaaaagcactatgaaataaacctgttaagaccggaatctcgaggtgagggacgcaataactcctttgcttgtgtttgctgtggtgacactcaacggaaaaataatcctttattccgtccgcttcggctcggcgcgcccttttttttaaatgaaattattcctactctgctggagttttctccattaccgcaaacaagagaagagcagttaggaccgtttaatggtcgacgcttgctcacctttacggattcgcgtcagggtaccgctcgcatttcagcccgcttacagcaggatgccgataaagcgacgttgcgagctctttgttaccaggagctggcaaatattacagagccttcagcaaaactcagcccggcacactgtgcactgttagagaaagttattagccagttttctgtcctccctttaaaaaattccatcgacgcgctgaaaaaagcgatggctgcgaatgaggagcttagcccgacggacattcaggcacttaaaattattgagccgatggtgagttccttaagcacggagcatgctgaagcgatgcaaatacttcaggctaactctggcaatcagcagaagaaaaccatgtcatggcaaacgctgtctgaacagctggttggcagtgtggaccttgccgatagaatgagaggcagttttaaagaattgtctgggcttgatcttactaaacaacagtttgcagatttttgtttatacagcgagtttggtcgccgccctaaaaatgcctggaccctcgaaagtctgggtctggtagccattcactatccattcattgataaagttacaacctgcccgcaggactggaagacattattacccgatcccgataagcaattagcggaatggcgtaatttattgaagattactcttgatttctttatccgtgaaaacagtgccgttttttacgaaaacgagcaataccctcgctggatgggggcacgtttcccggtaaaaatgctccaggggccagataaaaaaaacaaagggcagaaacgtgatcaactttggccacaaatacgcgatcgccattataaccgggtcattaagctattaatcgcagtctttccggcaatacaacctgagcaggctcactggaaatcgttagttaaccacttaatgattgaggtctgggatgcaattcgaccctgcttacgtcagtttgagtcgggttatcagctggatattaaacaacaagctgaattttacagtccaaagcaagtgtggcgttgcccctatactcgacgtgcgttagacgtcacgttgctgggatactctccgtatttgccgggtagcaaagaaattgcacctgaaaaagcagtgttgattgaaatgcctgagcttcctgtacgtcactggcgtttgtctggtggtggagaaatcgcccgagaagaacgtctggagtggctggaaagtaatgcgctgattcaacatgcccgcgaggaaggattatggtctactcgcagcgaccgactggccctgaaagatagctggtatcgtctggaggaacactctgcgcagagaacgcctgagcagaaccagtttaatgaaaaacaatttaagtcaggcaaagttaatgtgctgaactgttccacgaccatggagatgggggtggatattggtggtatgagtttggtggcaatgaacaacgttcctccagcgccggcaaattatttgcaacgtgcaggtcgcgcggggcgtcgtggagagagtgcatctgctgccattacgttatgtaaaaacacggcgcatggaatggaggtattcaaagaccccctctgggcgttcaacactactgccagtgcgccacgggttcgttttgggagcagtagtattgttcaacgacatgttaatgccctggttttaggtctgtttttacgagctgaagttcctgatgcgacaaaactgagttgcaaatggttctttgaaggtgatgagagccagtgtcttcgttttctccattggttaaatcaccaggccgatcagctggcggataaacttaaacgccttactcagggaaccgtactgatgtcattgacggcaacccagctcttgacccgcacacaagcaatgatgcagcaggttgatatccgctggagaagccaacttgcgatactgttggaaaatatcgaagcgttgaaggcggataacagcgcgtgggaagaaacaccagcaggtaaagccatcgcttatcagcttcgtgattatcgcggtgcatatctgttttctaaactcattagtgaagcgttcctgccggggcatggtttcccggttggcgtagtcaatttcaattatctgacggcagatgagctggaaaaacgtcgcgcaataaaagccactcaggctgaccctaatgaagggggagaaagcttttctcgtcgtattgaaaaattgcccagccgtgatttgcctacagcattacgcgagtatgcgcctggtgcagatgtggtattgggcggaaaagtatatcgttcctcgggcattatgcttggcaaggtgcttgccagcgggcaggagctgtcaggcgatcatcatattccgtggttctggcattgccgtaaatgtggtgcgggggcaaccagtactacccatcctgtcgaatgtagtcactgcaaagcggatatacagcaacttgatgtgaagcgttatttacagcctgttggttttgcgacagatattcgttatcaggcacataatgatgtatccatgcctgcacaacttccctggaaagatccacgtgttcttgtaccgtcttcggtgtgggtttctttacccgatgctgggctaggacgttaccgttttagccatagtggggaattgttccacttcagtgaaggggaatttgggcacggctacacaatttgcctctcatgtggtcgggcagaatctcaaactcaaccccagcgtacccctgaaaatctaaagaacccagagagggaaaatacgcattacctgttgcgagggggcagtaacgatcgtcaggggagcaataaattgtgccacggtcatgtgcataaagatctgtggttgggatatagcagtcgtacagatatggttgagctgcaactcaatgatgataatggcctgttgatccgtgatgaggttgccgcgcgttcccttgcggtcgctttgcgtgaagggttagcgcataaattgggtatcgaaaatactgagctgggcgtgacgacgcagcaagcgcgcgatatcaatggctataccggatattccatcttcatttacgacaataatgcgggtggtgcaggttatgcagtgcaattgatcgaccattgggctgatgtctttaattacgccagaaaattgctcgattgcagttgcgataaattctgtcaccactgcttgctcagctacgacagtcagcattatgtcaacagattagatcgtcaccatgcattaaccctgcttaccaatgtacggttgcagcgacttaacctcgcgccagaatatcagtacttcggcgatggtagccgggttgaaactaaccctctgagtttacgtattgcgcaatgcctgaacagcgagatttatgactcctgctcgctggttcttgcggggccgcaggaacagtgggactttgcccaatggccattatttaaagagttgctccagtttgcctcctccggtgggaatgttgagttgctggtggccacgccgctggcaaacttaactgatagctccagacatcagctttccgcgttggcggcgatgccgggaggtcgcttacaagtgaaatccattgccactgcgcagctcatgcaaggaaaggggcgctggcttgcgcaggtgactcgcgaagggcaaagccaacagtgggccgcagacgacagcgctaccgttgcacctggtgaattatggggacaaagtgcgtcttcaccagtagtgacacttaaaggaacgtccggaaaaaccttctcgggtcagaccttaagtgcagaagatttactgcccgccttacccaccggggcggtgcgcatcaatctctgtgaacaactggacgggccgctggaaggttttggttcgcgtttctggtcgttagtcacgcaacagcacgctggctggaagcaggcatttacccgccacaaagagataacgcatgttgagtacagcgatcgttatcttaatagcccattcacggcgcgtttgttaggtgaaatcttaaccgagctggttgaacagggaatggcggaacgcgccagcctcactgtttgcgtcaaaaaattggattacaactctcgccaacacgacgctctctataacgcgtggcttaatgaggaagatcgtcagcaggttgtgaccactttacttgaagaaggatatctggggcctgcgtggccgggagcaattagctggttaacgggggataaccagagtacggagcatggacgagaactgacagtcaccttcagcgatggcagtcagcattatgtcctgctcgacatggggcttagctactggcgctgtattgaagataccttctttgattttgccctgcgagtaccgcagcaagttgaacggctggcaaacacgcgagcgcgagctgttgccccgggtaatgaccttaggagttatattatcgctggataa

SEQ ID NO: 28815 - DNA, 2937 bp, Escherichia coli 99.1793; identical to SEQ ID NO: 28445

SEQ ID NO: 28816 - DNA, 6315 bp, Escherichia coli ATCC 35150; identical to SEQ ID NO: 28444

SEQ ID NO: 28817 - DNA, 3391 bp, Escherichia coli ATCC 35150
gcagaaaaagcttattatgcttccatcggaaacgatgatctggcagcctgagttcacagataaaacactctccaggaaacccggggcggttcattcattatccggagctgatggacgggcgttatatgcttaccgttgtactgatacagagtacgaaagtttggcagaactactgcgtacatatgccccccgtagttatccaagaacgatattcatttcctatagcgatgttctatttagcatatatgccgcagagtttatccgccggactcatacggtcggacaccctaaatgggacacaattttagattctattaactggaaagttccgtatgttcatcgacagaagctggttaatgatggcattcgctactggaaaagaaagataagaaacctgggacaagcttcgggttatctgcatacactggcttgtgaaggtggtttgcctatccgcatgattgaaaatgagagcggttatttgattacctatttcagaaggatatatcaggcgcttcgtgggcaatcatctcaatatcctgccgctaaaattgcacaagaattaggcgatacgattcctgtcacaatgcaaaacgaactggtctatgaaatagccggtgaattctgcgagactctctgccgattacttagtgagcatcctcctcatagcagtgatcccgtttctgcattacgtaagctctctccagactggcatcttcaacttccactcgttctccccgaagcgaatgctgcagagattgtaaggcgattactttctcaatcttctgaaatacgcagtgcaagtagtcttcaggttgaaagaatctgggtcgatgttgatgacagttggtattgcgatgcccggttccgattcccggccacaatgcgtacagaacagttaacctctttgtttgaatgccatattcagccggagcagacccgactcatcatttcaggaaaatggaaaaatggcggggcaaggttggcaatgctaagccgttatgagcagcaagattggcgggtcgagttattacctattgcgatgcaaaaactctctggtgcagatgcaatggccgaaatctcattgtcgcttcatgaaggtccaattctgttaggtcacacaattccaaaaggcggttatgaacttactgaagaacttccctgggtttttgaagcgatgaatgagagtgaatcgcagctaaaacttgttggtatggggtctgtgagttccaggctaaatgctctgtttatttcgctaccgaaaaatagccatttagatattagtggagaaggtgagtttgatatcccaaggttgctgaaaaacagtgaacgcagcttaactaaaataagtggagtatttagcgttgttttacatgatggtgctgtttgtacaattcgcacccagcaactttatgattctgcgattgaatattatattaaatcgacagaagttgaactggttaaatcggattatcctgtccatcgagcctggccgaagatcggttggaaaaaggatctgcaatatggcattgtaccggagaaagaacttttttggcgttccattcgttcaggtaataatgcctggtattctgtcgcatcagaaatgccaaaaggacagatagaagtccggcgaatagttaatgatgaggttttatttagcggtaaagttgtagttttaccagcagacttcgatattaatattatacctgagagtgctcagcaaggcattattatgctttctggtataacggatactagaattgataaatattcaaacaatgaaaaagtaacacttaagtccgattattcacaaaacgagtgtgctatttattataattcatcgctgatgctggaaaataccgttgatttacgggtctcctggaaagatggttctaatcttaaactattattacctaagccggttagcggtggccgatttgtaactaatgatggttctgttcattttgatggtgtggcatctatagcacatttgcatggaatagatgctgagttattaaccatatcatgtgctggaagaggatatcttaatatcgagttattggatgaaaatccagtagctgaaaaattccgctatttacatgccgaccttcctcttttatcaggacgcaatgacaaattacaacaaatttcactttatgagaactataatttgctaaatgctatgctggcatgtgcatggaacagcaatagtacattatgtgttgatttttactctgacagatttggaaaggataaagcaacactcaatattaaacgctacgatggtagttttattgaacacgatcaagggttactggttgatataaaaaattctgttgtttttcctgcaaatagaatagacgaactggttgttgatgctatttctcttaagaatcctggcttacacatatcattgttaaaaaaagatgagtttgcttatgatctttcagctctgaatgttcaggatagtccatggttaattgtgggaaaacttgatggtacagctcgcattgcaccagtaattaaatggatgctacctgtattgcagacaaatgatttattactaaatgctctatgcgaagcagacccagaacagcgcaaaaaaaattttaatgagctaatttttgaaatagataacaacccattgcaaaattattgctgtttattaacagagtatattaagaaatacaaaatgaataatggcttatccttgctggatctggacttgttcagaggtatttcgagtaattaccgcgtggttgttcaattgttaatatcatcatgtctttctggtgatagcgatacgatttatgatatacaggaagaattacccttttcatggggatggattcccgtttcaatctggaaagatgttttccaaaaatgttggacttatctggagaaacagattaacgataaaacattagcattacatatattgcaaccctttattgcttttatgaaccatcgtgcacatatcgatcgtcggctggctccgattgcgaatatgttacttacatatagtgagagcctaccaaccggttgtgatgtattgccaactgttagtcgtgagcagtttaatgaagctaaacagatgctattaaggaaccccgacagctttgggcgtatcagtatcttccctaaagaactttggtctagtgctattactccagagttaaaatctgtttttaataagctttggattgaagataaatatcactcacggcttgaaaaacgttttaatttgatgttagtcgcagcgctgttaacccaaaaagataataacctgatacatcaactgtctgcgctttttgaatttcactatcagcaagccccacagcaattaggggtaatctatcaatattattttgaacaagcaggagtatgtcattga

SEQ ID NO: 28818 - DNA, 6315 bp, Escherichia coli ATCC 700728; identical to SEQ ID NO: 28464

SEQ ID NO: 28819 - DNA, 2937 bp, Escherichia coli ATCC 700728; identical to SEQ ID NO: 28445

SEQ ID NO: 28820 - DNA, 6315 bp, Escherichia coli ATCC 8739
atggacgttcagcaactgcattatgcgccacttctaaatcagcttcatcagcgcgcggtgaggtcggtggtaagtcagttggcattgcggagcaagtcgttgactcattatctggaatcacaatatttccagcctcccggtcaggaggggtcactgcttgcagacccggtattcgaaagcacgttcggctggatgcctgcggatgaaacaatggaggatttgcgggacaagctaatttccagcccgctggttgatgcattgagcaaagcgccggtgccatttcgtcatcaacttacggcgtggcgaacgattctggaagacaaaaaatccttgttagtgagcagcggtacgggatccgggaaaacagaatgctttatggtaccggttctggaagatcttattcgtcagcaaaaatcgacccgtcagtcactaacagggacacaagctattttcttgtatccgttaaatgcattaattaacagccaacaggagcggcttcgcgaatggacgcgcggatttaaggggaaaatacgcttcgcgctatataatggcgaaacccggcataccaaatacgaagttcaggaagatcagttgaaagtacctgaacaagctttgagtcgggaagccatttacgaagcaccaccttccatcatggtgacgaataccaccatgctggaatatatgctgattcgtcgtaaagatgccccaatcatcgaaaagtctcaggggatgttaaagtatatcgtcctggatgaagcccatagttatattggttctcaggctgctgagttagcgctgcttttacgtcgtgttatgcaggctttcaatgttggaccaggcacagataaacctgtgcagattatcgcgacctctgccactattggtgaagactctcctgaaggtaataaggagcttgctaaatttgtcgctgatcttgcgggcgttacagaacgtgatgtcaaagtggttcgcggctatcgacaaataccgcgggtatcggagtcgctgattcgtcatgaatatcccacatctttaacttctcttaaatctttgagccctcaggatctttaccaacagctttgtcattaccgtgtggcccagcaattgcgtcaggcgttaactcatcccggacggcaggcagtacgtttgagtgagttgctcaatgttgccagaagaacctggccaaatattgatcaccgtgagttactgcaactcctcgacctaatggcgagatcgcgagaaggtgaactggcttttacgccattacgtatgcatggatttatcagaacactggcgggtctatgggcatgttcaaacaaacaatgctcacataaagcacatgaattaaatcagagtgactggccatttggtcaggtatggtttgagcagcgccaatattgtgactgtggtgcgccggtatttgaagttttacgttgctccgggtgtggttcagcttatttgtctgccaaagaggagatgcgcggtgatggaacgaactggttggtagcgcaacccgccgctgccgaagtggatgagtttgctcttgatgtagatgtttattctgaagatgaagacaacgacgaattagacaataactctcaatttgatcgtctgattgcgagcgatggtgaaaaatatatcatttcactggaagaaacgacggcggggaaaattgatagtgaagcgcaaaagcactatgaaataaacctgttaagaccggaatctcgaggtgagggacgtaataattcctttgcttgtgtttgctgtggtgacagccaacgaaaaaataatcctttattccgtccgcttcgacttggcgcgcccttttttttaaatgaaattattcctactctgctggagttttcaccattaccgcagacaagagaagagcagttaggaccgtttaatggtcgacgtctgctcacctttacggattcacgtcagggcactgcccgcatttctgcccgcttacagcaggatgccgataaagcgacgttgcgagctctttgctaccaggagctggccaatattaatgagccatcagcaaagctcagcccggcacactgcgcattgttagagagttttattgcccagttttctatccttcctttaaaaaactctattgacgcgctgaaaaaagcgatggttgctaatgaagagcttagcccggcggacattcaggcacttaaaattatcgagccgatggtgagttccttaagcccggatcatgctgaagcgatgcaaatactccaggctaactctggcaatcagcagaagaaaaccatgtcatggcaaacactgtctgaacagctggttggcagtgtggaccttgccgatagaatgagaggcagttttaaagaattgtctgggcttgatcttactaaacaacagtttgcagatttttgtttatacagtgagtttggtcgccgccctaaaaatgcctggaccctcgaaagtctgggtctggtagccattcactatccatttattgataaagttacaacctgcccgcaggactggaagacattattacccgatcccgataagcaattagcggaatggcgtaatttattgaagattactcttgatttctttatacgtgaaaacagtgccgttttttacgaaaacgagcaataccctcgctggatgggggctcgtttcccggtaaaaatgctccagggtccagataaaaaaaacaaagggcagaaacgtgatcaactttggccacaaatacgcgatcgccattataaccgggtcattaagctattaatcgcagtctttccggcaatacaacctgagcaggctcactggaaatcgttagttaaccacttaatgattgaggtctgggatgcaattcgaccctgcttacgtcagtttgagtcgggctatcagctggatattaaacaacaggctgaattttacagtccaaagcaagtgtggcgttgcccctatactcgacgtgcgttagacgtcacgttgctgggatactctccgtatttgccgggtagcaaagaaattgcacctgaaaaagcagtgttgattgaaatgcctgagcttcctgtacgtcactggcgtttgtctggtggtggagaaatcgcccgagaagaacgcctggagtggctggaaagtaatgcgctgattcaacatgcccgcgaggaaggattatggtctactcgcagcgaccgactggccctgaaagatagctggtatcgtctggaggaacactctgcgcagagaacgcctgagcagaaccagtttaatgaaaaacaatttaagtcaggcaaagttaatgtgctgaactgctccacgaccatggagatgggggtggacattggtggtatgagtttggtggcaatgaacaacgttcctccagctccggcaaattatttgcagcgtgcaggccgcgcgggtcgacgtggagagagtgcatctgctgccattacgttatgtaaaaacacggcgcatggaatggaggtattcaaagaccccctctgggcgttcaacactactgccagtgcgccacgggttcgttttgggagcagcagtattgttcaacgacatgttaatgccctggttttaggtctgtttttacgagctgaagttcctgatgcgacaaaactgagttgcaaatggttctttgaaggtgatgagagccagtgtcttcgttttctccattggttaaataaccaggccgatcagctggcggataaacttaaacgccttactcagggaaccgtcctgatgtcattgacggcaacccagctcttgacccgcacacaagcaatgatgcagcaggttgatatccgctggagaagccaacttgcgatactgttggaaaatatcgaagcgttgaaagcggataacagcgcgtgggaagaaacgccagcaggtaaagccatcgcttatcagcttcgtgattatcgcggtgcatatctgttttctaaactcattagtgaagcgttcctgccggggcatggtttcccggttggtgtcgtcaatttcaattatctgacggcagatgagctggaaaaacgtcgcgcaataaaagctactcaggctgaccctaatgaagggggagaaagcttttctcgtcgtattgaaaaattgcccagccgtgatctacctacagcattacgcgagtatgcgcctggtgcagatgtggtattgggcggaaaagtatatcgttcctcgggcattatgcttggcaaggtacttgccagcgggcaggagctgtcaggcgatcatcatattccgtggttctggcattgccgtaaatgtggtgcgggggcaaccagtgctacccatcctgtcgaatgtagtcactgcaaagcggatatacagcaacttgatgtgaagcgttatttacagcctgttggttttgcgacagatattcgttatcaggcacataatgatgtatccatgcctgcacaacttccctggaaagatccacgtgttcttgtaccgtcttcggtgtgggtttctttacccgatgctgggctaggacgttaccgttttagccatagtggggaattgttccacttcagtgaaggggaatttgggcacggctacgcaatttgcctctcatgtggtcgggcagaatctcaaactcaaccccagcgtacccctgaaaatctaaagaacccagagcgggaaaatacgcattacctgttgcgagggggcagtaacgatcgtcaggggagcaataaattgtgccacggtcatgtgcataaagatctgtggttggggtatagcagtcgtacagatatggttgagctgcaactcaatgatgataatggcctgttgatccgtgatgaggttgccgcgcgttcccttgcggtcgctttgcgtgaagggttagcgcataaattgggtatcgaaaatactgagctgggcgtgacgacgcagcaagcgcgcgatatcaatggctataccggatattccatcttcatttacgacaataatgcgggtggtgcaggttatgcagtgcaattgatcgaccattgggctgatgtctttaattacgccagaaaattgctcgattgcagttgcgataaattctgtcaccactgcttgctcagctacgacagtcagcattatgtcaacagattagagcgtcaccatgcattaaccctgcttaccaatgtacggttgcagcgacttaacctcgcgccagaatatcagtacttcgtcgatggtagccgggttgaaactaaccctctgagtttacgtattgcgcaatgcctgaacagcgagatttatgactcctgctcgctggttcttgcggggccgcaggaacagtgggactttgcccaatggccattatttaaagagttgctccagtttgcctcctccggtgggaatgttgagttgctggtggccacgccgctggaaaacttaactgatagctccagacatcagctttccgcgttggcggcgatgccgggaggacgcttacaagtgaaatccattgccactgcgcaactcatgcaaggaaaggggcgctggcttgcgcaggtgactcgcgaagggcaaagccaacagtgggccgcagacgacagcgctaccgttgcacctggtgaattatggggacaaagtgcgtcctcaccagtagtgacacttaaaggaacgtccggaaaaaccttctcgggtcagaccttaagtgcagaagatttactgcccgccttacccaccggggcggtgcgcatcaacctctgcgagcaactggacgggccgctggaagggtttggttcgcgtttctggtcgttagtcacgcaacagcacgctggctggaagcaggcatttacccgccacaaagagataacgcatgttgagtacagcgatcgttatcttaatagcccattcacggcgcgtatgttaggtgaaatcttaaccgagctggttgaacagggaatggcggaacgcgccagcctcactgtttgcgtcaaaaaattggattacaactctcgccaacacaacgctctctataacgcgtggcttaatgaggaagatcgtcagcaggttgtgaccactttacttgaagaaggatatctggggcctgcgtggccgggagcaattagctggttaacgggggataaccagagtacggagcatggacgagaactgacagtcaccttcagcgatggcagtcagcattatgtcctgctcgacatggggcttagctactggcgctgtattgaagacaccttctttgattttgctctgcgagtaccgcagcaagttgaacggctggcaaacacgcgagcgcgagctgttgccccgggtaatgaccttaggagttatgttatcgctggataa

SEQ ID NO: 28821 - DNA, 3360 bp, Escherichia coli ATCC 8739
ttgcttgtgaaaactccagttaacccacttttgcaatggcttaacatgttttttagtcgccgttcattatccggagctgatggacgggcgttatatgcttaccgttgtactgatacagagtacgaaagtttggcagaactactgcgtacatatgccccccgtagttatccaagaacgatattcatttcctatagcgatgttctatttagcatatatgccgcagagtttatccgccggactcatacggtcggacaccctaaatgggacacaattttagattctattaactggaaagttccgtatgttcatcgacagaagctggttaatgatggcattcgctactggaaaagaaagataagaaacctggggcaagcttcgggttatctccatacactggcttgtgaaggtggtttacctatccgcatgattgaaaatgagagcggttatttgattacctatttcagaaggatatatcaggcgcttcgtgggcaatcatctcaatatcctgccgctaaaattgcacaagaattaggcgatacgattcctgtcacaatgcaaaacgaactggtctatgaaatagccggtgaattctgcgagactctctgccgattacttagtgagcatcctcctcatagcagtgatcccgtttctgcattacgtaagctctctccagactggcatcttcaacttccactcgttctccccgaagcgaatgctgcagagattgtaaggcgattactttctcaatcttctgaaatacgcagtgcaagtagtcttcaggttgaaagaatctgggtcgatgttgatgacagttggtattgcgatgcccggttccgattcccggccacaatgcgtacagaacagttaacctctttgtttgaatgccatattcagccggagcagacccgactcatcatttcaggaaaatggaaaaatggcggggcaaggttggcaatgctaagccgttatgagcagcaagattggcgggtcgagttattacctattgcgatgcaaaaactctctggtgcagatgcaatggccgaaatctcattgtcgcttcatgaaggtccaattctgttaggtcacacaattccaaaaggcggttatgaacttactgaagaacttccctgggtttttgaagcgatgaatgagagtgaatcgcagctaaaacttgttggtatggggtctgtgagttccaggctaaatgctctgtttatttcgctaccgaaaaatagccatttagatattagtggagaaggtgagtttgatatcccaaggttgctaaaaaacagtgaacgcagcttaactaaaataagtggagtatttagcgttgttttacatgatggtgctgtttgtacaattcgcacccagcaactttatgattctgcgattgaatattatattaaatcgacagaagttgaactggttaaatcggattatcctgtccatcgagcctggccgaagatcggttggaaaaaggatctgcaatatggcattgtaccggagaaagaacttttttggcgttccattcgttcaggtaataatgcctggtattctgtcgcatcagaaatgccaaaaggacagatagaagtccggcgaatagttaatgatgaggttttatttagcggtaaagttgtagttttaccagcagacttcgatattaatattatacctgagagtgctcagcaaggcattattatgctttctggtataacggatactagaattgataaatattcaaacaatgaaaaagtaacacttaagtccgattattcacaaaacgagtgtgctatttattataattcatcgctgatgctggaaaataccgttgatttacgggtctcctggaaagatggttctaatcttaaactattattacctaagccggttagcggtggccgatttgtaactaatgatggttctgttcattttgatggtgtggcatctatagcacatttgcatggaatagatgctgagttattaaccatatcatgtgctggaagaggatatcttaatatcgagttattggatgaaaatccagtagctgaaaaattccgttatttacatgccgaccttcctcttttatcaggacgcaatgacaaattacaacaaatttcactttatgagaactataatttgctaaatgctatgctggcatgtgcatggaacagcaatagtacattatgtgttgatttttactctgacagatttggaaaggataaagcaacactcaatattaaacgctacgatggtagttttattgaacacgatcaagggttactggttgatataaaaaattctgttgtttttcctgcaaatagaatagacgaactggttgttgatgctatttctcttaagaatcctggcttacacatatcattgttaaaaaaagatgagtttgcttatgatctttcagctctgaatgttcaggatagtccatggttaattgtgggaaaacttgatggtacagctcgcattgcaccagtaattaaatggatgctacctgtattgcagacaaatgatttattactaaatgctctatgcgaagcagacccagaacagcgcaaaaaaaattttaatgagctaatttttgaaatagataacaacccattgcaaaattattgctgtttattaacagagtatattaagaaatacaaaatgaataatggcttatccttgctggatctggacttgttcagatgtatttcgagtaattaccgcgtggttgttcaattgttaatatcatcatgtctttctggtgatagcgatacgatttatgatatacaggaagaattacccttttcatggggatggattcccgtttcaatctggaaagatgttttccaaaaatgttggacttatctggagaaacagattaacgataaaacattagcattacatatattgcaaccctttattgcttttatgaaccatcgtgcacatatcgatcgtcggctggctccgattgcgaatatgttacttacatatagtgagagcctaccaaccggttgtgatgtattgccaactgttagtcgtgagcagtttaatgaagctaaacagatgctattaaggaaccccgacagctttgggcgtatcagtatcttccctaaagaactttggtctagtgctattactccagagttaaaatctgtttttaataagctttggattaaaaataaatatcactcacggcttgaaaaacgttttaatttgatgttagtcgcagcgctgttaacccaaaaagataataacctgatacatcaactgtctgcgctttttgaatttcactatcagcaagccccgcagcaattaggggtaatctatcaatattattttgaacaagcaggagtatgtcattga

SEQ ID NO: 28822 - DNA, 6315 bp, Escherichia coli ATCC BAA-2192; identical to SEQ ID NO: 28464

SEQ ID NO: 28823 - DNA, 864 bp, Escherichia coli ATCC BAA-2192
atgctacctgtattgcagacaaatgatttattactaaatgctctatgcgaagcagacccagaacagcgcaaaaaaaattttaatgagctaatttttgaaatagataacaacccattgcaaaattattgctgtttattaacagagtatattaagaaatacaaaatgaataatggcttatccttgctggatctggacttgttcagaggtatttcgagtaattaccgcgtggttgttcaattgttaatatcatcatgtctttctggtgatagcgatacgatttatgatatacaggaagaattacccttttcatggggatggattcccgtttcaatctggaaagatgttttccaaaaatgttggacttatctggagaaacagattaacgataaaacattagcattacatatattgcaaccctttattgcttttatgaaccatcgtgcacatatcgatcgtcggctggctccgattgcgaatatgttacttacatatagtgagagcctaccaaccggttgtgatgtattgccaactgttagtcgtgagcagtttaatgaagctaaacagatgctattaaggaaccccgacagctttgggcgtatcagtatcttccctaaagaactttggtctagtgctattactccagagttaaaatctgtttttaataagctttggattgaagataaatatcactcacggcttgaaaaacgttttaatttgatgttagtcgcagcgctgttaacccaaaaagataataacctgatacatcaactgtctgcgctttttgaatttcactatcagcaagccccacagcaattaggggtaatctatcaatattattttgaacaagcaggagtatgtcattga

SEQ ID NO: 28824 - DNA, 6315 bp, Escherichia coli B102; identical to SEQ ID NO: 28464

SEQ ID NO: 28825 - DNA, 2937 bp, Escherichia coli B102; identical to SEQ ID NO: 28445

SEQ ID NO: 28826 - DNA, 6315 bp, Escherichia coli B103; identical to SEQ ID NO: 28464

SEQ ID NO: 28827 - DNA, 2937 bp, Escherichia coli B103; identical to SEQ ID NO: 28445

SEQ ID NO: 28828 - DNA, 6315 bp, Escherichia coli B104; identical to SEQ ID NO: 28464

SEQ ID NO: 28829 - DNA, 2937 bp, Escherichia coli B104; identical to SEQ ID NO: 28445

SEQ ID NO: 28830 - DNA, 6315 bp, Escherichia coli B105; identical to SEQ ID NO: 28464

SEQ ID NO: 28831 - DNA, 2937 bp, Escherichia coli B105; identical to SEQ ID NO: 28445

SEQ ID NO: 28832 - DNA, 6315 bp, Escherichia coli B106; identical to SEQ ID NO: 28464

SEQ ID NO: 28833 - DNA, 2937 bp, Escherichia coli B106; identical to SEQ ID NO: 28445

SEQ ID NO: 28834 - DNA, 6315 bp, Escherichia coli B107; identical to SEQ ID NO: 28464

SEQ ID NO: 28835 - DNA, 2937 bp, Escherichia coli B107; identical to SEQ ID NO: 28445

SEQ ID NO: 28836 - DNA, 6315 bp, Escherichia coli B108; identical to SEQ ID NO: 28464

SEQ ID NO: 28837 - DNA, 2937 bp, Escherichia coli B108; identical to SEQ ID NO: 28445

SEQ ID NO: 28838 - DNA, 6315 bp, Escherichia coli B109; identical to SEQ ID NO: 28464

SEQ ID NO: 28839 - DNA, 2937 bp, Escherichia coli B109; identical to SEQ ID NO: 28445

SEQ ID NO: 28840 - DNA, 6315 bp, Escherichia coli B112; identical to SEQ ID NO: 28540

SEQ ID NO: 28841 - DNA, 2937 bp, Escherichia coli B112; identical to SEQ ID NO: 28445

SEQ ID NO: 28842 - DNA, 6315 bp, Escherichia coli B113; identical to SEQ ID NO: 28540

SEQ ID NO: 28843 - DNA, 3360 bp, Escherichia coli B113; identical to SEQ ID NO: 28813

SEQ ID NO: 28844 - DNA, 6315 bp, Escherichia coli B114; identical to SEQ ID NO: 28540

SEQ ID NO: 28845 - DNA, 2937 bp, Escherichia coli B114; identical to SEQ ID NO: 28445

SEQ ID NO: 28846 - DNA, 6315 bp, Escherichia coli B15; identical to SEQ ID NO: 28464

SEQ ID NO: 28847 - DNA, 2937 bp, Escherichia coli B15; identical to SEQ ID NO: 28445

SEQ ID NO: 28848 - DNA, 6315 bp, Escherichia coli B17; identical to SEQ ID NO: 28464

SEQ ID NO: 28849 - DNA, 2937 bp, Escherichia coli B17; identical to SEQ ID NO: 28445

SEQ ID NO: 28850 - DNA, 6315 bp, Escherichia coli B26-1; identical to SEQ ID NO: 28464

SEQ ID NO: 28851 - DNA, 2937 bp, Escherichia coli B26-1; identical to SEQ ID NO: 28445

SEQ ID NO: 28852 - DNA, 6315 bp, Escherichia coli B26-2; identical to SEQ ID NO: 28464

SEQ ID NO: 28853 - DNA, 2937 bp, Escherichia coli B26-2; identical to SEQ ID NO: 28445

SEQ ID NO: 28854 - DNA, 6315 bp, Escherichia coli B28-1; identical to SEQ ID NO: 28540

SEQ ID NO: 28855 - DNA, 2937 bp, Escherichia coli B28-1; identical to SEQ ID NO: 28445

SEQ ID NO: 28856 - DNA, 6315 bp, Escherichia coli B28-2; identical to SEQ ID NO: 28540

SEQ ID NO: 28857 - DNA, 2937 bp, Escherichia coli B28-2; identical to SEQ ID NO: 28445

SEQ ID NO: 28858 - DNA, 6315 bp, Escherichia coli B29-1; identical to SEQ ID NO: 28540

SEQ ID NO: 28859 - DNA, 2937 bp, Escherichia coli B29-1; identical to SEQ ID NO: 28445

SEQ ID NO: 28860 - DNA, 6315 bp, Escherichia coli B29-2; identical to SEQ ID NO: 28540

SEQ ID NO: 28861 - DNA, 1081 bp, Escherichia coli B29-2
actggttgatataaaaaattctgttgtttttcctgcaaatagaatagacgaactggttgttgatgctatttctcttaagaatcctggcttacacatatcattgttaaaaaaagatgagtttgcttatgatctttcagctctgaatgttcaggatagtccatggttaattgtgggaaaacttgatggtacagctcgcattgcaccagtaattaaatggatgctacctgtattgcagacaaatgatttattactaaatgctctatgcgaagcagacccagaacagcgcaaaaaaaattttaatgagctaatttttgaaatagataacaacccattgcaaaattattgctgtttattaacagagtatattaagaaatacaaaatgaataatggcttatccttgctggatctggacttgttcagaggtatttcgagtaattaccgcgtggttgttcaattgttaatatcatcatgtctttctggtgatagcgatacgatttatgatatacaggaagaattacccttttcatggggatggattcccgtttcaatctggaaagatgttttccaaaaatgttggacttatctggagaaacagattaacgataaaacattagcattacatatattgcaaccctttattgcttttatgaaccatcgtgcacatatcgatcgtcggctggctccgattgcgaatatgttacttacatatagtgagagcctaccaaccggttgtgatgtattgccaactgttagtcgtgagcagtttaatgaagctaaacagatgctattaaggaaccccgacagctttgggcgtatcagtatcttccctaaagaactttggtctagtgctattactccagagttaaaatctgtttttaataagctttggattgaagataaatatcactcacggcttgaaaaacgttttaatttgatgttagtcgcagcgctgttaacccaaaaagataataacctgatacatcaactgtctgcgctttttgaatttcactatcagcaagccccacagcaattaggggtaatctatcaatattattttgaacaagcaggagtatgtcattga

SEQ ID NO: 28862 - DNA, 6315 bp, Escherichia coli B36-1; identical to SEQ ID NO: 28540

SEQ ID NO: 28863 - DNA, 2937 bp, Escherichia coli B36-1; identical to SEQ ID NO: 28445

SEQ ID NO: 28864 - DNA, 6315 bp, Escherichia coli B36-2; identical to SEQ ID NO: 28540

SEQ ID NO: 28865 - DNA, 2937 bp, Escherichia coli B36-2; identical to SEQ ID NO: 28445

SEQ ID NO: 28866 - DNA, 6315 bp, Escherichia coli B40-1; identical to SEQ ID NO: 28464

SEQ ID NO: 28867 - DNA, 2937 bp, Escherichia coli B40-1; identical to SEQ ID NO: 28445

SEQ ID NO: 28868 - DNA, 6315 bp, Escherichia coli B40-2; identical to SEQ ID NO: 28464

SEQ ID NO: 28869 - DNA, 2937 bp, Escherichia coli B40-2; identical to SEQ ID NO: 28445

SEQ ID NO: 28870 - DNA, 6315 bp, Escherichia coli B49-2; identical to SEQ ID NO: 28464

SEQ ID NO: 28871 - DNA, 2937 bp, Escherichia coli B49-2; identical to SEQ ID NO: 28445

SEQ ID NO: 28872 - DNA, 6315 bp, Escherichia coli B5-2; identical to SEQ ID NO: 28464

SEQ ID NO: 28873 - DNA, 2937 bp, Escherichia coli B5-2; identical to SEQ ID NO: 28445

SEQ ID NO: 28874 - DNA, 6315 bp, Escherichia coli B7-1; identical to SEQ ID NO: 28540

SEQ ID NO: 28875 - DNA, 2937 bp, Escherichia coli B7-1; identical to SEQ ID NO: 28445

SEQ ID NO: 28876 - DNA, 6315 bp, Escherichia coli B7-2; identical to SEQ ID NO: 28540

SEQ ID NO: 28877 - DNA, 2937 bp, Escherichia coli B7-2; identical to SEQ ID NO: 28445

SEQ ID NO: 28878 - DNA, 6315 bp, Escherichia coli B83; identical to SEQ ID NO: 28464

SEQ ID NO: 28879 - DNA, 2937 bp, Escherichia coli B83; identical to SEQ ID NO: 28445

SEQ ID NO: 28880 - DNA, 6315 bp, Escherichia coli B84; identical to SEQ ID NO: 28464

SEQ ID NO: 28881 - DNA, 2937 bp, Escherichia coli B84; identical to SEQ ID NO: 28445

SEQ ID NO: 28882 - DNA, 6315 bp, Escherichia coli B85; identical to SEQ ID NO: 28464

SEQ ID NO: 28883 - DNA, 2937 bp, Escherichia coli B85; identical to SEQ ID NO: 28445

SEQ ID NO: 28884 - DNA, 6315 bp, Escherichia coli B86; identical to SEQ ID NO: 28464

SEQ ID NO: 28885 - DNA, 2937 bp, Escherichia coli B86; identical to SEQ ID NO: 28445

SEQ ID NO: 28886 - DNA, 6315 bp, Escherichia coli B89
atggacgttcagcaactgcattatgcgccacttctaaatcagcttcatcagcgtgcggtgaggtcggtggtaagtcagttggcattgcggagcaagtcgttgactcattatctggaatcacaatattttcagcctcccggtcaggaggggtcactgcttgcagacccggtattcgaaagtacattcggctggatgcctgcggatgaaacaatggaggatttgcgggacaagctgatctccagcccgctggttgatgcattgagcaaagcgccagtgccatttcgtcatcaacttactgcgtggcgaacgattctggaagacaaaaaatccttgttagtgagcagcggtacgggatccgggaaaacagaatgctttatggtaccggttctggaagatcttattcgtcagcaaaaatcgacccgccagtcactaacagggacacaagctattttcttgtatccgttaaatgcattaattaacagccaacaggagcggcttcgcgaatggacgcgcggatttaaggggaaaatacgcttcgcgctatataatggcgaaacccggcataccaaatacgaaattcaggaagatcagttgaaagtacctgaacaagctttgagtcgggaagccatttatgaagaaccaccttccatcatggtgacgaataccaccatgctggaatatatgctgattcgtcgtaaagatgccccaatcatcgaaaagtctcaggggatgttaaagtatatcgtcctggatgaagcccatagttatattggttctcaggctgctgagttagcgctgcttttacgtcgtgttatgcaggctttcaatgttggacccggcacagataaacctgtgcagattatcgcgacctctgccactattggtgaagactctcctgaaggtaataaggagcttgctaaatttgtcgctgatctcgcgggcgttacagaacgtgatgtcaaagtggttcgcggttatcgacaaataccgcgggtatcggagtcgctgattcgtcatgaataccccacatctttaacttctcttaaatccctgagccctcaggatctttaccaacagctttgtcattaccgtgtggcccagcaattgcgtcaggcgttaactcatcccggacggcaggcagtacgtttgagtgagttgctcaatgttgccagaagaacctggccagatattaatcaccgtgagctactgcaactcctcgatctaatggcaagatcgcgagaaggtgaactggcttttacgccattacgtatgcatgggtttatcagaacactggcgggtctatgggcatgttcaaacaaacaatgctcacataaagcacatgaattaaatcagagtgactggccatttggtcaggtatggtttgagcagcgccaatattgtgactgtggagcgccggtatttgaagttttacgttgctccgggtgtggttcagcttatttgtctgccaaagaggagatgcgcggtgatggaacgaactggttggtagcgcaaccagccgctgccgaagtggatgagtttgctcttgatgtagatgtttattctgaagatgaagacaacgacgaattagacaataactctcaatttgatcgtctgattgcgagcgatggtgaaaaatatatcatttcactggaagaaacgacggcggggaaaattgatagtgaagcgcaaaagcactatgaaataaacctgttaagaccggaatctcgaggtgagggacgcaataactcctttgcttgtgtttgctgtggtgacactcaacggaaaaataatcctttattccgtccgcttcggctcggcgcgcccttttttttaaatgaaattattcctactctgctggagttttctccattaccgcaaacaagagaagagcagttaggaccgtttaatggtcgacgcttgctcacctttacggattcgcgtcagggtaccgctcgcatttcagcccgcttacagcaggatgccgataaagcgacgttgcgagctctttgttaccaggagctggcaaatattacagagccttcagcaaaactcagcccggcacactgtgcactgttagagaaagttattagccagttttctgtcctccctttaaaaaattccatcgacgcgctgaaaaaagcgatggctgcgaatgaggagcttagcccgacggacattcaggcacttaaaattattgagccgatggtgagttccttaagcacggagcatgctgaagcgatgcaaatacttcaggctaactctggcaatcagcagaagaaaaccatgtcatggcaaacgctgtctgaacagctggttggcagtgtggaccttgccgatagaatgagaggcagttttaaagaattgtctgggcttgatcttactaaacaacagtttgcagatttttgtttatacagcgagtttggtcgccgccctaaaaatgcctggaccctcgaaagtctgggtctggtagccattcactatccattcattgataaagttacaacctgcccgcaggactggaagacattattacccgatcccgataagcaattagcggaatggcgtaatttattgaagattactcttgatttctttatccgtgaaaacagtgccgttttttacgaaaacgagcaataccctcgctggatgggggcacgtttcccggtaaaaatgctccaggggccagataaaaaaaacaaagggcagaaacgtgatcaactttggccacaaatacgcgatcgccattataaccgggtcattaagctattaatcgcagtctttccggcaatacaacctgagcaggctcactggaaatcgttagttaaccacttaatgattgaggtctgggatgcaattcgaccctgcttacgtcagtttgagtcgggttatcagctggatattaaacaacaagctgaattttacagtccaaagcaagtgtggcgttgcccctatactcgacgtgcgttagacgtcacgttgctgggatactctccgtatttgccgggtagcaaagaaattgcacctgaaaaagcagtgttgattgaaatgcctgagcttcctgtacgtcactggcgtttgtctggtggtggagaaatcgcccgagaagaacgtctggagtggctggaaagtaatgcgctgattcaacatgcccgcgaggaaggattatggtctactcgcagcgaccgactggccctgaaagatagctggtatcgtctggaggaacactctgcgcagagaacgcctgagcagaaccagtttaatgaaaaacaatttaagtcaggcaaagttaatgtgctgaactgttccacgaccatggagatgggggtggatattggtggtatgagtttggtggcaatgaacaacgttcctccagcgccggcaaattatttgcaacgtgcaggtcgcgcggggcgtcgtggagagagtgcatctgctgccattacgttatgtaaaaacacggcgcatggaatggaggtattcaaagaccccctctgggcgttcaacactactgccagtgcgccacgggttcgttttgggagcagtagtattgttcaacgacatgttaatgccctggttttaggtctgtttttacgagccgaagttcctgatgcgacaaaactgagttgcaaatggttctttgaaggtgatgagagccagtgtcttcgttttctccattggttaaatcaccaggccgatcagctggcggataaacttaaacgccttactcagggaaccgtactgatgtcattgacggcaacccagctcttgacccgcacacaagcaatgatgcagcaggttgatatccgctggagaagccaacttgcgatactgttggaaaatatcgaagcgttgaaggcggataacagcgcgtgggaagaaacaccagcaggtaaagccatcgcttatcagcttcgtgattatcgcggtgcatatctgttttctaaactcattagtgaagcgttcctgccggggcatggtttcccggttggcgtagtcaatttcaattatctgacggcagatgagctggaaaaacgtcgcgcaataaaagccactcaggctgaccctaatgaagggggagaaagcttttctcgtcgtattgaaaaattgcccagccgtgatttgcctacagcattacgcgagtatgcgcctggtgcagatgtggtattgggcggaaaagtatatcgttcctcgggcattatgcttggcaaggtgcttgccagcgggcaggagctgtcaggcgatcatcatattccgtggttctggcattgccgtaaatgtggtgcgggggcaaccagtactacccatcctgtcgaatgtagtcactgcaaagcggatatacagcaacttgatgtgaagcgttatttacagcctgttggttttgcgacagatattcgttatcaggcacataatgatgtatccatgcctgcacaacttccctggaaagatccacgtgttcttgtaccgtcttcggtgtgggtttctttacccgatgctgggctaggacgttaccgttttagccatagtggggaattgttccacttcagtgaaggggaatttgggcacggctacgcaatttgcctctcatgtggtcgggcagaatctcaaactcaaccccagcgtacccctgaaaatctaaagaacccagagagggaaaatacgcattacctgttgcgagggggcagtaacgatcgtcaggggagcaataaattgtgccacggtcatgtgcataaagatctgtggttgggatatagcagtcgtacagatatggttgagctgcaactcaatgatgataatggcctgttgatccgtgatgaggttgccgcgcgttcccttgcggtcgctttgcgtgaagggttagcgcataaattgggtatcgaaaatactgagctgggcgtgacgacgcagcaagcgcgcgatatcaatggctataccggatattccatcttcatttacgacaataatgcgggtggtgcaggttatgcagtgcaattgatcgaccattgggctgatgtctttaattacgccagaaaattgctcgattgcagttgcgataaattctgtcaccactgcttgctcagctacgacagtcagcattatgtcaacagattagatcgtcaccatgcattaaccctgcttaccaatgtacggttgcagcgacttaacctcgcgccagaatatcagtacttcggcgatggtagccgggttgaaactaaccctctgagtttacgtattgcgcaatgcctgaacagcgagatttatgactcctgctcgctggttcttgcggggccgcaggaacagtgggactttgcccaatggccattatttaaagagttgctccagtttgcctcctccggtgggaatgttgagttgctggtggccacgccgctggcaaacttaactgatagctccagacatcagctttccgcgttggcggcgatgccgggaggtcgcttacaagtgaaatccattgccactgcgcagctcatgcaaggaaaggggcgctggcttgcgcaggtgactcgcgaagggcaaagccaacagtgggccgcagacgacagcgctaccgttgcacctggtgaattatggggacaaagtgcgtcttcaccagtagtgacacttaaaggaacgtccggaaaaaccttctcgggtcagaccttaagtgcagaagatttactgcccgccttacccaccggggcggtgcgcatcaatctctgtgaacaactggacgggccgctggaaggttttggttcgcgtttctggtcgttagtcacgcaacagcacgctggctggaagcaggcatttacccgccacaaagagataacgcatgttgagtacagcgatcgttatcttaatagcccattcacggcgcgtttgttaggtgaaatcttaaccgagctggttgaacagggaatggcggaacgcgccagcctcactgtttgcgtcaaaaaattggattacaactctcgccaacacgacgctctctataacgcgtggcttaatgaggaagatcgtcagcaggttgtgaccactttacttgaagaaggatatctggggcctgcgtggccgggagcaattagctggttaacgggggataaccagagtacggagcatggacgagaactgacagtcaccttcagcgatggcagtcagcattatgtcctgctcgacatggggcttagctactggcgctgtattgaagataccttctttgattttgccctgcgagtaccgcagcaagttgaacggctggcaaacacgcgagcgcgagctgttgccccgggtaatgaccttaggagttatattatcgctggataa

SEQ ID NO: 28887 - DNA, 2937 bp, Escherichia coli B89; identical to SEQ ID NO: 28445

SEQ ID NO: 28888 - DNA, 6315 bp, Escherichia coli B90; identical to SEQ ID NO: 28886

SEQ ID NO: 28889 - DNA, 2937 bp, Escherichia coli B90; identical to SEQ ID NO: 28445

SEQ ID NO: 28890 - DNA, 6315 bp, Escherichia coli B93; identical to SEQ ID NO: 28540

SEQ ID NO: 28891 - DNA, 2937 bp, Escherichia coli B93; identical to SEQ ID NO: 28445

SEQ ID NO: 28892 - DNA, 6315 bp, Escherichia coli B94; identical to SEQ ID NO: 28540

SEQ ID NO: 28893 - DNA, 2937 bp, Escherichia coli B94; identical to SEQ ID NO: 28445

SEQ ID NO: 28894 - DNA, 6315 bp, Escherichia coli B95; identical to SEQ ID NO: 28636

SEQ ID NO: 28895 - DNA, 2937 bp, Escherichia coli B95
atgattgaaaatgagagcggttatttgattacctatttcagaaggatatatcaggcgcttcgtgggcaatcatctcaatatcctgccgctaaaattgcacaagaattaggcgatacgattcctgtcacaatgcaaaacgaactggtctatgaaatagccggtgaattctgcgagactctctgccgattacttagtgagcatcctcctcatagcagtgatcccgtttctgcattacgtaagctctctccagactggcatcttcaacttccactcgttctccccgaagcgaatgctgcagagattgtaaggcgattactttctcaatcttctgaaatacgcagtgcaagtagtcttcaggttgaaagaatctgggtcgatgttgatgacagttggtattgcgatgcccggttccgattcccggccacaatgcgtacagaacagttaacctctttgtttgaatgccatattcagccggagcagacccgactcatcatttcaggaaaatggaaaaatggcggggcaaggttggcaatgctaagccgttatgagcagcaagattggcgggttgagttattacctattgcgatgcaaaaactctctggtgcagatgcaatggccgaaatctcattgtcgcttcatgaaggtccaattctgttaggtcacacaattccaaaaggcggttatgaacttactgaagaacttccctgggtttttgaagcgatgaatgagagtgaatcgcagctaaaacttgttggtatggggtctgtgagttccaggctaaatgctctgtttatttcgctaccgaaaaatagccatttagatattagtggagaaggtgagtttgatatcccaaggttgctgaaaaacagtgaacgcagcttaactaaaataagtggagtatttagcgttgttttacatgatggtgctgtttgtacaattcgcacccagcaactttatgattctgcgattgaatattatattaaatcgacagaagttgaactggttaaatcggattatcctgtccatcgagcctggccgaagatcggttggaaaaaggatctgcaatatggcattgtaccggagaaagaacttttttggcgttccattcgttcaggtaataatgcctggtattctgtcgcatcagaaatgccaaaaggacagatagaagtccggcgaatagttaatgatgaggttttatttagcggtaaagttgtagttttaccagcagacttcgatattaatattatacctgagagtgctcagcaaggcattattatgctttctggtataacggatactagaattgataaatattcaaacaatgaaaaagtaacacttaagtccgattattcacaaaacgagtgtgctatttattataattcatcgctgatgctggaaaataccgttgatttacgggtctcctggaaagatggttctaatcttaaactattattacctaagccggttagcggtggccgatttgtaactaatgatggttctgttcattttgatggtgtggcatctatagcacatttgcatggaatagatgctgagttattaaccatatcatgtgctggaagaggatatcttaatatcgagttattggatgaaaatccagtagctgaaaaattccgctatttacatgccgaccttcctcttttatcaggacgcaatgacaaattacaacaaatttcactttatgagaactataatttgctaaatgctatgctggcatgtgcatggaacagcaatagtacattatgtgttgatttttactctgacagatttggaaaggataaagcaacactcaatattaaacgctacgatggtagttttattgaacacgatcaagggttactggttgatataaaaaattctgttgtttttcctgcaaatagaatagacgaactggttgttgatgctatttctcttaagaatcctggcttacacatatcattgttaaaaaaagatgagtttgcttatgatctttcagctctgaatgttcaggatagtccatggttaattgtgggaaaacttgatggtacagctcgcattgcaccagtaattaaatggatgctacctgtattgcagacaaatgatttattactaaatgctctatgcgaagcagacccagaacagcgcaaaaaaaattttaatgagctaatttttgaaatagataacaacccattgcaaaattattgctgtttattaacagagtatattaagaaatacaaaatgaataatggcttatccttgctggatctggacttgttcagaggtatttcgagtaattaccgcgtggttgttcaattgttaatatcatcatgtctttctggtgatagcgatacgatttatgatatacaggaagaattacccttttcatggggatggattcccgtttcaatctggaaagatgttttccaaaaatgttggacttatctggagaaacagattaacgataaaacattagcattacatatattgcaaccctttattgcttttatgaaccatcgtgcacatatcgatcgtcggctggctccgattgcgaatatgttacttacatatagtgagagcctaccaaccggttgtgatgtattgccaactgttagtcgtgagcagtttaatgaagctaaacagatgctattaaggaaccccgacagctttgggcgtatcagtatcttccctaaagaactttggtctagtgctattactccagagttaaaatctgtttttaataagctttggattgaagataaatatcactcacggcttgaaaaacgttttaatttgatgttagtcgcagcgctgttaacccaaaaagataataacctgatacatcaactgtctgcgctttttgaatttcactatcagcaagccccacagcaattaggggtaatctatcaatattattttgaacaagcaggagtatgtcattga

SEQ ID NO: 28896 - DNA, 6345 bp, Escherichia coli BIDMC 15; identical to SEQ ID NO: 28560

SEQ ID NO: 28897 - DNA, 3291 bp, Escherichia coli BIDMC 15
ttgggtcaatcagaatacatttcatgggtaaaatgtacttcctggctaagtaactttgtgaatcttagagggttgagacaaccggatggccgtcctctttatgaatatcatgcaaccaatgatgaatatacccaattaacgcagctactccgtgcagtcggtcaatcacaatctaatatatgtaatagggactttgctgcctgttttgttcttttttgctctgagtggtaccgcagggattatgaacggcaatgcggatggacgtgggaccctatatataaaaaaatagggatttcattcaccgccacagagcttggtactatcgtaccgaaagggatggaagattactggctgcgcccaattcgattttatgaatctgaacgacgcaattttctcggaacattattcagtgaaggtggtttacctttccggctactcaaagaatcagacagtcgctttctggctgttttctccaggatccttggacaatatgagcaagcaaagcagtcaggtttttctgccctttcgctggcaagagctgtcatagaaaaatcagcgctgccaactgtttttagcgaagatacctctgtagaacttatcagtcatatggctgataacctcaattccttagtacttactcacaacctaataaatcacaaagaaccagtacaacagcttgagaaggttcaccctacctggcgaagcgagtttccaataccgttagatgatgaaacaggaacgcattttttgaatggactgctatgcgcagcctctgtagaggctaagcctcgactacaaaaaaataagagtacgcgttgccaattctattggtcagaaaagcatccagatgagcttagggtgatagtatctcttccggacgaagtttcctttcctgtaacaagcgagccgtcaactacgcgctttgaacttgccatttgtgaagatggtgaggaagtctctggccttgggccagcctatgcttctctggaaaacagacaggcaacagttcgattacgtaaaagcgaagtgagatttggcaggcaaaatccatcggcaggtttgtcgttagtggctcgtgctggagggatgattgttgggagcattaaacttgatgacagtgaaattgccattggtgaggtgccgttaaccttcatcgttgatgcagatcaatggctgttacagggacaggcttcttgcagtgtgcgaagcagcgatgttctgattgtgctccctcgggataatagcaatgttgctggttttgatggccaatcgagggcagtaaacgtattaggactaaaagcactacctgtgaagggatgtcaggacgttacagttacagcaaatgaaacttatcggattcgcaccggaagagaacaaatcagcatcggaaggtttgctctaaatggaaagcgtgcaagctgggtttgtcatccagatgaaacatttattggtgtaccaaaagtcatttctacactaccggatattcaaagcattgatgtaacgcgttacctgagcggaatttcaattgagcaatgtcatatacaagagatgctgggggctcaatatctttctatccgtaatagtaagaatgaaacgctcttgcgtcgcaaaatcggtattttgcctgctgatttcagtattgagataaaaggtggaatacacgcaaatgaaggcactatcgtaatcaccacacagcatccttgtgtagcaaaacttaaagataaaacattggaggctacacgtaagcgtactgaggggcgaacagagatacaactcaaagcggaaggggtacctccggcatttattacattacaagttctgcctaatttggcggctgaccccatcgatattgagttaccttttcccgctaaaggctgtctcgctcttgatgtaaacggacgtcctctggataaaaacattacgctgcatgatctgctgggttccagagcgtttctgttctccagaaatggcgagccgacaagatatacattgcagttgcatttgcgctccgttagtggattacaggcatggcacgaatggtgttatacggcgttgagcgatcgtcctgttgaattgaatctctatagtctgcgcgaacatattgagaacctgatttcacttgaggcaggtattgaccaggttgttgagatgcgtattacgggggcgggtgtggtcatggcctggcaaattcgtcgctataaatacagtctgcgctatgattatgaaaaagaactattactcagccagtcagtgaaccatcgtgctggacagattccttcccccgttatcatgctgttaagtgaacccgagaggaaatccatccccttagcatcaagaatgagcgagggagtgcctgtcggtgaatatgagttgagctcaatcgttaacaaaaatggaccgtggttggttgtccctaaaccgggtgaagagatggcttttcgtccctgcttcattcgtggcgaatcttcgttaccggtagaagaaagcaacatccgctcattgcagaaagcgccccagctttttaatccacaggcagaagttaataccatcacactggttctcggacagatggctaacgatcctgcccattccggctggcaatttatgcgtagcctgtacgatcaatttggttatttaccactggcaacctttgaagtatggcgtgcactggtgcagcatccgcaggcattggcaatgtcgctcttcaaatttgaaatgtcagcagagtacctgagtcgtattgagaatgagttccctattctatgggagtttttccccatctttgagatcaaagcggcatctgagcgtttcaaattgttcctgagccaaaaaggtgcaccggaggaaacccagaaattactggttactaatatgtttcaacggctggggctcgtgttcccgacatatgccgatgaaattgagaaatggttaagtaacggacatctccccccgtctattcctgagtcttttgtccacgtgtggtatcaggagcttttacgtgagcatagtgaagctcaatggccagagtacggcagcaagcggctgcatagctggatggcatcacaaaaaaatccagtgattggtattaatcctgacgcaaatcaccgctattccgtggccttgttacccgtcttcgctgcagctgtggcaagcggaaatgcttcttttgaatctgtatttgaccgtaaacccggtgccgtatttttcctgaggcaagtcagggatttcgattcccgctggtttaaggccatcttccagtgcagcctgttgcgttatgttgctaaaaaataa

SEQ ID NO: 28898 - DNA, 6345 bp, Escherichia coli BIDMC 17A; identical to SEQ ID NO: 28560

SEQ ID NO: 28899 - DNA, 3291 bp, Escherichia coli BIDMC 17A; identical to SEQ ID NO: 28897

SEQ ID NO: 28900 - DNA, 6345 bp, Escherichia coli BIDMC 17B; identical to SEQ ID NO: 28560

SEQ ID NO: 28901 - DNA, 3291 bp, Escherichia coli BIDMC 17B; identical to SEQ ID NO: 28897

SEQ ID NO: 28902 - DNA, 6345 bp, Escherichia coli BIDMC 19A; identical to SEQ ID NO: 28560

SEQ ID NO: 28903 - DNA, 3291 bp, Escherichia coli BIDMC 19A; identical to SEQ ID NO: 28897

SEQ ID NO: 28904 - DNA, 6345 bp, Escherichia coli BIDMC 19B; identical to SEQ ID NO: 28560

SEQ ID NO: 28905 - DNA, 3291 bp, Escherichia coli BIDMC 19B; identical to SEQ ID NO: 28897

SEQ ID NO: 28906 - DNA, 6345 bp, Escherichia coli BIDMC 19C; identical to SEQ ID NO: 28560

SEQ ID NO: 28907 - DNA, 3291 bp, Escherichia coli BIDMC 19C; identical to SEQ ID NO: 28897

SEQ ID NO: 28908 - DNA, 6345 bp, Escherichia coli BIDMC 2B; identical to SEQ ID NO: 28560

SEQ ID NO: 28909 - DNA, 3291 bp, Escherichia coli BIDMC 2B; identical to SEQ ID NO: 28897

SEQ ID NO: 28910 - DNA, 6345 bp, Escherichia coli BIDMC 3; identical to SEQ ID NO: 28560

SEQ ID NO: 28911 - DNA, 3291 bp, Escherichia coli BIDMC 3; identical to SEQ ID NO: 28897

SEQ ID NO: 28912 - DNA, 6315 bp, Escherichia coli BIDMC 39
atggacgttcagcaactgcattatgcgccacttctaaatcagcttcatcagcgcgcggtgaggtcggtggtaagtcagttggcattgcggagcaagtcgttgactcattatctggaatcacaatatttccagcctcccggtcaggaggggtcactgcttgcagacccggtattcgaaagcacgttcggctggatgcctgcggatgaaacaatggaggatttgcgggacaagctaatttccagcccgctggttgatgcattgagcaaagcgccggtgccatttcgtcatcaacttacggcgtggcgaacgattctggaagacaaaaaatccttgttagtgagcagcggtacgggatccgggaaaacagaatgctttatggtaccggttctggaagatcttattcgtcagcaaaaatcgacccgtcagtcactaacagggacacaagctattttcttgtatccgttaaatgcattaattaacagccaacaggagcggcttcgcgaatggacgcgcggatttaaggggaaaatacgcttcgcgctatataatggcgaaacccggcataccaaatacgaagttcaggaagatcagttgaaagtacctgaacaagctttgagtcgggaagccatttacgaagcaccaccttccatcatggtgacgaataccaccatgctggaatatatgctgattcgtcgtaaagatgccccaatcatcgaaaagtctcaggggatgttaaagtatatcgtcctggatgaagcccatagttatattggttctcaggctgctgagttagcgctgcttttacgtcgtgttatgcaggctttcaatgttggacctggcacagataaacctgtgcagattatcgcgacctctgccactattggtgaagactctcctgaaggtaataaggagcttgctaaatttgtcgctgatcttgcgggcgttacagaacgtgatgtcaaagtggttcgcggctatcgacaaataccgcgggtatcggagtcgctgattcgtcatgaatatcccacatctttaacttctcttaaatctttgagccctcaggatctttaccaacagctttgtcattaccgtgtggcccagcaattgcgtcaggcgttaactcatcccggacggcaggcagtacgtttgagtgagttgctcaatgttgccagaagaacctggccagatattaatcaccgtgagttactgcaactcctcgacctaatggcgagatcgcgagaaggtgaactggcttttacgccattacgtatgcatgggtttatcagaacactggcgggtctatgggcatgttcaaacaaacaatgctcacataaagcgcatgaattaaatcagagtgactggccatttggtcaggtatggtttgagcagcgccaatattgtgactgtggtgcgccggtatttgaagttttacgttgctccgggtgtggttcagcttatttgtctgccaaagaggaggtgcgcggtgatggaacgaactggttggtagcgcaacccgctgctgccgaagtggatgaatttgctcttgatgtggatgtttattctgaagatgaagacaacgatgaattagacaataactctcaatttgatcgtctgattgcgatcgatggtgaaaaatatatcatttcactggaagaaacgacggcggggaaaattgatagtgaagcgcaaaagcactatgaaataaacctgttaagaccggagtctcgaggtgagggacgtaataattcctttgcttgtgtttgctgtggtgacacccaacgaaaaaataatcctttattccgtccgcttcgacttggcgcgcccttttttttaaatgaaattattcctactctgctggagttttcaccattaccgcagacaagagaagagcagttaggaccgtttaatggtcgacgtctgctcacctttacggattcacgtcagggcactgcccgcatttctgcccgcttacagcaggatgccgataaagcgacgttgcgagctctttgttaccaggagttggcaaatattaatgagccatcagcaaagctcagcccggcacactgcgcattgttagagagttttattacccagttttctatccttcctttaaaaaactctattgacgcgctgaaaaaagcgatggttgctaatgaagagcttagcccggcggacattcaggcacttaaaattatcgagccgatggtgagttccttaagcccggatcatgctgaagcgatgcaaatactccaggctaactctggcaatcagcagaagaaaaccatgtcatggcaaacactgtctgaacagctggttggcagtgtggaccttgccgatagaatgagaggcagttttaaagaattgtctgggcttgatcttactaaacaacagtttgcagatttttgtttatacagtgagtttggtcgccgccctaaaaatgcctggaccctcgaaagtctgggtctggtagccattcactatccatttattgataaagttacaacctgcccgcaggactggaagacattattacccgatcccgataagcaattagcggaatggcgtaatttattgaagattactcttgatttctttatacgtgaaaacagtgccgttttttacgaaaacgagcaataccctcgctggatgggggctcgtttcccggtaaaaatgctccagggtccagataaaaaaaacaaagggcagaaacgtgatcaactttggccacaaatacgcgatcgccattataaccgggtcattaagctattaattgcagtctttccggcaatacaacctgagcaggctcactggaaatcgttagttaaccacttaatgattgaggtctgggatgcaattcgaccctgcttacgtcagtttgagtcgggttatcagctggatattaaacaacaagctgaattttacagtccaaagcaagtgtggcgttgcccctatactcgacgtgcgttagacgtcacgttactgggatactctccgtatttaccgggtagcaaagaaattgcacctgaaaaagctgtgttgattgaaatgcctgagcttcctgtacgtcactggcgtttgtctggtggtggagaaatcgcccgagaagaacgtctggagtggctggaaagtaatgcgctgattcaacatgcccgcgaggaaggattatggtctactcgcagcgaccgactggccctgaaagatagctggtatcgtctggaggaacactctgcgcagagaacgcctgagcagaaccagtttaatgaaaaacaatttaagtcaggcaaagttaatgtgctgaactgctccacgaccatggagatgggggtggatattggtggtatgagtttggtggcaatgaacaacgttcctccagctccggcaaattatttgcaacgtgcaggtcgcgcggggcgtcgtggagagagtgcatctgctgccattacgttatgtaaaaacacggcgcatggaatggaggtattcaaagaccccctctgggcgttcaacactactgccagtgcgccacgggttcgttttgggagcagtagtattgttcaacgacatgttaatgccctggttttaggtctgtttttacgagctgaagttcctgatgcgacaaaactgagttgcaaatggttctttgaaggtgatgagagccagtgtcttcgttttctccattggttaaatcaccaggccgatcagctggcggataaacttaaacgccttactcagggaaccgtcctgatgtcattgacggcaacccagctcttgacccgcacacaagcaatgatgcagcaggttgatatccgctggagaagccaacttgcgatactgttggaaaatatcgaagcgttgaaagcggataacagcgcgtgggaagaaacgccagcaggtaaagccatcgcttatcagcttcgtgattatcgcggtgcatatctgttttctaaactcattagtgaagcgttcctgccggggcatggtttcccggttggcgtcgtcaatttcaattatctgacggcagatgagctggaaaaacgtcgcgcaataaaagctactcaggctgaccctaatgaagggggagaaagcttttctcgtcgtattgaaaaattgcccagccgtgatttgcctacagcattacgcgagtatgctccaggtgcagatgtggtattgggcggaaaagtatatcgttcctcgggcattatgcttggcaaggtacttgccagcgggcaggagctgtcaggcgatcatcatattccgtggttctggcattgtcgtaaatgtggtgcgggggcaaccagtactacccgtcctgtcgaatgtagtcactgcaaagcggatatacagcaacttgatgtgaagcgttatttacagcctgttggttttgcgacagatatccgttatcaggcgcataatgatgtatccatgcctgcacaacttccctggaaagatccacgtgttcttgtaccgtcttcggtgtgggtttctttacccgatgctgggctaggacgttaccgttttagccatagtggggaattgttccacttcagtgaaggggaatttgggcacggctacgcaatttgcctctcatgtggtcgggcagaatctcaaaatcaaccccagcgtacccctgaaaatcttaagaacccagagagggaaaatacgcattacctgttgcgagggggcagtaacgatcgtcaggggagcaataaattgtgccacggtcatgtgcataaagatctgtggttggggtatagcagtcgtacagatatggttgagctgcaactcaatgatgataatggcctgttgatccgtgatgaggttgccgcgcgatcccttgcggtcgctttgcgtgaagggttagcgcataaattgggtatcgaaaatactgagctgggcgtgacgacgcagcaagcgcgcgatatcaatggctataccggatattccatcttcatttacgacaataatgcgggtggtgcaggttatgcagtgcaattgatcgaccattgggctgatgtctttaattacgccagaaaattgctcgattgcagttgcgataaattctgtcaccactgcttgctcagctacgacagtcagcattatgtcaacagattagatcgtcaccatgcattaaccctgcttaccaatgtacggttgcagcgacttaacctcgcgccagaatatcagtacttcggcgatggtagccgggttgaaactaacccgctgagtttacgtattgcgcaatgcctgaacagcgagatttatgactcctgctcgctggttcttgcggggccgcaggaacagtgggattttgcccaatggccattatttaaagagttgctccagtttgcctcctccggtgggcatgttgagttgctggtggccacgccgttggcaaacttaactgatagctccagacatcagctttccgcgttggcggcgatgccgggagggcgcttacaagtgaaatccgttgccactgcgcaactcatgcaaggaaaggggcgctggcttgcgcaggtgactcgcgaagggcaaagccaacagtgggccgcagacgacagcgctaccgttgcacctggtgaattatggggacaaagtgcgtcctcaccagtagtgacacttaaaggaacgtccggaaaaaccttctcgggtcagaccttaagtgcagaagatttactgcccgccttacccaccggggcggtgcgcatcaacctctgcgagcaactggacgggccgctggaagggtttggttcgcgtttctggtcgttagtcacgcaacagcacgctggctggaagcaggcatttacccgccacaaagagataacgcatgttgagtacagcgatcgttatcttaatagcccattcacggcgcgtttgttaggtgaaatcttaactgagctggttgaacagggaatggcggaacgtgccagcctcactgtttgcgtcaaaaaattggattacaattctcgccaacacgacgctctctataacgcgtggcttaatgaggaagatcgtcagcaggttgtgaccactttacttgaagaaggatatctggggccagcgtggccgggagcaattagctggttaacgggggataaccagagtatggagcatggacgagaactgacagtcaccttcagcgatggcagtcagcattatgtcctgctcgacatggggcttagctactggcgctgtattgaagacaccttctttgattttgctctacgagtaccgcagcaagttgaacggctggcaaacacgcgagcgcgagctgttgccccgggtaatgaccttaggagttatgttatcgctggataa

SEQ ID NO: 28913 - DNA, 3360 bp, Escherichia coli BIDMC 39
ttgcttgtgaaaactccagttaacccacttttgcaatggcttaacatgttttttagtcgccgttcattatccggagctgatggacgggcgttatatgcttaccgttgtactgatacagagtacgaaagtttggcagaactactgcgtacatatgcccctcgtagttatccaagaacgatattcatttcctatagcgatgttctatttagcatatatgccgcagagtttatccgccggactcatacggtcggacaccctaaatgggacacaattttagattctattgactggaaagttccgtatgttcatcgacagaagctggttaatgatggcattcgctactggaaaagaaagataagaaacctggggcaagcttcgggttatctgcatacactggcttgtgaaggtggtttacctatccgcatgattgaaaatgagagcggttatttgattacctatttcagaaggatatatcaggcgcttcgtgggcaagcatctcaatatcctgccgctaaaattgcacaagaattaggcgatacgattcctgtcacaatgcaaaacgaactggtctatgaaatagccggtgaattctgcgagactctctgccgattacttagtgagcatccacctcaaagcagtgatcccgtttctgcattacgtaagctctctccagactggcatcttcaacttccactcgttctccccgaagcgaatgctgcagagattgtaaggcgattactttctcaatcttctgaaatacgcagtgcaagtagtcttcaggttgaaagaatctgggtcgatgttgatgacagttggtattgtgatgcccggttccgattcccggccacaatgcgtacagaacagttaacctctttgtttgaatgccatattcagccggagcagacccgactcatcatttcaggaaaatggaaaaatggcggggcaaggttggcaatgctaagccgttatgagcagcaagattggcgggtcgagttattacctattgcgatgcaaaaactctctggtgcagatgcaatggccgaaatctcattgtcgcttcatgaaggtccaattctgttaggtcacacaattccaaaaggcggttatgaacttactgaagaacttccctgggtttttgaagcgatgaatgagagtgaatcgcagctaaaacttgttggtatggggtctgtgagttccaggctaaatgctctgtttatttcgctaccgaaaaatagccatttagatattagtggagaaggtgagtttgatatcccaaggttgctgaaaaacagtgaacgcagcttaactaaaataagtggagtatttagcgttgttttacatgatggtgcagtttgtacaattcgcacccagcaactttatgattctgcgattgaatattatattaaatcgacagaagttgaactggttaaatcggattatcctgtccatcgagcctggccgaagatcggttggaaaaaggatctgcaatatggcattgtaccggagaaagaacttttttggcgttccattcgttcaggtaacaatgcctggtattctgtcgcatcagaaatgccaaaaggacagatagaagtccggcgaatagttaatgatgaggttttatttagcggtaaagttgtagttttaccagcagacttcgatattaatattatacctgagagtgctcagcaaggcattattatgctttctggtataacggatactagaattgataaatattcaaataatgaaaaagtaacacttaagtccgattattcacaaaacgagtgtgctatttattataattcatcgctgatgctggaaaataccgttgatttacgggtctcctggaaagatggttctaatcttaaactattattacctaagccggttagcggtggccgatttgtaactaatgatggttctgttcattttgatggtgtggcatctatagcacatttgcatggaatagatgctgagttattaaccatatcatgtgctggaagaggatatcttaatatcgagttattggatgaaaatccagtagctgaaaaattccgttatttacatgccgaccttcctcttttatcaggacgcaatgacaaattacaacaaatttcactttatgagaactataatttgctaaattctatgctggcatgtgcatggaacagcaatagtacattatgtgttgatttttactctgacagatttggaaaggataaagcaacactcaatattaaacgctacgatggtagttttattgaacacgatcaagggttactggttgatataaaaaattctgttgtttttcctgcaaatagaatagacgagctggttgttgatgctatttctcttaaggatcctggcttacacatatcgttgctaaaaaaagatgaatttgcttatgatctttcagctctgaatgttcaggatagcccatggttaattgtggggaaacttgatgatacagctcgcattgcaccagtaattaaatgggggttacctgtattacagacaaatgatttattacttaatgctctatgcgaagcggattccgaacagcgaaaaaaatattttaatgagctaatttttgaaatagataacaatcctttgcaaaattattgctgtttattaacggagtatattaagaaatacaaaatgaataatggcttatccttgctggatctggatttgttcagaggtatttcgagtaattaccgcgtagttgttcagttgttaatatcatcatgtctttctggtgatagcgatacgatttatgatatacaggacgaattacccttttcatggggatggattcccgtttcaatctggaaagatgtttttcaaaagtgttgggcttatctggaaaaacagattaacgataaaacattagcattacatatattgcaaccctttattgcttttatgaaccatcgtgcacatatcgatcgtcgtctgactcccattgcgaatatgttacttacatatggcgaactcctaccagccggttgtaatgtcttgccaactgttagtcgtgagcagtttaatgaagctaaacagatgctattaaggaatcccgacagctttgggcgtatcagtatcttccctaaagaactttggtctagtgctattactccagagttaaaatctgtttttaataagctttggattgaagataaatatcactcacggcttgaaaaacgttttaatttgatgttagtcgcagcgctgttaacccaaaaagataataacttgatacatcaattgtctgcgctttttgaattccactatcagcaagccccgcagcaattaggggtaatctatcaatattattttgaacaagcaggagtatgtcattga

SEQ ID NO: 28914 - DNA, 6345 bp, Escherichia coli BIDMC 43a
atgactacacgctatttttcgtcacttattgaacaatcgttgtctcgttcaactgaagcaacgctcagtatcatgggcgttaccaacccgcagctgcgtgaacatctcgcgcaacaaatgggggctgattgtgggaaaccgggctcattccttgcttctccggtattccagcaaatgtttggctggaaggagtcaaaccacacgatgcgcagcctgacggaaggcaacgcattgttgagcaaagcagtggttgattcactggatgatcagaataatggccggtaccggtttggtgctgactggaggccttttacgcaccagttagccagttggaaagctttgctggaaaagaaacattcagtggtggtaaccagtggtacgggttcaggtaaaacggaatgttttatggtaccggtgctggaagatctttaccgggaactgcatgaaaatggcaacaatccgttggtcggtgtccgagccctttttctctatccattgaacgccctgattaattcacagcgcgagcgtctggatgcctggacgcgtggttttggtacagggatccgctactgcctttacaacggcaacaccgaaaacctacacgcttcggtaaaaagcgaacaggcaaaaaggccgaatgaggtgctctcgcgcgaaaaaatgcgtgaagaacctgcgccgattctggtgaccaacggcacgatgctggaatatatgatggttcgccaggtcgacgccccgattatccagcaatctaaagcacaaaaatcactacgctggattgtactggatgaagcgcatacctatgtagggtcgcaggccgctgaactggcgctccagctgcgtcgtgtgatgaccgcgtttggcgtgacaccagatgacgtgcgctttgtcgcgacctctgcgaccattgccggcagcgacgctgaaaagcagctgaaaaaatttctctctgaattatccggtatcccgcaggagcgcatcgatgttctggacggaagtcgggtgattcctgaactggaaccatccaaaaacgtttctgttccgttagacgagatagagcaaatacctgatctggatctaagagataaaaatgataataaaattaaagggataagtcctgagcgcttttatgcgcttacgcattcccccgaagcgcgttacatacgtgagatgttggtcaaacagcccaatccgatgaagctggatgagataacagagcggttacacgtgctgacaaaacagcattacagccagcaggaagtactgcgttggatcgatgtctgttcagggactcaacctaatgcaaaggatcccgcatttcttaaagtcagggcgcatatcttccagcgtaatacccagggaatatgggcttgtgttgataaagattgcagattaaagcacggtacaccgctcgacaaaggctggccctttggctatgtgtatgtgaaccagcgacaaaattgtgactgtggaagccctgtatacgaagttgcattctgtaatgattgtaatgagcctcatcttctggcacgggacaaaaagggcaaactagtccagtgggaaaataaaggtggcgatgaattctctttgcaggatgaagtacctgttgaacatgacgctacagaagaaaaagtcgaaaaagagaacagttttcagcctccgttgattattgccgcaggagagaccagcgaggcaggttataccctacaacgcctcgaccgtcagacgcgccgtattggcgttattaacaatgacagcattccgctgattattaatgatattgaacaggtttgtagtgccagtggctgtggctacagaggcatgagtgggaaacagcccttccggcgtgcactattaggtgggccattttacgttactaatatcgtgcccaccgttctagagtattgtcaggactttaccagtgatgaaggcaaagagggcgtcggaccagattcgttgccaggacgaggtcgtcgactcatcacctttacagacagtcgacaagggacagcccgaatggcggtgcgtatgcagcaagaagcagaacgcagtcgcttacgcggaagcgtagtcgaaattctcagctggcatcaaaggacgcaaacgtctacagcgccgaatgccaatgccgatctggaaaaattagcggccagggcgaagcaagcccgtgagcaggcagaagaatatcgaagctggggaatgccagaccaggcgaaattgtcacaagcacaggctgaacagcttgaacaggcttatcaggctgcaaccggtgggaaagctgcgactatcctggtatcccgaacctggacggagatggttaacgagcttaaagagagagccgatatccgcgggccggttctgcaatataaccattatcttaagcctgaagtgtttaatgaaaacggcggcccccttaagctttctgaaatgttgttgttccgggaattcatgcgtcgccctaaacggactaacagcctggaaacacaggggctggttcaggttggttaccaggggctggagaaaatacataagagccccttgcactggcaggaaaaaggattaacgctggatgactggcgcgattttctcaaggttacgttggatcattacgttcgcgagagcaacttcacacagctggatgatgagctgaaaaactggattggtagccgtttttcatcaaaattcgtccgtaacccggaatcaaaagatcctgaagataatcagaacagacgctggcctcaaattcgtaatggcaacgtatcccatcgtttagcgaagttgctgatgctgggggctggattcaaaaccgtcaatgcggcaactattgatattatcaatacatggctgaaagaagcatgggcccaacttaccggaccgcttgcagtactgaaacccgatggcaaccgtttttatttaccgaaagagcatatgactttttctttaatcacggatgcctggatttgcccggtaaccaataaaatcctggatacggcttttaaaggcttaaccccttatctgcctacccatatttcgttcgagcatcttaccctggcgcaatatgacacttttgtcgcgcagaaagtcacaatgccggaaatctggaagctggatcgttcacaggaagactacgcagagggtctggcaaaagcacgcgactgggtcagccatgatccgctgatcgcacaattgcggtcggaaaacgtctggacagacattaacgatcgtgtcgtggaaggcggcttctactatcgtactgccgagcactctgcccagcagtcgtcagaacgtctgcaaagctatgaaaagatgttcaagaatgggcaactaaatgttctcaactgttccaccaccatggaaatgggggttgatatcgggggtattactgcggtggtaatgaacaacgtaccgccacatccggccaactatttacagcgcgccgggcgagccgggcgtagtaaagaatcacgcgcgatctcttacaccctatgtaaaggtaacccacacgaccagcaggtttttgccaacccgctctggccatttgaaaccatgatcccggcacccatgttcgcgatgaactccgcccgactggtgcaacgtcacgtcaatgcattattactgtccgactttttatgtaacgttattggcgaaaccgataaagaaaaaaccagcctcgatagcctctggtttttcggtgaagatgacgggcagtcaaaatgcgaacgctttaaaatctggctggaacgtccggttcttgatatcgacacggcgctggaacggctggtgaaaggtacggcgttgcatggtgcaagagccgaatatctgcgggataaaacaatcaacgcgatcaccttcctgcaacagcggtggctctccgtttatcgcgatctcgtgacacaggagcgtgagtcgcagccgcaaacgccttatcgtaagcgcatagagctggagaagaaacggcactgtggcgagtatctgctgcgcgatctggctgccagaaccttcctgccgggatacggtttcccgacagatgtagtgacgtttgataacttcacgatggaagattatatccgcgaaaaatcgcagaaaagtcgtgataaaaaggaccgtgaagataacgtttcccgttataaaggattaccttcccgtaacctcggtgttgccattcgtgaatatgcaccgggagcagagatcatccttgatggccgtgtcttccgctctgccggtgtctcactgcactggcacaacattaatgctgataccaatgaagcccagcgtctggattgcgcctggcgctgtcacaaatgcgggaccattggctatgaagaggggatgagcagttccgggatgctcttttgctccaatagcgcctgcggcgaaaaaataatcatggataatcgccgtcaggtgctgcagcctgccgggtttgtcaccgatgcacacgctccggtaacgaacaatattgaaaccatgaaattcgtcccggttgtccccgcgtgggtctttgttaaagcagagcccgtaccgttgcctaacccgctaatgggttatatggcttctggggctgatgggcatgttttccagcaaagtttgggggaaggtggacacggttatgcattgtgtctgagctgtggccgtgctgagtcgatgctgaatgaaaatgatgcgccgaaaagtatggaagctcactatccaccgcgtccgggtaaagcggatcgcgacagccagaatcatcgtctgatttgccccggttcgacggcactcatgaagaatgtcaccctgggcgcactggcgcgtaccgatgtctttgaaatggttctgcgcaaaccgcaaaacggcgagtatctgccagataacacagaggaggggcggattgttgccatgactctggcggttgctctgcgtcaggcgctggcgggcgttctgggtatctccgccgcagaactcggctattctgtacgtccggtcagactggaggatgggcaatcggtattagccgtacagctttatgatgtgatcagcggtggtgcaggttttgcctccagcgcaccggtacacattgaagctatattgcagggaatggtgaaacagttaggctgccgccattgtgagactgcatgtagtgaatgcctgcttgattcccagactcgccacgatcacgatttgctggatcgcaaagcggcgctggcctggcttggcgatgacttcacgtattacatcggtttaccggatgaagagacattctcgctgccggatgcccgctactgccctggcgccattggcgatacgattcgccgggcgattaacgaaggcgctgaaaagctcaccctgtggatgaccggcgcgcccaatgagtgggatttatacgcacgtcagttccgcgcggcggttcagaactatcggctaaaagacaacgtcgaggtcgatcttgttattcctacgggagtggatgacccggacctgttgcatgaactatcgcaatttactgcgctgggtgtgcggctgtgccatgttgaacaggatctgcaattaccgatcgttgcccaggtcacctttaccgatcgcgtgatgacgctggcctctcgcagccagcaggcaacgattccggggccggagtggcacctgaatgacgaactggtggtgcgtagtctcggttataaaacggtagaactgaacgagtttattctgccggctaaagccaccaacgctgtcgagcgggtcaaagacattcagatccacaaacagttgaatggaccactgtcgcagtttgggcaacgcttctgggacgtgctgtttaacgaccatgaagaagcgcagtcactgatgaataacacgcgaattaccggcgttcactataccgatcgctatctgcaaaacccggttgcgctggcgttgttgggatcaattctgagaccgctaaaaacaaagctgaccgatggcgctgaagtgacgctggatacgctatttaaagataaagatcgccccggtaaccggcctttccatgactggatgagcatagcggattttcaggatttcgctgatcagtggtttgctgctgcgctgggcaggccggtagaactgacggtgttcgactcgccgcgcgatatccctcaccatcgtaaactgacggtgacttttgaggatggtcaggtattgaagatccgcttcgatcaggggatgggctactggcgcatcaacttttcatcgcaatggcattactttgatttccgcgatgacgtttctttccagttagtcaaaatggctcaggcctgcaaggaagggaatgtcgccaacagcgaagagagttgggcaacggatgtgctggtggaggtgatcgcctcctga

SEQ ID NO: 28915 - DNA, 3291 bp, Escherichia coli BIDMC 43a; identical to SEQ ID NO: 28897

SEQ ID NO: 28916 - DNA, 6345 bp, Escherichia coli BIDMC 43b; identical to SEQ ID NO: 28914

SEQ ID NO: 28917 - DNA, 3291 bp, Escherichia coli BIDMC 43b; identical to SEQ ID NO: 28897

SEQ ID NO: 28918 - DNA, 6345 bp, Escherichia coli BIDMC 6; identical to SEQ ID NO: 28560

SEQ ID NO: 28919 - DNA, 3291 bp, Escherichia coli BIDMC 6; identical to SEQ ID NO: 28897

SEQ ID NO: 28920 - DNA, 6345 bp, Escherichia coli BIDMC 82; identical to SEQ ID NO: 28560

SEQ ID NO: 28921 - DNA, 3291 bp, Escherichia coli BIDMC 82; identical to SEQ ID NO: 28897

SEQ ID NO: 28922 - DNA, 6345 bp, Escherichia coli BIDMC 9; identical to SEQ ID NO: 28560

SEQ ID NO: 28923 - DNA, 3291 bp, Escherichia coli BIDMC 9; identical to SEQ ID NO: 28897

SEQ ID NO: 28924 - DNA, 6315 bp, Escherichia coli CB7326; identical to SEQ ID NO: 28464

SEQ ID NO: 28925 - DNA, 2937 bp, Escherichia coli CB7326; identical to SEQ ID NO: 28445

SEQ ID NO: 28926 - DNA, 6345 bp, Escherichia coli D6-113.11; identical to SEQ ID NO: 28486

SEQ ID NO: 28927 - DNA, 3291 bp, Escherichia coli D6-113.11; identical to SEQ ID NO: 28561

SEQ ID NO: 28928 - DNA, 6315 bp, Escherichia coli DEC5A
atggacgttcagcaactgcattatgcgccacttctaaatcagcttcatcagcgtgcggtgaggtcggtggtaagtcagttggcattgcggagcaagtcgttgactcattatctggaatcacaatattttcagcctcccggtcaggaggggtcactgcttgcagacccggtattcgaaagtacattcggctggatgcctgcggatgaaacaatggaggatttgcgggacaagctgatctccagcccgctggttgatgcattgagcaaagcgccagtgccatttcgtcatcaacttactgcgtggcgaacgattctggaagacaaaaaatccttgttagtgagcagcggtacgggatccgggaaaacagaatgctttatggtaccggttctggaagatcttattcgtcagcaaaaatcgacccgccagtcactaacagggacacaagctattttcttgtatccgttaaatgcattaattaacagccaacaggagcggcttcgcgaatggacgcgcggatttaaggggaaaatacgcttcgcgctatataatggcgaaacccggcataccaaatacgaaattcaggaagatcagttgaaagtacctgaacaagctttgagtcgggaagccatttatgaagcaccaccttccatcatggtgacgaataccaccatgctggaatatatgctgattcgtcgtaaagatgccccaatcatcgaaaagtctcaggggatgttaaagtatatcgtcctggatgaagcccatagttatattggttctcaggctgctgagttagcgctgcttttacgtcgtgttatgcaggctttcaatgttggacccggcacagataaacctgtgcagattatcgcgacctctgccactattggtgaagactctcctgaaggtaataaggagcttgctaaatttgtcgctgatctcgcgggcgttacagaacgtgatgtcaaagtggttcgcggttatcgacaaataccgcgggtatcggagtcgctgattcgtcatgaataccccacatctttaacttctcttaaatccctgagccctcaggatctttaccaacagctttgtcattaccgtgtggcccagcaattgcgtcaggcgttaactcatcccggacggcaggcagtacgtttgagtgagttgctcaatgttgccagaagaacctggccagatattaatcaccgtgagctactgcaactcctcgatctaatggcaagatcgcgagaaggtgaactggcttttacgccattacgtatgcatgggtttatcagaacactggcgggtctatgggcatgttcaaacaaacaatgctcacataaagcacatgaattaaatcagagtgactggccatttggtcaggtatggtttgagcagcgccaatattgtgactgtggagcgccggtatttgaagttttacgttgctccgggtgtggttcagcttatttgtctgccaaagaggagatgcgcggtgatggaacgaactggttggtagcgcaaccagccgctgccgaagtggatgagtttgctcttgatgtagatgtttattctgaagatgaagacaacgacgaattagacaataactctcaatttgatcgtctgattgcgagcggtggtgaaaaatatatcatttcactggaagaaacgacggcggggaaaattgatagtgaagcgcaaaagcactatgaaataaacctgttaagaccggaatctcgaggtgagggacgcaataactcctttgcttgtgtttgctgtggtgacactcaacggaaaaataatcctttattccgtccgcttcggctcggcgcgcccttttttttaaatgaaattattcctactctgctggagttttctccattaccgcaaacaagagaagagcagttaggaccgtttaatggtcgacgcttgctcacctttacggattcgcgtcagggtaccgctcgcatttcagcccgcttacagcaggatgccgataaagcgacgttgcgagctctttgttaccaggagctggcaaatattacagagccttcagcaaaactcagcccggcacactgtgcactgttagagaaagttattagccagttttctgtcctccctttaaaaaattccatcgacgcgctgaaaaaagcgatggctgcgaatgaggagcttagcccgacggacattcaggcacttaaaattattgagccgatggtgagttccttaagcacggagcatgctgaagcgatgcaaatacttcaggctaactctggcaatcagcagaagaaaaccatgtcatggcaaacgctgtctgaacagctggttggcagtgtggaccttgccgatagaatgagaggcagttttaaagaattgtctgggcttgatcttactaaacaacagtttgcagatttttgtttatacagcgagtttggtcgccgccctaaaaatgcctggaccctcgaaagtctgggtctggtagccattcactatccattcattgataaagttacaacctgcccgcaggactggaagacattattacccgatcccgataagcaattagcggaatggcgtaatttattgaagattactcttgatttctttatccgtgaaaacagtgccgttttttacgaaaacgagcaataccctcgctggatgggggcacgtttcccggtaaaaatgctccaggggccagataaaaaaaacaaagggcagaaacgtgatcaactttggccacaaatacgcgatcgccattataaccgggtcattaagctattaatcgcagtctttccggcaatacaacctgagcaggctcactggaaatcgttagttaaccacttaatgattgaggtctgggatgcaattcgaccctgcttacgtcagtttgagtcgggttatcagctggatattaaacaacaagctgaattttacagtccaaagcaagtgtggcgttgcccctatactcgacgtgcgttagacgtcacgttgctgggatactctccgtatttgccgggtagcaaagaaattgcacctgaaaaagcagtgttgattgaaatgcctgagcttcctgtacgtcactggcgtttgtctggtggtggagaaatcgcccgagaagaacgtctggagtggctggaaagtaatgcgctgattcaacatgcccgcgaggaaggattatggtctactcgcagcgaccgactggccctgaaagatagctggtatcgtctggaggaacactctgcgcagagaacgcctgagcagaaccagtttaatgaaaaacaatttaagtcaggcaaagttaatgtgctgaactgttccacgaccatggagatgggggtggatattggtggtatgagtttggtggcaatgaacaacgttcctccagcgccggcaaattatttgcaacgtgcaggtcgcgcggggcgtcgtggagagagtgcatctgctgccattacgttatgtaaaaacacggcgcatggaatggaggtattcaaagaccccctctgggcgttcaacactactgccagtgcgccacgggttcgttttgggagcagtagtattgttcaacgacatgttaatgccctggttttaggtctgtttttacgagctgaagttcctgatgcgacaaaactgagttgcaaatggttctttgaaggtgatgagagccagtgtcttcgttttctccattggttaaatcaccaggccgatcagctggcggataaacttaaacgccttactcagggaaccgtactgatgtcattgacggcaacccagctcttgacccgcacacaagcaatgatgcagcaggttgatatccgctggagaagccaacttgcgatactgttggaaaatatcgaagcgttgaaggcggataacagcgcgtgggaagaaacaccagcaggtaaagccatcgcttatcagcttcgtgattatcgcggtgcatatctgttttctaaactcattagtgaagcgttcctgccggggcatggtttcccggttggcgtagtcaatttcaattatctgacggcagatgagctggaaaaacgtcgcgcaataaaagccactcaggctgaccctaatgaagggggagaaagcttttctcgtcgtattgaaaaattgcccagccgtgatttgcctacagcattacgcgagtatgcgcctggtgcagatgtggtattgggcggaaaagtatatcgttcctcgggcattatgcttggcaaggtgcttgccagcgggcaggagctgtcaggcgatcatcatattccgtggttctggcattgccgtaaatgtggtgcgggggcaaccagtactacccatcctgtcgaatgtagtcactgcaaagcggatatacagcaacttgatgtgaagcgttatttacagcctgttggttttgcgacagatattcgttatcaggcacataatgatgtatccatgcctgcacaacttccctggaaagatccacgtgttcttgtaccgtcttcggtgtgggtttctttacccgatgctgggctaggacgttaccgttttagccatagtggggaattgttccacttcagtgaaggggaatttgggcacggctacgcaatttgcctctcatgtggtcgggcagaatctcaaactcaaccccagcgtacccctgaaaatctaaagaacccagagagggaaaatacgcattacctgttgcgagggggcagtaacgatcgtcaggggagcaataaattgtgccacggtcatgtgcataaagatctgtggttgggatatagcagtcgtacagatatggttgagctgcaactcaatgatgataatggcctgttgatccgtgatgaggttgccgcgcgttcccttgcggtcgctttgcgtgaagggttagcgcataaattgggtatcgaaaatactgagctgggcgtgacgacgcagcaagcgcgcgatatcaatggctataccggatattccatcttcatttacgacaataatgcggggggtgcaggttatgcagtgcaattgatcgaccattgggctgatgtctttaattacgccagaaaattgctcgattgcagttgcgataaattctgtcaccactgcttgctcagctacgacagtcagcattatgtcaacagattagatcgtcaccatgcattaaccctgcttaccaatgtacggttgcagcgacttaacctcgcgccagaatatcagtacttcggcgatggtagccgggttgaaactaaccctctgagtttacgtattgcgcaatgcctgaacagcgagatttatgactcctgctcgctggttcttgcggggccgcaggaacagtgggactttgcccaatggccattatttaaagagttgctccagtttgcctcctccggtgggaatgttgagttgctggtggccacgccgctggcaaacttaactgatagctccagacatcagctttccgcgttggcggcgatgccgggaggtcgcttacaagtgaaatccattgccactgcgcagctcatgcaaggaaaggggcgctggcttgcgcaggtgactcgcgaagggcaaagccaacagtgggccgcagacgacagcgctaccgttgcacctggtgaattatggggacaaagtgcgtcttcaccagtagtgacacttaaaggaacgtccggaaaaaccttctcgggtcagaccttaagtgcagaagatttactgcccgccttacccaccggggcggtgcgcatcaatctctgtgaacaactggacgggccgctggaaggttttggttcgcgtttctggtcgttagtcacgcaacagcacgctggctggaagcaggcatttacccgccacaaagagataacgcatgttgagtacagcgatcgttatcttaatagcccattcacggcgcgtttgttaggtgaaatcttaaccgagctggttgaacagggaatggcggaacgcgccagcctcactgtttgcgtcaaaaaattggattacaactctcgccaacacgacgctctctataacgcgtggcttaatgaggaagatcgtcagcaggttgtgaccactttacttgaagaaggatatctggggcctgcgtggccgggagcaattagctggttaacgggggataaccagagtacggagcatggacgagaactgacagtcaccttcagcgatggcagtcagcattatgtcctgctcgacatggggcttagctactggcgctgtattgaagataccttctttgattttgccctgcgagtaccgcagcaagttgaacggctggcaaacacgcgagcgcgagctgttgccccgggtaatgaccttaggagttatattatcgctggataa

SEQ ID NO: 28929 - DNA, 3315 bp, Escherichia coli DEC5A
atgttttttagtcgccgttcattatccggagctgatggacgggcgttatatgcttaccgttgtactgatacagagtacgaaagtttggcagaactactgcgtacatatgccccccgtagttatccaagaacgatattcatttcctatagcgatgttctatttagcatatatgccgcagagtttatccgccggactcatacggtcggacaccctaaatgggacacaattttagattctattaactggaaagttccgtatgttcatcgacagaagctggttaatgatggcattcgctactggaaaagaaagataagaaacctgggacaagcttcgggttatctgcatacactggcttgtgaaggtggtttgcctatccgcatgattgaaaatgagagcggttatttgattacctatttcagaaggatatatcaggcgcttcgtgggcaatcatctcaatatcctgccgctaaaattgcacaagaattaggcgatacgattcctgtcacaatgcaaaacgaactggtctatgaaatagccggtgaattctgcgagactctctgccgattacttagtgagcatcctcctcatagcagtgatcccgtttctgcattacgtaagctctctccagactggcatcttcaacttccactcgttctccccgaagcgaatgctgcagagattgtaaggcgattactttctcaatcttctgaaatacgcagtgcaagtagtcttcaggttgaaagaatctgggtcgatgttgatgacagttggtattgcgatgcccggttccgattcccggccacaatgcgtacagaacagttaacctctttgtttgaatgccatattcagccggagcagacccgactcatcatttcaggaaaatggaaaaatggcggggcaaggttggcaatgctaagccgttatgagcagcaagattggcgggtcgagttattacctattgcgatgcaaaaactctctggtgcagatgcaatggccgaaatctcattgtcgcttcatgaaggtccaattctgttaggtcacacaattccaaaaggcggttatgaacttactgaagaacttccctgggtttttgaagcgatgaatgagagtgaatcgcagctaaaacttgttggtatggggtctgtgagttccaggctaaatgctctgtttatttcgctaccgaaaaatagccatttagatattagtggagaaggtgagtttgatatcccaaggttgctgaaaaacagtgaacgcagcttaactaaaataagtggagtatttagcgttgttttacatgatggtgctgtttgtacaattcgcacccagcaactttatgattctgcgattgaatattatattaaatcgacagaagttgaactggttaaatcggattatcctgtccatcgagcctggccgaagatcggttggaaaaaggatctgcaatatggcattgtaccggagaaagaacttttttggcgttccattcgttcaggtaataatgcctggtattctgtcgcatcagaaatgccaaaaggacagatagaagtccggcgaatagttaatgatgaggttttatttagcggtaaagttgtagttttaccagcagacttcgatattaatattatacctgagagtgctcagcaaggcattattatgctttctggtataacggatactagaattgataaatattcaaacaatgaaaaagtaacacttaagtccgattattcacaaaacgagtgtgctatttattataattcatcgctgatgctggaaaataccgttgatttacgggtctcctggaaagatggttctaatcttaaactattattacctaagccggttagcggtggccgatttgtaactaatgatggttctgttcattttgatggtgtggcatctatagcacatttgcatggaatagatgctgagttattaaccatatcatgtgctggaagaggatatcttaatatcgagttattggatgaaaatccagtagctgaaaaattccgctatttacatgccgaccttcctcttttatcaggacgcaatgacaaattacaacaaatttcactttatgagaactataatttgctaaatgctatgctggcatgtgcatggaacagcaatagtacattatgtgttgatttttactctgacagatttggaaaggataaagcaacactcaatattaaacgctacgatggtagttttattgaacacgatcaagggttactggttgatataaaaaattctgttgtttttcctgcaaatagaatagacgaactggttgttgatgctatttctcttaagaatcctggcttacacatatcattgttaaaaaaagatgagtttgcttatgatctttcagctctgaatgttcaggatagtccatggttaattgtgggaaaacttgatggtacagctcgcattgcaccagtaattaaatggatgctacctgtattgcagacaaatgatttattactaaatgctctatgcgaagcagacccagaacagcgcaaaaaaaattttaatgagctaatttttgaaatagataacaacccattgcaaaattattgctgtttattaacagagtatattaagaaatacaaaatgaataatggcttatccttgctggatctggacttgttcagaggtatttcgagtaattaccgcgtggttgttcaattgttaatatcatcatgtctttctggtgatagcgatacgatttatgatatacaggaagaattacccttttcatggggatggattcccgtttcaatctggaaagatgttttccaaaaatgttggacttatctggagaaacagattaacgataaaacattagcattacatatattgcaaccctttattgcttttatgaaccatcgtgcacatatcgatcgtcggctggctccgattgcgaatatgttacttacatatagtgagagcctaccaaccggttgtgatgtattgccaactgttagtcgtgagcagtttaatgaagctaaacagatgctattaaggaaccccgacagctttgggcgtatcagtatcttccctaaagaactttggtctagtgctattactccagagttaaaatctgtttttaataagctttggattgaagataaatatcactcacggcttgaaaaacgttttaatttgatgttagtcgcagcgctgttaacccaaaaagataataacctgatacatcaactgtctgcgctttttgaatttcactatcagcaagccccacagcaattaggggtaatctatcaatattattttgaacaagcaggagtatgtcattga

SEQ ID NO: 28930 - DNA, 6315 bp, Escherichia coli EC1734; identical to SEQ ID NO: 28540

SEQ ID NO: 28931 - DNA, 2937 bp, Escherichia coli EC1734; identical to SEQ ID NO: 28445

SEQ ID NO: 28932 - DNA, 6315 bp, Escherichia coli EC1735; identical to SEQ ID NO: 28540

SEQ ID NO: 28933 - DNA, 2937 bp, Escherichia coli EC1735; identical to SEQ ID NO: 28445

SEQ ID NO: 28934 - DNA, 6315 bp, Escherichia coli EC1736; identical to SEQ ID NO: 28540

SEQ ID NO: 28935 - DNA, 2937 bp, Escherichia coli EC1736; identical to SEQ ID NO: 28445

SEQ ID NO: 28936 - DNA, 6315 bp, Escherichia coli EC1737; identical to SEQ ID NO: 28540

SEQ ID NO: 28937 - DNA, 2937 bp, Escherichia coli EC1737; identical to SEQ ID NO: 28445

SEQ ID NO: 28938 - DNA, 6315 bp, Escherichia coli EC1738; identical to SEQ ID NO: 28464

SEQ ID NO: 28939 - DNA, 1662 bp, Escherichia coli EC1738
atgctttctggtataacggatactagaattgataaatattcaaacaatgaaaaagtaacacttaagtccgattattcacaaaacgagtgtgctatttattataattcatcgctgatgctggaaaataccgttgatttacgggtctcctggaaagatggttctaatcttaaactattattacctaagccggttagcggtggccgatttgtaactaatgatggttctgttcattttgatggtgtggcatctatagcacatttgcatggaatagatgctgagttattaaccatatcatgtgctggaagaggatatcttaatatcgagttattggatgaaaatccagtagctgaaaaattccgctatttacatgccgaccttcctcttttatcaggacgcaatgacaaattacaacaaatttcactttatgagaactataatttgctaaatgctatgctggcatgtgcatggaacagcaatagtacattatgtgttgatttttactctgacagatttggaaaggataaagcaacactcaatattaaacgctacgatggtagttttattgaacacgatcaagggttactggttgatataaaaaattctgttgtttttcctgcaaatagaatagacgaactggttgttgatgctatttctcttaagaatcctggcttacacatatcattgttaaaaaaagatgagtttgcttatgatctttcagctctgaatgttcaggatagtccatggttaattgtgggaaaacttgatggtacagctcgcattgcaccagtaattaaatggatgctacctgtattgcagacaaatgatttattactaaatgctctatgcgaagcagacccagaacagcgcaaaaaaaattttaatgagctaatttttgaaatagataacaacccattgcaaaattattgctgtttattaacagagtatattaagaaatacaaaatgaataatggcttatccttgctggatctggacttgttcagaggtatttcgagtaattaccgcgtggttgttcaattgttaatatcatcatgtctttctggtgatagcgatacgatttatgatatacaggaagaattacccttttcatggggatggattcccgtttcaatctggaaagatgttttccaaaaatgttggacttatctggagaaacagattaacgataaaacattagcattacatatattgcaaccctttattgcttttatgaaccatcgtgcacatatcgatcgtcggctggctccgattgcgaatatgttacttacatatagtgagagcctaccaaccggttgtgatgtattgccaactgttagtcgtgagcagtttaatgaagctaaacagatgctattaaggaaccccgacagctttgggcgtatcagtatcttccctaaagaactttggtctagtgctattactccagagttaaaatctgtttttaataagctttggattgaagataaatatcactcacggcttgaaaaacgttttaatttgatgttagtcgcagcgctgttaacccaaaaagataataacctgatacatcaactgtctgcgctttttgaatttcactatcagcaagccccacagcaattaggggtaatctatcaatattattttgaacaagcaggagtatgtcattga

SEQ ID NO: 28940 - DNA, 6315 bp, Escherichia coli EC1845; identical to SEQ ID NO: 28636

SEQ ID NO: 28941 - DNA, 2937 bp, Escherichia coli EC1845; identical to SEQ ID NO: 28445

SEQ ID NO: 28942 - DNA, 6315 bp, Escherichia coli EC1846; identical to SEQ ID NO: 28636

SEQ ID NO: 28943 - DNA, 2937 bp, Escherichia coli EC1846; identical to SEQ ID NO: 28445

SEQ ID NO: 28944 - DNA, 6315 bp, Escherichia coli EC1847; identical to SEQ ID NO: 28636

SEQ ID NO: 28945 - DNA, 2937 bp, Escherichia coli EC1847; identical to SEQ ID NO: 28445

SEQ ID NO: 28946 - DNA, 6315 bp, Escherichia coli EC1848; identical to SEQ ID NO: 28636

SEQ ID NO: 28947 - DNA, 2937 bp, Escherichia coli EC1848; identical to SEQ ID NO: 28445

SEQ ID NO: 28948 - DNA, 6315 bp, Escherichia coli EC1849; identical to SEQ ID NO: 28636

SEQ ID NO: 28949 - DNA, 2937 bp, Escherichia coli EC1849; identical to SEQ ID NO: 28445

SEQ ID NO: 28950 - DNA, 6315 bp, Escherichia coli EC1850; identical to SEQ ID NO: 28636

SEQ ID NO: 28951 - DNA, 2937 bp, Escherichia coli EC1850; identical to SEQ ID NO: 28445

SEQ ID NO: 28952 - DNA, 6315 bp, Escherichia coli EC1856; identical to SEQ ID NO: 28636

SEQ ID NO: 28953 - DNA, 2937 bp, Escherichia coli EC1856; identical to SEQ ID NO: 28445

SEQ ID NO: 28954 - DNA, 6315 bp, Escherichia coli EC1862; identical to SEQ ID NO: 28636

SEQ ID NO: 28955 - DNA, 2937 bp, Escherichia coli EC1862; identical to SEQ ID NO: 28445

SEQ ID NO: 28956 - DNA, 6315 bp, Escherichia coli EC1863; identical to SEQ ID NO: 28540

SEQ ID NO: 28957 - DNA, 2937 bp, Escherichia coli EC1863
atgattgaaaatgagagcggttatttgattacctatttcagaaggatatatcaggcgcttcgtgggcaatcatctcaatatcctgccgctaaaattgcacaagaattaggcgatacgattcctgtcacaatgcaaaacgaactggtctatgaaatagccggtgaattctgcgagactctctgccgattacttagtgagcatcctcctcatagcagtgatcccgtttctgcattacgtaagctctctccagactggcatcttcaacttccactcgttctccccgaagcgaatgctgcagagattgtaaggcgattactttctcaatcttctgaaatacgcagtgcaagtagtcttcaggttgaaagaatctgggtcgatgttgatgacagttggtattgcgatgcccggttccgattcccggccacaatgcgtacagaacagttaacctctttgtttgaatgccatattcagccggagcagacccgactcatcatttcaggaaaatggaaaaatggcggggcaaggttggcaatgctaagccgttatgagcagcaagattggcgggtcgagttattacctattgcgatgcaaaaactctctggtgcagatgcaatggccgaaatctcattgtcgcttcatgaaggtccaattctgttaggtcacacaattccaaaaggcggttatgaacttactgaagaacttccctgggtttttgaagcgatgaatgagagtgaatcgcagctaaaacttgttggtatggggtctgtgagttccaggctaaatgctctgtttatttcgctaccgaaaaatagccatttagatattagtggagaaggtgagtttgatatcccaaggttgctgaaaaacagtgaacgcagcttaactaaaataagtggagtatttagcgttgttttacatgatggtgctgtttgtacaattcgcacccagcaactttatgattctgcgattgaatattatattaaatcgacagaagttgaactggttaaatcggattatcctgtccatcgagcctggccgaagatcggttggaaaaaggatctgcaatatggcattgtaccggagaaagaacttttttggcgttccattcgttcaggtaataatgcctggtattctgtcgcatcagaaatgccaaaaggacagatagaagtccggcgaatagttaatgatgaggttttatttagcggtaaagttgtagttttaccagcagacttcgatattaatattatacctgagagtgctcagcaaggcattattatgctttctggtataacggatactagaattgataaatattcaaacaatgaaaaagtaacacttaagtccgattattcacaaaacgagtgtgctatttattataattcatcgctgatgctggaaaataccgttgatttacgggtctcctggaaagatggttctaatcttaaactattattacctaagccggttagcggtggccgatttgtaactaatgatggttctgttcattttgatggtgtggcatctatagcacatttgcatggaatagatgctgagttattaaccatatcatgtgctggaagaggatatcttaatatcgagttattggatgaaaatccagtagctgaaaaattccgctatttacatgccgaccttcctcttttatcaggacgcaatgacaaattacaacaaatttcactttatgagaactataatttgctaaatgctatgctggcatgtgcatggaacagcaatagtacattatgtgttgatttttactctgacagatttggaaaggataaagcaacactcaatattaaacgctacgatggtagttttattgaacacgatcaagggttactggttgatataaaaaattctgttgtttttcctgcaaatagaatagacgaactggttgttgatgctatttctcttaagaatcctggcttacacatatcattgttaaaaaaagatgagtttgcttatgatctttcagctctgaatgttcaggatagtccatggttaattgtgggaaaacttgatggtacagctcgcattgcaccagtaattaaatggatgctacctgtattgcagacaaatgatttattattaaatgctctatgcgaagcagacccagaacagcgcaaaaaaaattttaatgagctaatttttgaaatagataacaacccattgcaaaattattgctgtttattaacagagtatattaagaaatacaaaatgaataatggcttatccttgctggatctggacttgttcagaggtatttcgagtaattaccgcgtggttgttcaattgttaatatcatcatgtctttctggtgatagcgatacgatttatgatatacaggaagaattacccttttcatggggatggattcccgtttcaatctggaaagatgttttccaaaaatgttggacttatctggagaaacagattaacgataaaacattagcattacatatattgcaaccctttattgcttttatgaaccatcgtgcacatatcgatcgtcggctggctccgattgcgaatatgttacttacatatagtgagagcctaccaaccggttgtgatgtattgccaactgttagtcgtgagcagtttaatgaagctaaacagatgctattaaggaaccccgacagctttgggcgtatcagtatcttccctaaagaactttggtctagtgctattactccagagttaaaatctgtttttaataagctttggattgaagataaatatcactcacggcttgaaaaacgttttaatttgatgttagtcgcagcgctgttaacccaaaaagataataacctgatacatcaactgtctgcgctttttgaatttcactatcagcaagccccacagcaattaggggtaatctatcaatattattttgaacaagcaggagtatgtcattga

SEQ ID NO: 28958 - DNA, 6315 bp, Escherichia coli EC1864; identical to SEQ ID NO: 28540

SEQ ID NO: 28959 - DNA, 2937 bp, Escherichia coli EC1864; identical to SEQ ID NO: 28957

SEQ ID NO: 28960 - DNA, 6315 bp, Escherichia coli EC1866; identical to SEQ ID NO: 28540

SEQ ID NO: 28961 - DNA, 2937 bp, Escherichia coli EC1866; identical to SEQ ID NO: 28957

SEQ ID NO: 28962 - DNA, 6315 bp, Escherichia coli EC1868
atggacgttcagcaactgcattatgcgccacttctaaatcagcttcatcagcgtgcggtgaggtcggtggtaagtcagttggcattgcggagcaagtcgttgactcattatctggaatcacaatattttcagcctcccggtcaggaggggtcactgcttgcagacccggtattcgaaagtacattcggctggatgcctgcggatgaaacaatggaggatttgcgggacaagctgatctccagcccgctggttgatgcattgagcaaagcgccagtgccatttcgtcatcaacttactgcgtggcgaacgattctggaagacaaaaaatccttgttagtgagcagcggtacgggatccgggaaaacagaatgctttatggtaccggttctggaagatcttattcgtcagcaaaaatcgacccgccagtcactaacagggacacaagctattttcttgtatccgttaaatgcattaattaacagccaacaggagcggcttcgcgaatggacgcgcggatttaaggggaaaatacgcttcgcgctatataatggcgaaacccggcataccaaatacgaaattcaggaagatcagttgaaagtacctgaacaagctttgagtcgggaagccatttatgaagaaccaccttccatcatggtgacgaataccaccatgctggaatatatgctgattcgtcgtaaagatgccccaatcatcgaaaagtctcaggggatgttaaagtatatcgtcctggatgaagcccatagttatattggttctcaggctgctgagttagcgctgcttttacgtcgtgttatgcaggctttcaatgttggacccggcacagataaacctgtgcagattatcgcgacctctgccactattggtgaagactctcctgaaggtaataaggagcttgctaaatttgtcgctgatctcgcgggcgttacagaacgtgatgtcaaagtggttcgcggttatcgacaaataccgcgggtatcggagtcgctgattcgtcatgaataccccacatctttaacttctcttaaatccctgagccctcaggatctttaccaacagctttgtcattaccgtgtggcccagcaattgcgtcaggcgttaactcatcccggacggcaggcagtacgtttgagtgagttgctcaatgttgccagaagaacctggccagatattaatcaccgtgagctactgcaactcctcgatctaatggcaagatcgcgagaaggtgaactggcttttacgccattacgtatgcatgggtttatcagaacactggcgggtctatgggcatgttcaaacaaacaatgctcacataaagcacatgaattaaatcagagtgactggccatttggtcaggtatggtttgagcagcgccaatattgtgactgtggagcgccggtatttgaagttttacgttgctccgggtgtggttcagcttatttgtctgccaaagaggagatgcgcggtgatggaacgaactggttggtagcgcaaccagccgctgccgaagtggatgagtttgctcttgatgtagatgtttattctgaagatgaagacaacgacgaattagacaataactctcaatttgatcgtctgattgcgagcgatggtgaaaaatatatcatttcactggaagaaacgacggcggggaaaattgatagtgaagcgcaaaagcactatgaaataaacctgttaagaccggaatctcgaggtgagggacgcaataactcctttgcttgtgtttgctgtggtgacactcaacggaaaaataatcctttattccgtccgcttcggctcggcgcgcccttttttttaaatgaaattattcctactctgctggagttttctccattaccgcaaacaagagaagagcagttaggaccgtttaatggtcgacgcttgctcacctttacggattcgcgtcagggtaccgctcgcatttcagcccgcttacagcaggatgccgataaagcgacgttgcgagctctttgttaccaggagctggcaaatattacagagccttcagcaaaactcagcccggcacactgtgcactgttagagaaagttattagccagttttctgtcctccctttaaaaaattccatcgacgcgctgaaaaaagcgatggctgcgaatgaggagcttagcccgacggacattcaggcacttaaaattattgagccgatggtgagttccttaagcacggagcatgctgaagcgatgcaaatacttcaggctaactctggcaatcagcagaagaaaaccatgtcatggcaaacgctgtctgaacagctggttggcagtgtggaccttgccgatagaatgagaggcagttttaaagaattgtctgggcttgatcttactaaacaacagtttgcagatttttgtttatacagcgagtttggtcgccgccctaaaaatgcctggaccctcgaaagtctgggtctggtagccattcactatccattcattgataaagttacaaccagcccgcaggactggaagacattattacccgatcccgataagcaattagcggaatggcgtaatttattgaagattactcttgatttctttatccgtgaaaacagtgccgttttttacgaaaacgagcaataccctcgctggatgggggcacgtttcccggtaaaaatgctccaggggccagataaaaaaaacaaagggcagaaacgtgatcaactttggccacaaatacgcgatcgccattataaccgggtcattaagctattaatcgcagtctttccggcaatacaacctgagcaggctcactggaaatcgttagttaaccacttaatgattgaggtctgggatgcaattcgaccctgcttacgtcagtttgagtcgggttatcagctggatattaaacaacaagctgaattttacagtccaaagcaagtgtggcgttgcccctatactcgacgtgcgttagacgtcacgttgctgggatactctccgtatttgccgggtagcaaagaaattgcacctgaaaaagcagtgttgattgaaatgcctgagcttcctgtacgtcactggcgtttgtctggtggtggagaaatcgcccgagaagaacgtctggagtggctggaaagtaatgcgctgattcaacatgcccgcgaggaaggattatggtctactcgcagcgaccgactggccctgaaagatagctggtatcgtctggaggaacactctgcgcagagaacgcctgagcagaaccagtttaatgaaaaacaatttaagtcaggcaaagttaatgtgctgaactgttccacgaccatggagatgggggtggatattggtggtatgagtttggtggcaatgaacaacgttcctccagcgccggcaaattatttgcaacgtgcaggtcgcgcggggcgtcgtggagagagtgcatctgctgccattacgttatgtaaaaacacggcgcatggaatggaggtattcaaagaccccctctgggcgttcaacactactgccagtgcgccacgggttcgttttgggagcagtagtattgttcaacgacatgttaatgccctggttttaggtctgtttttacgagctgaagttcctgatgcgacaaaactgagttgcaaatggttctttgaaggtgatgagagccagtgtcttcgttttctccattggttaaatcaccaggccgatcagctggcggataaacttaaacgccttactcagggaaccgtactgatgtcattgacggcaacccagctcttgacccgcacacaagcaatgatgcagcaggttgatatccgctggagaagccaacttgcgatactgttggaaaatatcgaagcgttgaaggcggataacagcgcgtgggaagaaacaccagcaggtaaagccatcgcttatcagcttcgtgattatcgcggtgcatatctgttttctaaactcattagtgaagcgttcctgccggggcatggtttcccggttggcgtagtcaatttcaattatctgacggcagatgagctggaaaaacgtcgcgcaataaaagccactcaggctgaccctaatgaagggggagaaagcttttctcgtcgtattgaaaaattgcccagccgtgatttgcctacagcattacgcgagtatgcgcctggtgcagatgtggtattgggcggaaaagtatatcgttcctcgggcattatgcttggcaaggtgcttgccagcgggcaggagctgtcaggcgatcatcatattccgtggttctggcattgccgtaaatgtggtgcgggggcaaccagtactacccatcctgtcgaatgtagtcactgcaaagcggatatacagcaacttgatgtgaagcgttatttacagcctgttggttttgcgacagatattcgttatcaggcacataatgatgtatccatgcctgcacaacttccctggaaagatccacgtgttcttgtaccgtcttcggtgtgggtttctttacccgatgctgggctaggacgttaccgttttagccatagtggggaattgttccacttcagtgaaggggaatttgggcacggctacgcaatttgcctctcatgtggtcgggcagaatctcaaactcaaccccagcgtacccctgaaaatctaaagaacccagagagggaaaatacgcattacctgttgcgagggggcagtaacgatcgtcaggggagcaataaattgtgccacggtcatgtgcataaagatctgtggttgggatatagcagtcgtacagatatggttgagctgcaactcaatgatgataatggcctgttgatccgtgatgaggttgccgcgcgttcccttgcggtcgctttgcgtgaagggttagcgcataaattgggtatcgaaaatactgagctgggcgtgacgacgcagcaagcgcgcgatatcaatggctataccggatattccatcttcatttacgacaataatgcgggtggtgcaggttatgcagtgcaattgatcgaccattgggctgatgtctttaattacgccagaaaattgctcgattgcagttgcgataaattctgtcaccactgcttgctcagctacgacagtcagcattatgtcaacagattagatcgtcaccatgcattaaccctgcttaccaatgtacggttgcagcgacttaacctcgcgccagaatatcagtacttcggcgatggtagccgggttgaaactaaccctctgagtttacgtattgcgcaatgcctgaacagcgagatttatgactcctgctcgctggttcttgcggggccgcaggaacagtgggactttgcccaatggccattatttaaagagttgctccagtttgcctcctccggtgggaatgttgagttgctggtggccacgccgctggcaaacttaactgatagctccagacatcagctttccgcgttggcggcgatgccgggaggtcgcttacaagtgaaatccattgccactgcgcagctcatgcaaggaaaggggcgctggcttgcgcaggtgactcgcgaagggcaaagccaacagtgggccgcagacgacagcgctaccgttgcacctggtgaattatggggacaaagtgcgtcttcaccagtagtgacacttaaaggaacgtccggaaaaaccttctcgggtcagaccttaagtgcagaagatttactgcccgccttacccaccggggcggtgcgcatcaatctctgtgaacaactggacgggccgctggaaggttttggttcgcgtttctggtcgttagtcacgcaacagcacgctggctggaagcaggcatttacccgccacaaagagataacgcatgttgagtacagcgatcgttatcttaatagcccattcacggcgcgtttgttaggtgaaatcttaaccgagctggttgaacagggaatggcggaacgcgccagcctcactgtttgcgtcaaaaaattggattacaactctcgccaacacgacgctctctataacgcgtggcttaatgaggaagatcgtcagcaggttgtgaccactttacttgaagaaggatatctggggcctgcgtggccgggagcaattagctggttaacgggggataaccagagtacggagcatggacgagaactgacagtcaccttcagcgatggcagtcagcattatgtcctgctcgacatggggcttagctactggcgctgtattgaagataccttctttgattttgccctgcgagtaccgcagcaagttgaacggctggcaaacacgcgagcgcgagctgttgccccgggtaatgaccttaggagttatattatcgctggataa

SEQ ID NO: 28963 - DNA, 2937 bp, Escherichia coli EC1868; identical to SEQ ID NO: 28957

SEQ ID NO: 28964 - DNA, 6315 bp, Escherichia coli EC1869; identical to SEQ ID NO: 28540

SEQ ID NO: 28965 - DNA, 2937 bp, Escherichia coli EC1869; identical to SEQ ID NO: 28957

SEQ ID NO: 28966 - DNA, 6315 bp, Escherichia coli EC1870; identical to SEQ ID NO: 28540

SEQ ID NO: 28967 - DNA, 2937 bp, Escherichia coli EC1870; identical to SEQ ID NO: 28957

SEQ ID NO: 28968 - DNA, 6315 bp, Escherichia coli EC4013; identical to SEQ ID NO: 28636

SEQ ID NO: 28969 - DNA, 2937 bp, Escherichia coli EC4013; identical to SEQ ID NO: 28445

SEQ ID NO: 28970 - DNA, 6315 bp, Escherichia coli EC4196; identical to SEQ ID NO: 28636

SEQ ID NO: 28971 - DNA, 2937 bp, Escherichia coli EC4196; identical to SEQ ID NO: 28445

SEQ ID NO: 28972 - DNA, 6315 bp, Escherichia coli EC4203; identical to SEQ ID NO: 28636

SEQ ID NO: 28973 - DNA, 2937 bp, Escherichia coli EC4203; identical to SEQ ID NO: 28445

SEQ ID NO: 28974 - DNA, 6315 bp, Escherichia coli EC4402; identical to SEQ ID NO: 28636

SEQ ID NO: 28975 - DNA, 2937 bp, Escherichia coli EC4402; identical to SEQ ID NO: 28445

SEQ ID NO: 28976 - DNA, 6315 bp, Escherichia coli EC4421; identical to SEQ ID NO: 28464

SEQ ID NO: 28977 - DNA, 2937 bp, Escherichia coli EC4421; identical to SEQ ID NO: 28445

SEQ ID NO: 28978 - DNA, 6315 bp, Escherichia coli EC4422; identical to SEQ ID NO: 28464

SEQ ID NO: 28979 - DNA, 2937 bp, Escherichia coli EC4422; identical to SEQ ID NO: 28445

SEQ ID NO: 28980 - DNA, 6315 bp, Escherichia coli EC4436; identical to SEQ ID NO: 28540

SEQ ID NO: 28981 - DNA, 2937 bp, Escherichia coli EC4436; identical to SEQ ID NO: 28445

SEQ ID NO: 28982 - DNA, 6315 bp, Escherichia coli EC4437; identical to SEQ ID NO: 28540

SEQ ID NO: 28983 - DNA, 2937 bp, Escherichia coli EC4437; identical to SEQ ID NO: 28445

SEQ ID NO: 28984 - DNA, 6315 bp, Escherichia coli EC4439; identical to SEQ ID NO: 28636

SEQ ID NO: 28985 - DNA, 2937 bp, Escherichia coli EC4439; identical to SEQ ID NO: 28445

SEQ ID NO: 28986 - DNA, 6315 bp, Escherichia coli EC4448; identical to SEQ ID NO: 28636

SEQ ID NO: 28987 - DNA, 2937 bp, Escherichia coli EC4448; identical to SEQ ID NO: 28445

SEQ ID NO: 28988 - DNA, 6315 bp, Escherichia coli EC96038; identical to SEQ ID NO: 28644

SEQ ID NO: 28989 - DNA, 2937 bp, Escherichia coli EC96038; identical to SEQ ID NO: 28445

SEQ ID NO: 28990 - DNA, 6345 bp, Escherichia coli ECC-Z; identical to SEQ ID NO: 28616

SEQ ID NO: 28991 - DNA, 2205 bp, Escherichia coli ECC-Z
atgattgttgggagcattaaacttgatgacagtgaaattgccattggtgaggtgccgttaaccttcatcgttgatgcagatcaatggctgttacagggacaggcctcttgcagtgtgcgaagcagcgatgttctgattgtgctccctcgggataatagcaatgttgctggttttgatggccaatcgagggcagtaaacgtattaggactaaaagcactacctgtgaagggatgtcaggacgttacagttacagcaaatgaaacttatcggattcgcaccggaagagaacaaatcagcatcggaaggtttgctctaaatggaaagcgtgcaagctgggtttgtcatccagatgaaacatttattggtgtaccaaaagtcatttctacactaccggatattcaaagcattgatgtaacgcgttacctgagcggaatttcaattgagcaatgtcatatacaagagatgctgggggctcaatatctttctatccgtaatagtaagaatgaaacgctcttgcgtcgcaaaatcggtattttgcctgctgatttcagtattgagataaaaggtggaatacacgcaaatgaaggcactatcgtaatcaccacacagcatccttgtgtagcaaaacttaaagataaaacattggaggctacacgtaagcgtactgaggggcgaacagagatacaactcaaagcggaaggggtacctccggcatttattacattacaagttctgcctaatttggcggctgaccccatcgatattgagttaccttttcccgctaaaggctgtctcgctcttgatgtaaacggacgtcctctggataaaaacattacgctgcatgatctgctgggttccagagcgtttctgttctccagaaatggcgagccgacaagatatacattgcagttgcatttgcgctccgttagtggattacaggcatggcacgaatggtgttatacggcgttgagcgatcgtcctgttgaattgaatctctatagtctgcgcgaacatattgagaacctgatttcacttgaggcaggtattgaccaggttgttgagatgcgtattacgggggcgggtgtggtcatggcctggcaaattcgtcgctataaatacagtctgcgctatgattatgaaaaagaactattactcagccagtcagtgaaccatcgtgctggacagattccttcccccgttatcatgctgttaagtgaacccgagaggaaatccatccccttagcatcaagaatgagcgagggagtgcctgtcggtgaatatgagttgagctcaatcgttaacaaaaatggaccgtggttggttgtccctaaaccgggtgaagagatggcttttcgtccctgcttcattcgtggcgaatcttcgttaccggtagaagaaagcaacatccgctcattgcagaaagcgacccagctttttaatccacaggcagaagttaataccatcacactggttctcggacagatggctaacgatcctgcccattccggctggcaatttatgcgtagcctgtacgatcaatttggttatttaccactggcaacctttgaagtatggcgtgcactggtgcagcatccgcaggcattggcaatgtcgctcttcaaatttgaaatgtcagcagagtacctgagtcgtattgagaatgagttccctattctatgggagtttttccccatctttgagatcaaagcggcatctgagcgtttcaaattgttcctgagccaaaaaggtgcaccggaggaaacccagaaattactggttactaatatgtttcaacggctggggctcgtgttcccgacatatgccgatgaaattgagaaatggttaagtaacggacatctccccccgtctattcctgagtcttttgtccacgtgtggtatcaggagcttttacgtgagcatagtgaagctcaatggccagagtacggcagcaagcggctgcatagctggatggcatcacaaaaaaatccagtgattggtattaatcctgacgcaaatcaccgctattccgtggccttgttacccgtcttcgctgcagctgtggcaagcggaaatgcttcttttgaatctgtatttgaccgtaaacccggtgccgtatttttcctgaggcaagtcagggatttcgattcccgctggtttaaggccatcttccagtgcagcctgttgcgttatgttgctaaaaaataa

SEQ ID NO: 28992 - DNA, 5148 bp, Escherichia coli Envira 10/1
atgaagctggatgagatgacagagcggttaaacatactgacaaaacagcatcacagccagcatgaagtactgcgttggatcgacgtctgttcagggacccaacctaatgcaaaggatcccgcatttcttaaagtcagggcgcatatcttccagcgtaatacccagggaatatgggcttgtgtggataaagattgcaggttaaagcacggtacaccgctcgaaaaaggctggccctttggctatgtatatgtgaaccagcgacaaaattgcgattgtggaagccctgtttacgaagtggcgttctgtaatgattgtaatgaacctcatcttctggcgcgggacaaaaagggcaaactagtccagtgggaaaataaaggtggcgatgaattctctttgcaggatgaagtacctgttgaacatgacgctacagcggaaaaagtcgaaaaagagaacagtttccagcctccgttgattattgccgcaggagagaccagcgaggccggttataccctacaacgcctcgaccgccagacgcgccgtattggcgttattaacaatgacagcattccgctgattattaatgatgttgaacaggtttgtagtgccagtggctgtggctacagaggcatgagtgggaaacagcccttccggcgtgcactattaggtgggccattttacgttactaatatcgtgcccaccgttctagagtattgtcaggactttaccagtgatgaaggcaaagagggcgtcggaccagattcgttgccaggacgaggtcgtcgactcatcacctttacagacagtcgacaagggacagcccgaatggcggtgcgtatgcagcaagaagcagaacgcagtcgcttacgcggaagcgtagtcgaaattctcagctggcatcaaaggacgcaaacgtctacagcgccgaatgccaatgccgatctggaaaaattagcgaccagggcgaagcaagcccgtgagcaggcagaagaatatcgaagctggggaatgccagaccaggcgaaattgtcacaagcgcaggctgaacagcttgaacaggcttatcagtttgcaatcggcggaaaagcagcaaccaccctagtatcccgcacctggactgaaatggttaacgagcttaaagataaagccgatatccgtggcccggttctgaaatataactactatttgaagcctgaagtgtttaatgaaaacggcgggcctctaaagctttctgaaatgttgttgttccgggaattcatgcgtcgccctaaacggactaacagcctggaaacacaggggctggttcaggttggttacctgggactggagaaaatacataagctccctatgcactggcaggaaagggaattaacgctggatgactggcgcgattttctcaaggttacgttggatcattacgttcgcgagagcaacttcacacagctggatgatgagctgaaaaactggattggtagccgtttttcatcaaaattcgtccgtaacccggaatcaaaagatcctgaagataatcagaatagacgctggcctcaaattcgtaatggcaacgtatcccatcgtttagcgaagttactgatgctgggggctggattcaaaaccgtcaatacggcgactattgatattatcaatacatggctgaaagaagcatgggcccaacttaccggaccgcttgcagtactgaaacccgatggcaaccgtttttatttaccgaaagagcatatgactttttctttaatcacggatgcctggatttgcccggtaaccaataaaatcctggatacggcttttaaaggcttaaccccttatctgcctacccatatttcgttcgagcatcttacccaggcgcaatatgacacttttgtcgcgcagaaagtcaccatgccggaaatctggaagctggatcgttcacaggaagactacgcagagggtctggcaaaagcacgcgactgggtcagcaatgatccgctgatcgcacaattgcggtcagaaaacgtctggacagacatcaacgatcgtgtcgtggaaggcggtttctactatcgcactgccgagcactctgcccagcagtcgtcagaacgcctgcaaagctatgaaaagatgttcaagaacgggcaactaaatgttctcaactgttccaccaccatggaaatgggggttgatatcgggggcattacagcggtggtaatgaacaatgtaccgccacatcctgccaactatttacagcgcgccgggcgagccgggcgtagtaaagagtcgcgtgcgatctcttacaccctatgcaaaggtaacccacacgaccaacaggtttttgccaacccgctctggccgtttgaaaccatgatcccggcacccatggtcgcgatgaactccgcccgactggtacaacgtcacgtcaatgcattattactgtccgactttttatgtaacgttattggcgaaaccgataaagagaaaaccagcctcgatagcctctggtttttcggtgaagatgacgggcagtcaaaatgcgaacgctttaaaatctggctggaacgcccggttcttgatatcgacacggcgctggaacggctggtgaaaggtacggcgttgcatggtgcaagagctgaacatctgcgggataaaacaatcagcgcgatcaccttcctgcaacagcggtggctctccgtttatcgcgatctcgtgacccaggagcgtgagtcgcagccacaaacgccttatcgtaagcgcatagagctggagaagaaacgacactgtggagagtatctgctgcgcgatctggctgccagaactttcctgccgggatacggcttcccgacagatgtagtgacgtttgataacttcacaatggaagattatatccgcgaaaaattgcaaaaaagtcgtgataaaaaggaccgtgaagataacgtctcccgttataaaggattaccttcccgtaacctcggtgttgccattcgtgaatatgcaccgggagcagagatcattcttgatggccgtgtcttccgctctgccggtgtctcactgcactggcacaatattaatgctgataccaatgaagcccagcgtctggattgtgcctggcgctgtcacaaatgcgggaccattggctatgaagaggggatgagcagttccgggatgctcttttgctccaatagcgcctgcggcgaaaaaataatcatggataatcgccgtcaggtgttgcagcctgccgggtttgtcaccgatgcacacgctccggtaacgaacaatattgaaaccatgaaattcgtcccggttgtccccgcctgggtctttgttaaagcagagcccgtaccgttgcctaacccgctaatgggttatatggcttctggggctgatgggcatgttttccagcaaagtctgggggaaggtggacacggttatgcattgtgtctgagctgtggccgtgcggagtcgatgctgaatgaaaatgatgctccgaaaagtatggaagctcactatccaccgcgtccgggtaaagcggaccgcgacagccagaatcatcgtctgatttgcccaggttcgacggcactcatgaagaacgtcaccctgggcgcactggcgcgcaccgatgtctttgaaatggttctgcgcaaaccgcaaaaaggcgagtatctgccagataacacagaagaggggcggattgtcgctatgactctggcggttgctctgcgtcaggcgctagcgggcgttctgggtatctccggcgcagaactcggctattctgtacgcccggtcagactggaggatgggcaatcggtattagccgttcagctttatgatgtgatcagcggtggtgcaggttttgcctccagcgcaccggtacacattgaagctattttgcagggaatggtgaaacagttaggttgccgccattgtgatactgcatgtagtgaatgcctgcttgattcccagactcgccacgatcacgatttgctggatcgcaaagcggcgctggcctggcttggcgatgacttcacgtattacatcggtttaccggatgaagagacattctcgctgccggatgcccgctactgccctggcgctattggcgatacgattcgccgggcgattaacgaaggcgctgaaaagctcaccctgtggatgaccggcgcgcccaatgagtgggatttatacgcccgtcagttccgcgcggcggttcagagctatcggctaaaagacaacgtcgaggtcgatcttgttatacctgcgggagtggatgacccggatctgttgtatgaactatcgcaatttactgcgctgggtgtgcggctgtgccatgttgaacaggatctgcaattgccgatcgttgcccaggttacctttgccgatcgcgtgatgacgctggcttctcgcagccagcaggcaacgattccggggccggagtggcacctgaatgacgaactggtggtgcgtagtctcggttataaaacggtagaactgaacgagtttattctgccggctaaagccgccaacgctgtcgagcgggtcaaagacattcagatccacaaacagttgaatggaccactttcgcagtttggacaacgcttctgggacgtgctgtttaacgaccatgaagaagcacagtcactgatgaataacacgcgaattaccggcgttcactataccgatcgctatctgcaaaacccggttgcgctggcgttgttgggatcaattctgagaccgctaaaaacaaagctgaccgatgtcgctgaagtggcgctggatacgctgtttaaagataaagatcgccccggtaaccggcctttccatgactggatgagcatagcggattttcaggatttcgctgatcagtggtttgctgctgcgctgggcaggccgatagaactaacggtgttcgactcgccgcgcgatatccctcaccatcgtaaactgacggtgacttttgaggatggtcaggttttgaagatccgcttcgatcaggggatgggctactggcgtatcaactttgcatcgcaatggcattactttgacttccgcgatgacgtttctttccagttagtcaaaatggctcaggcctgcaatgaaggaaatgtggccaacagcgaagagagctgggcaacggatgtgctggtggaggtgagcgcctcctga

SEQ ID NO: 28993 - DNA, 576 bp, Escherichia coli Envira 10/1
atgttccatagtgaaaccaaccttgcaaatacggattaccgggaaaaccggtccatgatactgtccggtttatcactttgggagaaaggcagtccgctgcataaatctacgcaacaggttagaacccaaggcccgatacggcatgcggactgcaggcagagaaaactggccgattttctctgcactggagggataatacaagagatgctgggggctcaatatctttctatccgtaatagtaataatgaaacgctcttgcgtcgcaaaatcggtatcttgcctgctgatttcagtattgagataaaaggtggaatgcacgcaaatgaaggcactatcgtaatcaccacacagcatccttgtgtagcaaaacttaaagataaaacattggaggctacacgtaagcgtactgaggggcgaacagagatacaacttaaagcggaaggggtacctccggcatttattacattacaagttctgcctaatttggcggctgaccccatcgacattgagttaccttttcccgctaaaggctgtctcgctcttgatgtaaacggacgtcctctggataaaaactga

SEQ ID NO: 28994 - DNA, 5148 bp, Escherichia coli Envira 8/11; identical to SEQ ID NO: 28992

SEQ ID NO: 28995 - DNA, 1332 bp, Escherichia coli Envira 8/11
atgatactgtccggtttatcactttgggagaaaggcagtccgctgcataaatctacgcaacaggttagaacccaaggcccgatacggcatgcggactgcaggcagagaaaactggccgattttctctgcactggagggataatacaagagatgctgggggctcaatatctttctatccgtaatagtaataatgaaacgctcttgcgtcgcaaaatcggtatcttgcctgctgatttcagtattgagataaaaggtggaatgcacgcaaatgaaggcactatcgtaatcaccacacagcatccttgtgtagcaaaacttaaagataaaacattggaggctacacgtaagcgtactgaggggcgaacagagatacaacttaaagcggaaggggtacctccggcatttattacattacaagttctgcctaatttggcggctgaccccatcgacattgagttaccttttcccgctaaaggctgtctcgctcttgatgtaaacggacgtcctctggataaaaacattacgctgcatgatctgctgggttccagagcgtttctgttctccagaaatggtgagccgacaaaatatacattgcagttgtatttgcgctccgttagtggattacaggcatggcatgaatggtgttatacggcgttgagcgatcgtcctgttgaattgaatctctatagtctgcgcgaacatattgagaacctgatttcacttgaggcaggtattgatcaggttgttgagatgcgtattacgggggcaggtgtggtcatggcctggcaaattcgtcgctataaatacagcctgcgctatgattatgaaaaagaactattactcagccagtcagtgaaccatcgtgctgggcagattccttcccccgttatcatgctgttaagtgaacccgagaggaaatccattcccttagcatctagaatgagcgagggagtgcctgtcggtgaatatgagttgagctcaatcgttaacaaaaatggaccgtggttggttgtccctaaaccgggtgaagagatggcttttcgtccctgcttcattcgtggcgaatcttcgttaccggtagaagaaagcaacatccgctcattgcagaaagcgacccagctttttaatccacaggcagaagttaataccatcacacgggttctcggacagatggctaacgatcctgcccattccggctggcaatttatgcgtagcctgtacgatcaattcgggtatttaccactggcaacctttgaagtatggcgtgcactggtgcagcatccgcaggcattggcaatgtcgctcttcaaatttgaaatgtcagcagagtga

SEQ ID NO: 28996 - DNA, 6315 bp, Escherichia coli FDA504; identical to SEQ ID NO: 28464

SEQ ID NO: 28997 - DNA, 2937 bp, Escherichia coli FDA504; identical to SEQ ID NO: 28445

SEQ ID NO: 28998 - DNA, 6315 bp, Escherichia coli FDA505; identical to SEQ ID NO: 28464

SEQ ID NO: 28999 - DNA, 2937 bp, Escherichia coli FDA505; identical to SEQ ID NO: 28445

SEQ ID NO: 29000 - DNA, 6315 bp, Escherichia coli FDA506; identical to SEQ ID NO: 28464

SEQ ID NO: 29001 - DNA, 2937 bp, Escherichia coli FDA506; identical to SEQ ID NO: 28445

SEQ ID NO: 29002 - DNA, 6315 bp, Escherichia coli FDA507; identical to SEQ ID NO: 28464

SEQ ID NO: 29003 - DNA, 2937 bp, Escherichia coli FDA507; identical to SEQ ID NO: 28445

SEQ ID NO: 29004 - DNA, 6315 bp, Escherichia coli FDA517; identical to SEQ ID NO: 28464

SEQ ID NO: 29005 - DNA, 2937 bp, Escherichia coli FDA517; identical to SEQ ID NO: 28445

SEQ ID NO: 29006 - DNA, 6315 bp, Escherichia coli FRIK1985; identical to SEQ ID NO: 28464

SEQ ID NO: 29007 - DNA, 2937 bp, Escherichia coli FRIK1985; identical to SEQ ID NO: 28445

SEQ ID NO: 29008 - DNA, 6315 bp, Escherichia coli FRIK1997; identical to SEQ ID NO: 28464

SEQ ID NO: 29009 - DNA, 2937 bp, Escherichia coli FRIK1997; identical to SEQ ID NO: 28445

SEQ ID NO: 29010 - DNA, 6315 bp, Escherichia coli FRIK523; identical to SEQ ID NO: 28464

SEQ ID NO: 29011 - DNA, 2937 bp, Escherichia coli FRIK523; identical to SEQ ID NO: 28445

SEQ ID NO: 29012 - DNA, 6345 bp, Escherichia coli FVEC1302; identical to SEQ ID NO: 28560

SEQ ID NO: 29013 - DNA, 1743 bp, Escherichia coli FVEC1302
atgctgggggctcaatatctttctatccgtaatagtaagaatgaaacgctcttgcgtcgcaaaatcggtattttgcctgctgatttcagtattgagataaaaggtggaatacacgcaaatgaaggcactatcgtaatcaccacacagcatccttgtgtagcaaaacttaaagataaaacattggaggctacacgtaagcgtactgaggggcgaacagagatacaactcaaagcggaaggggtacctccggcatttattacattacaagttctgcctaatttggcggctgaccccatcgatattgagttaccttttcccgctaaaggctgtctcgctcttgatgtaaacggacgtcctctggataaaaacattacgctgcatgatctgctgggttccagagcgtttctgttctccagaaatggcgagccgacaagatatacattgcagttgcatttgcgctccgttagtggattacaggcatggcacgaatggtgttatacggcgttgagcgatcgtcctgttgaattgaatctctatagtctgcgcgaacatattgagaacctgatttcacttgaggcaggtattgaccaggttgttgagatgcgtattacgggggcgggtgtggtcatggcctggcaaattcgtcgctataaatacagtctgcgctatgattatgaaaaagaactattactcagccagtcagtgaaccatcgtgctggacagattccttcccccgttatcatgctgttaagtgaacccgagaggaaatccatccccttagcatcaagaatgagcgagggagtgcctgtcggtgaatatgagttgagctcaatcgttaacaaaaatggaccgtggttggttgtccctaaaccgggtgaagagatggcttttcgtccctgcttcattcgtggcgaatcttcgttaccggtagaagaaagcaacatccgctcattgcagaaagcgacccagctttttaatccacaggcagaagttaataccatcacactggttctcggacagatggctaacgatcctgcccattccggctggcaatttatgcgtagcctgtacgatcaatttggttatttaccactggcaacctttgaagtatggcgtgcactggtgcagcatccgcaggcattggcaatgtcgctcttcaaatttgaaatgtcagcagagtacctgagtcgtattgagaatgagttccctattctatgggagtttttccccatctttgagatcaaagcggcatctgagcgtttcaaattgttcctgagccaaaaaggtgcaccggaggaaacccagaaattactggttactaatatgtttcaacggctggggctcgtgttcccgacatatgccgatgaaattgagaaatggttaagtaacggacatctccccccgtctattcctgagtcttttgtccacgtgtggtatcaggagcttttacgtgagcatagtgaagctcaatggccagagtacggcagcaagcggctgcatagctggatggcatcacaaaaaaatccagtgattggtattaatcctgacgcaaatcaccgctattccgtggccttgttacccgtcttcgctgcagctgtggcaagcggaaatgcttcttttgaatctgtatttgaccgtaaacccggtgccgtatttttcctgaggcaagtcagggatttcgattcccgctggtttaaggccatcttccagtgcagcctgttgcgttatgttgctaaaaaataa

SEQ ID NO: 29014 - DNA, 6345 bp, Escherichia coli FVEC1412; identical to SEQ ID NO: 28560

SEQ ID NO: 29015 - DNA, 1743 bp, Escherichia coli FVEC1412; identical to SEQ ID NO: 29013

SEQ ID NO: 29016 - DNA, 6345 bp, Escherichia coli HVH 10 (4-6832164); identical to SEQ ID NO: 28560

SEQ ID NO: 29017 - DNA, 3291 bp, Escherichia coli HVH 10 (4-6832164); identical to SEQ ID NO: 28561

SEQ ID NO: 29018 - DNA, 6345 bp, Escherichia coli HVH 106 (4-6881831); identical to SEQ ID NO: 28560

SEQ ID NO: 29019 - DNA, 3291 bp, Escherichia coli HVH 106 (4-6881831); identical to SEQ ID NO: 28561

SEQ ID NO: 29020 - DNA, 3909 bp, Escherichia coli HVH 110 (4-6978754)
atgactacacgctatttttcgtcacttattgaacaatcgttgtctcgttcaactgaagcaacgctcagtatcatgggcgttaccaacccgcagctgcgtgaacatctcgcgcaacaaatgggggctgattgtgggaaaccgggctcattccttgcttctccggtattccagcaaatgtttggctggaaggagtcaaaccacacgatgcgcagcctgacggaaggcaacgcattgttgagcaaagcagtggttgattcactggatgatcagaataatggccggtaccggtttggtgctgactggaggccttttacgcaccagttagccagttggaaagctttgctggaaaagaaacattcagtggtggtaaccagtggtacgggttcaggtaaaacggaatgttttatggtaccggtgctggaagatctttaccgggaactgcatgaaaatggcaacaatccgttggtcggtgtccgagccctttttctctatccattgaacgccctgattaattcacagcgcgagcgtctggatgcctggacgcgtggttttggtacagggatccgctactgcctttacaacggcaacaccgaaaacctacacgcttcggtaaaaagcgaacaggcaaaaaggccgaatgaggtgctctcgcgcgaaaaaatgcgtgaagaacctgcgccgattctggtgaccaacggcacgatgctggaatatatgatggttcgccaggtcgacgccccgattatccagcaatctaaagcacaaaaatcactacgctggattgtactggatgaagcgcatacctatgtagggtcgcaggccgctgaactggcgctccagctgcgtcgtgtgatgaccgcgtttggcgtgacaccagatgacgtgcgctttgtcgcgacctctgcgaccattgccggcagcgacgctgaaaagcagctgaaaaaatttctctctgaattatccggtatcccgcaggagcgcatcgatgttctggacggaagtcgggtgattcctgaactggaaccatccaaaaacgtttctgttccgttagacgagatagagcaaatacctgatctggatctaagagataaaaatgataataaaattaaagggataagtcctgagcgcttttatgcgcttacgcattcccccgaagcgcgttacatacgtgagatgttggtcaaacagcccaatccgatgaagctggatgagataacagagcggttacacgtgctgacaaaacagcattacagccagcaggaagtactgcgttggatcgatgtctgttcagggactcaacctaatgcaaaggatcccgcatttcttaaagtcagggcgcatatcttccagcgtaatacccagggaatatgggcttgtgttgataaagattgcagattaaagcacggtacaccgctcgacaaaggctggccctttggctatgtgtatgtgaaccagcgacaaaattgtgactgtggaagccctgtatacgaagttgcattctgtaatgattgtaatgagcctcatcttctggcacgggacaaaaagggcaaactagtccagtgggaaaataaaggtggcgatgaattctctttgcaggatgaagtacctgttgaacatgacgctacagaagaaaaagtcgaaaaagagaacagttttcagcctccgttgattattgccgcaggagagaccagcgaggcaggttataccctacaacgcctcgaccgtcagacgcgccgtattggcgttattaacaatgacagcattccgctgattattaatgatattgaacaggtttgtagtgccagtggctgtggctacagaggcatgagtgggaaacagcccttccggcgtgcactattaggtgggccattttacgttactaatatcgtgcccaccgttctagagtattgtcaggactttaccagtgatgaaggcaaagagggcgtcggaccagattcgttgccaggacgaggtcgtcgactcatcacctttacagacagtcgacaagggacagcccgaatggcggtgcgtatgcagcaagaagcagaacgcagtcgcttacgcggaagcgtagtcgaaattctcagctggcatcaaaggacgcaaacgtctacagcgccgaatgccaatgccgatctggaaaaattagcggccagggcgaagcaagcccgtgagcaggcagaagaatatcgaagctggggaatgccagaccaggcgaaattgtcacaagcacaggctgaacagcttgaacaggcttatcaggctgcaaccggtgggaaagctgcgactatcctggtatcccgaacctggacggagatggttaacgagcttaaagagagagccgatatccgcgggccggttctgcaatataaccattatcttaagcctgaagtgtttaatgaaaacggcggcccccttaagctttctgaaatgttgttgttccgggaattcatgcgtcgccctaaacggactaacagcctggaaacacaggggctggttcaggttggttaccaggggctggagaaaatacataagagccccttgcactggcaggaaaaaggattaacgctggatgactggcgcgattttctcaaggttacgttggatcattacgttcgcgagagcaacttcacacagctggatgatgagctgaaaaactggattggtagccgtttttcatcaaaattcgtccgtaacccggaatcaaaagatcctgaagataatcagaacagacgctggcctcaaattcgtaatggcaacgtatcccatcgtttagcgaagttgctgatgctgggggctggattcaaaaccgtcaatgcggcaactattgatattatcaatacatggctgaaagaagcatgggcccaacttaccggaccgcttgcagtactgaaacccgatggcaaccgtttttatttaccgaaagagcatatgactttttctttaatcacggatgcctggatttgcccggtaaccaataaaatcctggatacggcttttaaaggcttaaccccttatctgcctacccatatttcgttcgagcatcttaccctggcgcaatatgacacttttgtcgcgcagaaagtcacaatgccggaaatctggaagctggatcgttcacaggaagactacgcagagggtctggcaaaagcacgcgactgggtcagccatgatccgctgatcgcacaattgcggtcggaaaacgtctggacagacattaacgatcgtgtcgtggaaggcggcttctactatcgtactgccgagcactctgcccagcagtcgtcagaacgtctgcaaagctatgaaaagatgttcaagaatgggcaactaaatgttctcaactgttccaccaccatggaaatgggggttgatatcgggggtattactgcggtggtaatgaacaacgtaccgccacatccggccaactatttacagcgcgccgggcgagccgggcgtagtaaagaatcacgcgcgatctcttacaccctatgtaaaggtaacccacacgaccagcaggtttttgccaacccgctctggccatttgaaaccatgatcccggcacccatggtcgcgatgaactccgcccgactggtgcaacgtcacgtcaatgcattattactgtccgactttttatgtaacgttattggcgaaaccgataaagaaaaaaccagcctcgatagcctctggtttttcggtgaagatgacgggcagtcaaaatgcgaacgctttaaaatctggctggaacgtccggttcttgatatcgacacggcgctggaacggctggtgaaaggtacggcgttgcatggtgcaagagccgaatatctgcgggataaaacaatcaacgcgatcaccttcctgcaacaagcggtggctctccgtttatcgcgatctcgtgacacaggagcgtga

SEQ ID NO: 29021 - DNA, 3291 bp, Escherichia coli HVH 110 (4-6978754); identical to SEQ ID NO: 28561

SEQ ID NO: 29022 - DNA, 6345 bp, Escherichia coli HVH 113 (4-7535473); identical to SEQ ID NO: 28560

SEQ ID NO: 29023 - DNA, 3291 bp, Escherichia coli HVH 113 (4-7535473); identical to SEQ ID NO: 28561

SEQ ID NO: 29024 - DNA, 6345 bp, Escherichia coli HVH 119 (4-6879578); identical to SEQ ID NO: 28560

SEQ ID NO: 29025 - DNA, 3291 bp, Escherichia coli HVH 119 (4-6879578); identical to SEQ ID NO: 28561

SEQ ID NO: 29026 - DNA, 6345 bp, Escherichia coli HVH 122 (4-6851606); identical to SEQ ID NO: 28560

SEQ ID NO: 29027 - DNA, 3291 bp, Escherichia coli HVH 122 (4-6851606); identical to SEQ ID NO: 28561

SEQ ID NO: 29028 - DNA, 6345 bp, Escherichia coli HVH 130 (4-7036876); identical to SEQ ID NO: 28560

SEQ ID NO: 29029 - DNA, 3291 bp, Escherichia coli HVH 130 (4-7036876); identical to SEQ ID NO: 28561

SEQ ID NO: 29030 - DNA, 6345 bp, Escherichia coli HVH 134 (4-6073441); identical to SEQ ID NO: 28560

SEQ ID NO: 29031 - DNA, 3291 bp, Escherichia coli HVH 134 (4-6073441); identical to SEQ ID NO: 28561

SEQ ID NO: 29032 - DNA, 6345 bp, Escherichia coli HVH 135 (4-4449320); identical to SEQ ID NO: 28560

SEQ ID NO: 29033 - DNA, 3291 bp, Escherichia coli HVH 135 (4-4449320); identical to SEQ ID NO: 28561

SEQ ID NO: 29034 - DNA, 6315 bp, Escherichia coli HVH 136 (4-5970458); identical to SEQ ID NO: 28574

SEQ ID NO: 29035 - DNA, 3360 bp, Escherichia coli HVH 136 (4-5970458); identical to SEQ ID NO: 28647

SEQ ID NO: 29036 - DNA, 6345 bp, Escherichia coli HVH 140 (4-5894387); identical to SEQ ID NO: 28560

SEQ ID NO: 29037 - DNA, 3291 bp, Escherichia coli HVH 140 (4-5894387); identical to SEQ ID NO: 28561

SEQ ID NO: 29038 - DNA, 6345 bp, Escherichia coli HVH 145 (4-5672112); identical to SEQ ID NO: 28560

SEQ ID NO: 29039 - DNA, 3291 bp, Escherichia coli HVH 145 (4-5672112); identical to SEQ ID NO: 28561

SEQ ID NO: 29040 - DNA, 6345 bp, Escherichia coli HVH 150 (4-3258106); identical to SEQ ID NO: 28446

SEQ ID NO: 29041 - DNA, 3291 bp, Escherichia coli HVH 150 (4-3258106); identical to SEQ ID NO: 28447

SEQ ID NO: 29042 - DNA, 6345 bp, Escherichia coli HVH 151 (4-5755573); identical to SEQ ID NO: 28560

SEQ ID NO: 29043 - DNA, 3291 bp, Escherichia coli HVH 151 (4-5755573); identical to SEQ ID NO: 28561

SEQ ID NO: 29044 - DNA, 6345 bp, Escherichia coli HVH 155 (4-4509048); identical to SEQ ID NO: 28560

SEQ ID NO: 29045 - DNA, 3291 bp, Escherichia coli HVH 155 (4-4509048); identical to SEQ ID NO: 28561

SEQ ID NO: 29046 - DNA, 6345 bp, Escherichia coli HVH 163 (4-4697553); identical to SEQ ID NO: 28560

SEQ ID NO: 29047 - DNA, 3291 bp, Escherichia coli HVH 163 (4-4697553); identical to SEQ ID NO: 28561

SEQ ID NO: 29048 - DNA, 6345 bp, Escherichia coli HVH 167 (4-6073565); identical to SEQ ID NO: 28560

SEQ ID NO: 29049 - DNA, 3291 bp, Escherichia coli HVH 167 (4-6073565); identical to SEQ ID NO: 28561

SEQ ID NO: 29050 - DNA, 6345 bp, Escherichia coli HVH 173 (3-9175482); identical to SEQ ID NO: 28560

SEQ ID NO: 29051 - DNA, 3291 bp, Escherichia coli HVH 173 (3-9175482); identical to SEQ ID NO: 28561

SEQ ID NO: 29052 - DNA, 6315 bp, Escherichia coli HVH 182 (4-0985554); identical to SEQ ID NO: 28574

SEQ ID NO: 29053 - DNA, 3360 bp, Escherichia coli HVH 182 (4-0985554); identical to SEQ ID NO: 28647

SEQ ID NO: 29054 - DNA, 6345 bp, Escherichia coli HVH 183 (4-3205932); identical to SEQ ID NO: 28560

SEQ ID NO: 29055 - DNA, 3291 bp, Escherichia coli HVH 183 (4-3205932); identical to SEQ ID NO: 28561

SEQ ID NO: 29056 - DNA, 6315 bp, Escherichia coli HVH 193 (4-3331423)
atggacgttcagcaactgcattatgcgccacttctaaatcagcttcatcagcgcgcggtgaggtcggtggtaagtcagttggcattgcggagcaagtcgttgactcattatctggaatcacaatatttccagcctcccggtcaggaggggtcactgcttgcagacccggtattcgaaagcacgttcggctggatgcctgcggatgaaacaatggaggatttgcgggacaagctaatttccagcccgctggttgatgcattgagcaaagcgccggtgccatttcgtcatcaacttacggcgtggcgaacgattctggaagacaaaaaatccttgttagtgagcagcggtacgggatccgggaaaacagaatgctttatggtaccggttctggaagatcttattcgtcagcaaaaatcgacccgtcagtcactaacagggacacaagctattttcttgtatccgttaaatgcattaattaacagccaacaggagcggcttcgcgaatggacgcgcggatttaaggggaaaatacgcttcgcgctatataatggcgaaacccggcataccaaatacgaagttcaggaagatcagttgaaagtacctgaacaagctttgagtcgggaagccatttacgaagcaccaccttccatcatggtgacgaataccaccatgctggaatatatgctgattcgtcgtaaagatgccccaatcatcgaaaagtctcaggggatgttaaagtatatcgtcctggatgaagcccatagttatattggttctcaggctgctgagttagcgctgcttttacgtcgtgttatgcaggctttcaatgttggacctggcacagataaacctgtgcagattatcgcgacctctgccactattggtgaagactctcctgaaggtaataaggagcttgctaaatttgtcgctgatctcgcgggcgttacagaacgtgatgtcaaagtggttcgcggctatcgacaaataccgcaggtatcggagtcgctgattcgtcatgaataccccacatctttaacttctcttaaatctctgagccctcaggatctttaccaacagctttgtcattaccgtgtggcccagcaattgcgtcaagcgttaactcatcccggacggcaggcagtacgtttgagtgagttgctcaatgttgccagaagaacctggccagatattaatcatcgtgagttactgcaactcctcgacctaatggcgagatcgcgagaaggtgaactggcttttacgccattacgtatgcatgggtttatcagaacactggcgggtctatgggcatgttcaaacaaacaatgctcacataaagcgcatgaattaaatcagagtgactggccatttggtcaggtatggtttgagcagcgccaatattgtgactgtggtgcgccggtatttgaagttttacgttgctccgggtgtggttcagcttatttgtctgccaaagaggaggtgcgcggtgatggaacgaactggttggtagcgcaacccgccgctgccgaagtggatgaatttgctcttgatgtagatgtttattctgaagatgaagacaacgacgaattagacaataactctcaatttgatcgtctgattgcgatcgatggtgaaaaatatatcatttctctggaagaaacgacggcggggaaaattgatagtgaagcgcaaaagcactatgaaataaacctgttaagaccggaatctcgaggtgagggacgtaataattcctttgcttgtgtttgctgtggtgacacccaacgaaaaaataatcctttattccgtccgcttcgacttggcgcgcccttttttttaaatgaaattattcctactctgctggagttttcaccattaccgcagacaagagaagagcagttaggaccgtttaatggtcgacgtctgctcacctttacggattcacgtcagggcactgcccgcatttctgcccgcttacagcaggatgccgataaagcgacgttgcgagctctttgttaccaggagttggccaatattaatgagccgtcagcaaagcttagcccggcacactgcgcattgttagagagttttattacccagttttctatccttcctttaaaaaactctattgacgcgctgaaaaaagcgatggttgctaatgaagagcttagcccggcggacattcaggcacttaaaattatcgagccgatggtgagttccttaagcccggatcatgctgaagcgatgcaaatactccaggctaactctggcaatcagcagaagaaaaccatgtcatggcaaacactgtctgaacagctggttggcagtgtggaccttgccgatagaatgagaggcagttttaaagaattgtctgggcttgatcttactaaacaacagtttgcagatttttgtttatacagtgagtttggtcgccgccctaaaaatgcctggaccctcgaaagtctgggtctggtagccattcactatccatttattgataaagttacaacctgcccgcaggactggaagacattattacccgatcccgataagcaattagcggaatggcgtaatttattgaagattactcttgatttctttatacgtgaaaacagtgccgttttttacgaaaacgagcaataccctcgctggatgggggctcgtttcccggtaaaaatgctccagggtccagataaaaaaaacaaagggcagaaacgtgatcaactttggccacaaatacgcgatcgccattataaccgggtcattaagctattaattgcagtctttccggcaatacaacctgagcaggctcactggaaatcgttagttaaccacttaatgattgaggtctgggatgcaattcgaccctgcttacgtcagtttgagtcgggttatcagctggatattaaacaacaagctgaattttacagtccaaagcaagtgtggcgttgcccctatactcgacgtgcgttagacgtcacgttactgggatactctccgtatttgccgggtagcaaagaaattgcacctgaaaaagcagtgttgattgaaatgcctgagcttcctgtacgtcactggcgtttgtctggtggtggagaaatcgcccgagaagaacgtctggagtggctggaaagtaatgcgctgattcaacatgcccgcgaggaaggattatggtctactcgctgcgaccgactggccctgaaagatagctggtatcgtctggaggaacactctgcgcagagaacgcctgagcagaaccagtttaatgaaaaacaatttaagtcaggcaaagttaatgtgctgaactgctccacgaccatggagatgggggtggacattggtggtatgagtttggtggcaatgaacaacgttcctccagctccggcaaattatttgcagcgtgcaggccgcgcgggtcgacgtggagagagtgcatctgctgccattacgttatgtaaaaacacggcgcatggaatggaggtattcaaagaccccctctgggcgttcaacactactgccagtgcgccacgggttcgttttgggagcagcagtattgttcaacgacatgttaatgccctggttttaggtctgtttttacgagctgaagttcctgatgcgacaaaactgagttgcaaatggttctttgaaggtgatgagagccagtgtcttcgttttctccattggttaaataaccaggccgatcagctggcggataaacttaaacgccttactcagggaaccgtcctgatgtcattgacggcaacccagctcttgacccgcacacaagcaatgatgcagcaggttgatatccgctggagaagccaacttgcgatactgttggaaaatatcgaagcgttgaaggcggataacagcgcgtgggaagaaacgccagcaggtaaagccatcgcttatcagcttcgtgattatcgcggtgcatatctgttttctaaactcattagtgaagcgttcctgccggggcatggtttcccggttggcgtcgtcaatttcaattatctgacggcagatgagctggaaaaacgtcgcgcaataaaagccactcaggctgaccctaatgaagggggagaaagcttttctcgtcgtattgaaaaattgcccagccgtgatttgcctacagcattacgcgagtatgctccaggtgcagatgtggtattgggcggaaaagtatatcgttcctcgggcattatgcttggcaaggtacttgccagcgggcaggagctgtcaggcgatcatcatattccgtggttctggcattgtcgtaaatgtggtgcgggggcaaccagtactacccgtcctgtcgaatgtagtcactgcaaagcggatatacagcaacttgatgtgaagcgttatttacagcctgttggttttgcgacagatatccgttatcaggcgcataatgatgtatccatgcctgcacaacttccctggaaagatccacgtgttcttgtaccgtcttcggtgtgggtttctttacccgatgctgggctaggacgttaccgttttagccatagtggggaattgttccacttcagtgaaggggaatttgggcacggctacgcaatttgcctctcatgtggtcgggcagaatctcaaaatcaaccccagcgtacccctgaaaatcttaagaacccagagagggaaaatacgcattacctgttgcgagggggcagtaacgatcgtcaggggagcaataaattgtgccacggtcatgtgcataaagatctgtggttggggtatagcagtcgtacagatatggttgagctgcaactcaatgatgataatggcctgttgatccgtgatgaggttgccgcgcgatcccttgcggtcgctttgcgtgaagggttagcgcataaattgggtatcgaaaatactgagctgggcgtgacgacgcagcaagcgcgcgatatcaatggctataccggatattccatcttcatttacgacaataatgcgggtggtgcaggttatgcagtgcaattgatcgaccattgggctgatgtctttaattacgccagaaaattgctcgattgcagttgcgataaattctgtcaccactgcttgctcagctacgacagtcagcattatgtcaacagattagatcgtcaccatgcattaaccctgcttaccaatgtacggttgcagcgacttaacctcgcgccagaatatcagtacttcggcgatggtagccgggttgaaactaacccgctgagtttacgtattgcgcaatgcctgaacagcgagatttatgactcctgctcgctggttcttgcggggccgcaggaacagtgggattttgcccaatggccattatttaaagagttgctccagtttgcctcctccggtgggcatgttgagttgctggtggccacgccgttggcaaacttaactgatagctccagacatcagctttccgcgttggcggcgatgccgggaggacgcttacaagtgaaatccattgccactgcgcaactcatgcaaggaaagggacgctggcttgcgcaggtgactcgcgaagggcaaagccaacagtgggccgcagacgacagcgctaccgttgcacctggtgaattatggggacaaagtgcgtcttcaccagtagtgacacttaaaggaacgtccggaaaaaccttcttgggtcagatcttaagtgcagaagatttactgcccgccttacccaccggggcggtgcgcatcaatctctgcgaacaactggacgggccgctggaaggttttggttcgcgtttctggtcgttagtcacgcaacagcacgctggctggaagcaggcatttacccgccacaaagagataacgcatgttgagtacagcgatcgttatcttaatagcccattcacggcgcgtttgttaggtgaaatcttaaccgagctggttggacagggaatggcggaacgcgccagcctcactgtttgcgtcaaaaaattggattacaactctcgccaacacgacgctctctataacgcgtggcttaatgaggaagatcgtcagcaggttgtgaccactttacttgaagaaggatatctggggccagcgtggccgggagcaattagctggttaacgggggataaccagagtacggagcatggacgagaactgacagtcaccttcagcgatggcagtcagcattatgtcctgctcgacatggggcttagctactggcgctgtattgaagataccttctttgattttgccctgcgagtaccgcagcaagttgaacggctggcaaacacgcgagcgcgagctgttgccccgggtaatgaccttaggagttatattatcgctggataa

SEQ ID NO: 29057 - DNA, 3360 bp, Escherichia coli HVH 193 (4-3331423)
ttgcttgtgaaaactccagttaacccacttttgcaatggcttaacatgttttttagtcgccgttcattatccggagctgatggacgggcgttatatgcttaccgttgtactgatacagagtacgaaagtttggcagaactactgcgtacatatgccccccgtagttatccaagaacgatattcatttcctatagcgatgttctatttagcatatatgccgcagagtttatccgccggactcatacggtcggacaccctaaatgggacacaattttagattctattgactggaaagttccgtatgttcatcgacagaagctggttaatgatggcattcgctactggaaaagaaagataagaaacctggggcaagcttcgggttatctgcatacactggcttgtgaaggtggtttacctatccgcatgattgaaaatgagagcggttatttgattacctatttcagaaggatatatcaggcgcttcgtgggcaagcatctcaatatcctgccgctaaaattgcacaagaattaggcgatacgattcctgtcacaatgcaaaacgaactggtctatgaaatagcaggtgaattctgcgagactctctgccgattacttagtgagcatccacctcaaagcagtgatcccgtttctgcattacgtaagctctctccagactggcatcttcaacttccactcgttctccccgaagcgaatgctgcagagattgtaaggcgattactttctcaatcttctgaaatacgcagtgcaagtagtcttcaggttgaaagaatctgggtcgatgttgatgacagttggtattgtgatgcccggttccgattcccggccacaatgcgtacagaacagttaacctctttgtttgaatgcaatattcagccggagcagacccgactcatcatttcaggaaaatggagaaatggcggggcaaggttggcaatgctaagccgttatgagcagcaagattggcgggtcgagttattacctattgctatgcaaaagctctctggtgcagatgcaatggccgaaatctcgttgtcgcttcatgaaggtccaattctgttaggccacacaattccaaaaggcggttatgaacttactgaagaactcccctgggtttttgaagcgatgaatgagagtgaatcgcagctaaaacttgtcggtatggggtctgtgagttccaggctaaatgctctgtttatttcgctaccgaaaaatagccatttagatattagtggagaaggtgagtttgatatcccaaggttgctgaaaaacagtgaacgcagcttaactaaaataagtggagtatttagcgttgttttacatgatggtgcagtttgtacaattcgcacccagcaactttatgattctgcgattgaatattatattaaatcgacagaagttgaactggttaaatcggattatcctgtccatcgagcctggccgaagatcggttggaaaaaggatctgcaatatggcattgttccggagaaagaacttttttggcgttccattcgttcaggtaacaatgcttggtattctgtcgcatcagaaatgccaaaaggacagatagaagtcagacgaatagttaatgatgaggttttatttagcggtaaagttgtagttttaccagcagacttcgatattaatattatacctgagagtgctcagcaaggcatcataatgctttctggtataacggatactagaattgacaaatattcaaacaatgaaaaagtaacacttaagtccgattattcacaaaacgagtgtgctatttattataattcatcggagatgctggaaaataccgttgatttacgggtctcctggaaagatggttctaatcttaaactattattacctaagccggttagcggtggccgatttgtaactcatgatggttctgttcattttgatggtgtggcatctatagcgcatttgcatggaatagatgctgagttgttaaccatatcttgtgctggaagaggatatcttaatatcgagttgttggatgaaaatccagtagctgaaaaattccgttatttacatgccgaccttcctcttttatcaggatgcaatgacaaattaaaaaaaatttcactttatgagaactataatttgctaaatgctatgctggcatgtgcatggaacagcaatagtacattatgtgttgatttttactctgacagatttggaaaggataaagcaacactcagtattaaacgctacgatggtagttttattgaacacgatcaagggttactggttgatataaaaaattctgttgtttttcctgcaaatagaatagacgagctggttgttgatgctatttctcttaaggatcctggcttacacatatcgttgctaaaaaaagatgaatttgcttatgatctttcagctctgaatgttcaggatagcccatggttaattgtggggaaacttgatggtacagctcgcattgcaccagtaattaaatgggggctacctgtattacagacaaatgatttattacttaatgctctatgcgaagcggattccgaacagcgaaaaaaatattttaatgagctaatttttgaaatagataacaatcctttgcaaaattattgctgtttattaacggagtatattaagaaatacaaaatgaataatggcttatccttgctggatctggatttgttcagaggtatttcgagtaattaccgcgtagttgttcagttgttaatatcatcatgtctttctggtgatagcgatacgatttatgatatacaggaagaattacccttttcatggggatggattcccgtttcaatctggaaagatgtttttcaaaagtgttgggcttatctggaaaaacagattaacgataaaacattagcattacatatattgcaaccctttattgcttttatgaaccatcgtgcacatatcgatcgtcgtctggctcccattgcgaatatgttacttacatatagcgaactcctaccagtcggttgtaatgtcttgccaactgttagtcgtgagcagtttaatgaagctaaacagatgctattaaggaaccccgacagctttgggcgtatcagtatcttccctaaagaactttggtctagtgctattactccagagttaaaatctgtttttaataagctttggattaaaaataaatatcactcacggcttgaaaaacgttttaatttgatgttagtcgcagcgctgttaacccaaaaagataataacttgatacatcaactgtctgcgctttttgaattccactatcagcaagccccgcagcaattaggggtaatctatcaatattattttgaacaagcaggagtatgtcattga

SEQ ID NO: 29058 - DNA, 6345 bp, Escherichia coli HVH 197 (4-4466217)
atgactacacgctatttttcgtcacttattgaacaatcgttgtctcgttcaactgaagcaacgctcagtatcatgggcgttaccaacccgcagctgcgtgaacatctcgcgcaacaaatgggggctgattgtgggaaaccgggctcattccttgcttctccggtattccagcaaatgtttggctggaaggagtcaaaccacacgatgcgcagcctgacggaaggcaacgcattgttgagcaaagcagtggttgattcactggatgatcagaataatggccggtaccggtttggtgctgactggaggccttttacgcaccagttagccagttggaaagctttgctggaaaagaaacattcagtggttgtaaccagtggtacgggttcaggtaaaacggaatgttttatggtaccggtgctggaagatctttaccgggaactgcatgaaaatggcaacaatccgttggtcggtgtccgagccctttttctctatccattgaacgccctgattaattcacagcgcgagcgtctggatgcctggacgcgtggttttggtacagggatccgctactgcctttacaacggcaacaccgaaaacctacacgcttcggtaaaaagcgaacaggcaaaaaggccgaatgaggtgctctcgcgcgaaaaaatgcgtgaagaacctgcgccgattctggtgaccaacggcacgatgctggaatatatgatggttcgccaggtcgacgccccgattatccagcaatctaaagcacaaaaatcactacgctggattgtactggatgaagcgcatacctatgtagggtcgcaggccgctgaactggcgctccagctgcgtcgtgtgatgaccgcgtttggcgtgacaccagatgacgtgcgctttgtcgcgacctctgcgaccattgccggcagcgacgctgaaaagcagctgaaaaaatttctctctgaattatccggtatcccgcaggagcgcatcgatgttctggacggaagtcgggtgattcctgaactggaaccatccaaaaacgtttctgttccgttagacgagatagagcaaatacctgatctggatctaagagataaaaatgataataaaattaaagggataagtcctgagcgcttttatgcgcttacgcattcccccgaagcgcgttacatacgtgagatgttggtcaaacagcccaatccgatgaagctggatgagataacagagcggttacacgtgctgacaaaacagcattacagccagcaggaagtactgcgttggatcgatgtctgttcagggactcaacctaatgcaaaggatcccgcatttcttaaagtcagggcgcatatcttccagcgtaatacccagggaatatgggcttgtgttgataaagattgcagattaaagcacggtacaccgctcgacaaaggctggccctttggctatgtgtatgtgaaccagcgacaaaattgtgactgtggaagccctgtatacgaagttgcattctgtaatgattgtaatgagcctcatcttctggcacgggacaaaaagggcaaactagtccagtgggaaaataaaggtggcgatgaattctctttgcaggatgaagtacctgttgaacatgacgctacagaagaaaaagtcgaaaaagagaacagttttcagcctccgttgattattgccgcaggagagaccagcgaggcaggttataccctacaacgcctcgaccgtcagacgcgccgtattggcgttattaacaatgacagcattccgctgattattaatgatattgaacaggtttgtagtgccagtggctgtggctacagaggcatgagtgggaaacagcccttccggcgtgcactattaggtgggccattttacgttactaatatcgtgcccaccgttctagagtattgtcaggactttaccagtgatgaaggcaaagagggcgtcggaccagattcgttgccaggacgaggtcgtcgactcatcacctttacagacagtcgacaagggacagcccgaatggcggtgcgtatgcagcaagaagcagaacgcagtcgcttacgcggaagcgtagtcgaaattctcagctggcatcaaaggacgcaaacgtctacagcgccgaatgccaatgccgatctggaaaaattagcggccagggcgaagcaagcccgtgagcaggcagaagaatatcgaagctggggaatgccagaccaggcgaaattgtcacaagcacaggctgaacagcttgaacaggcttatcaggctgcaaccggtgggaaagccgcgactatcctggtatcccgaacctggacggagatggttaacgagcttaaagagagagccgatatccgcgggccggttctgcaatataaccattatcttaagcctgaagtgtttaatgaaaacggcagcccccttaagctttctgaaatgttgttgttccgggaattcatgcgtcgccctaaacggactaacagcctggaaacacaggggctggttcaggttggttaccaggggctggagaaaatacataagagccccttgcactggcaggaaaaaggattaacgctggatgactggcgcgattttctcaaggttacgttggatcattacgttcgcgagagcaacttcacacagctggatgatgagctgaaaaactggattggtagccgtttttcatcaaaattcgtccgtaacccggaatcaaaagatcctgaagataatcagaacagacgctggcctcaaattcgtaatggcaacgtatcccatcgtttagcgaagttgctgatgctgggggctggattcaaaaccgtcaatgcggcaactattgatattatcaatacatggctgaaagaagcatgggcccaacttaccggaccgcttgcagtactgaaacccgatggcaaccgtttttatttaccgaaagagcatatgactttttctttaatcacggatgcctggatttgcccggtaaccaataaaatcctggatacggcttttaaaggcttaaccccttatctgcctacccatatttcgttcgagcatcttaccctggcgcaatatgacacttttgtcgcgcagaaagtcacaatgccggaaatctggaagctggatcgttcacaggaagactacgcagagggtctggcaaaagcacgcgactgggtcagccatgatccgctgatcgcacaattgcggtcggaaaacgtctggacagacattaacgatcgtgtcgtggaaagcggcttctactatcgtactgccgagcactctgcccagcagtcgtcagaacgtctgcaaagctatgaaaagatgttcaagaatgggcaactaaatgttctcaactgttccaccaccatgaaaatgggggttgatatcgggggtattactgcggtggtaatgaacaacgtaccgccacatccggccaactatttacagcgcgccgggcgagccgggcgtagtaaagaatcacgcgcgatctcttacaccctatgtaaaggtaacccacacgaccagcaggtttttgccaacccgctctggccatttgaaaccatgatcccggcacccatggtcgcgatgaactccgcccgactggtgcaacgtcacgtcaatgcattattactgtccgactttttatgtaacgttattggcgaaaccgataaagaaaaaaccagcctcgatagcctctggtttttcggtgaagatgacgggcagtcaaaatgcgaacgctttaaaatctggctggaacgtccggttcttgatatcgacacggcgctggaacggctggtgaaaggtacggcgttgcatggtgcaagagccgaatatctgcgggataaaacaatcaacgcgatcaccttcctgcaacagcggtggctctccgtttatcgcgatctcgtgacacaggagcgtgagtcgcagccgcaaacgccttatcgtaagcgcatagagctggagaagaaacggcactgtggcgagtatctgctgcgcgatctggctgccagaaccttcctgccgggatacggtttcccgacagatgtagtgacgtttgataacttcacgatggaagattatatccgcgaaaaatcgcagaaaagtcgtgataaaaaggaccgtgaagataacgtttcccgttataaaggattaccttcccgtaacctcggtgttgccattcgtgaatatgcaccgggagcagagatcatccttgatggccgtgtcttccgctctgccggtgtctcactgcactggcacaacattaatgctgataccaatgaagcccagcgtctggattgcgcctggcgctgtcacaaatgcgggaccattggctatgaagaggggatgagcagttccgggatgctcttttgctccaatagcgcctgcggcgaaaaaataatcatggataatcgccgtcaggtgctgcagcctgccgggtttgtcaccgatgcacacgctccggtaacgaacaatattgaaaccatgaaattcgtcccggttgtccccgcgtgggtctttgttaaagcagagcccgtaccgttgcctaacccgctaatgggttatatggcttctggggctgatgggcatgttttccagcaaagtttgggggaaggtggacacggttatgcattgtgtctgagctgtggccgtgctgagtcgatgctgaatgaaaatgatgcgccgaaaagtatggaagctcactatccaccgcgtccgggtaaagcggatcgcgacagccagaatcatcgtctgatttgccccggttcgacggcactcatgaagaatgtcaccctgggcgcactggcgcgtaccgatgtctttgaaatggttctgcgcaaaccgcaaaacggcgagtatctgccagataacacagaggaggggcggattgttgctatgactctggcggttgctctgcgtcaggcgctggcgggcgttctgggtatctccgccgcagaactcggctattctgtacgtccggtcagactggaggatgggcaatcggtattagccgtacagctttatgatgtgatcagcggtggtgcaggttttgcctccagcgcaccggtacacattgaagctatattgcagggaatggtgaaacagttaggctgccgccattgtgagactgcatgtagtgaatgcctgcttgattcccagactcgccacgatcacgatttgctggatcgcaaagcggcgctggcctggcttggcgatgacttcacgtattacatcggtttaccggatgaagagacattctcgctgccggatgcccgctactgccctggcgccattggcgatacgattcgccgggcgattaacgaaggcgctgaaaagctcaccctgtggatgaccggcgcgcccaatgagtgggatttatacgcacgtcagttccgcgcggcggttcagaactatcggctaaaagacaacgtcgaggtcgatcttgttattcctacgggagtggatgacccagacctgttgcatgaactatcgcaatttactgcgctgggtgtgcggctgtgccatgttgaacaggatctgcaattaccgatcgttgcccaggtcacctttaccgatcgcgtgatgacgctggcctctcgcagccagcaggcaacgattccggggccggagtggcacctgaatgacgaactggtggtgcgtagtctcggttataaaacggtagaactgaacgagtttattctgccggctaaagccaccaacgctgtcgagcgggtcaaagacattcagatccacaaacagttgaatggaccactgtcgcagtttgggcaacgcttctgggacgtgctgtttaacgaccatgaagaagcgcagtcactgatgaataacacgcgaattaccggcgttcactataccgatcgctatctgcaaaacccggttgcgctggcgttgttgggatcaattctgagaccgctaaaaacaaagctgaccgatggcgctgaagtgacgctggatacgctatttaaagataaagatcgccccggtaaccggcctttccatgactggatgagcatagcggattttcaggatttcgctgatcagtggtttgctgctgcgctgggcaggccggtagaactgacggtgttcgactcgccgcgcgatatccctcaccatcgtaaactgacggtgacttttgaggatggtcaggtattgaagatccgcttcgatcaggggatgggctactggcgcatcaacttttcatcgcaatggcattactttgatttccgcgatgacgtttctttccagttagtcaaaatggctcaggcctgcaaggaagggaatgtcgccaacagcgaagagagttgggcaacggatgtgctggtggaggtgatcgcctcctga

SEQ ID NO: 29059 - DNA, 3291 bp, Escherichia coli HVH 197 (4-4466217); identical to SEQ ID NO: 28561

SEQ ID NO: 29060 - DNA, 6345 bp, Escherichia coli HVH 206 (4-3128229); identical to SEQ ID NO: 28560

SEQ ID NO: 29061 - DNA, 2544 bp, Escherichia coli HVH 206 (4-3128229)
ttgaatggactgctatgcgcagcctctgtagaggctaagcctcgactacaaaaaaataagagtacgcgttgccaattctattggtcagaaaagcatccagatgagcttagggtgatagtatctcttccggacgaagtttcctttcctgtaacaagcgagccgtcaactacgcgctttgaacttgccatttgtgaagatggtgaggaagtctctggccttgggccagcctatgcttctctggaaaacagacaggcaacagttcgattacgtaaaagcgaagtgagatttggcaggcaaaatccatcggcaggtttgtcgttagtggctcgtgctggagggatgattgttgggagcattaaacttgatgacagtgaaattgccattggtgaggtgccgttaaccttcatcgttgatgcagatcaatggctgttacagggacaggcttcttgcagtgtgcgaagcagcgatgttctgattgtgctccctcgggataatagcaatgttgctggttttgatggccaatcgagggcagtaaacgtattaggactaaaagcactacctgtgaagggatgtcaggacgttacagttacagcaaatgaaacttatcggattcgcaccggaagagaacaaatcagcatcggaaggtttgctctaaatggaaagcgtgcaagctgggtttgtcatccagatgaaacatttattggtgtaccaaaagtcatttctacactaccggatattcaaagcattgatgtaacgcgttacctgagcggaatttcaattgagcaatgtcatatacaagagatgctgggggctcaatatctttctatccgtaatagtaagaatgaaacgctcttgcgtcgcaaaatcggtattttgcctgctgatttcagtattgagataaaaggtggaatacacgcaaatgaaggcactatcgtaatcaccacacagcatccttgtgtagcaaaacttaaagataaaacattggaggctacacgtaagcgtactgaggggcgaacagagatacaactcaaagcggaaggggtacctccggcatttattacattacaagttctgcctaatttggcggctgaccccatcgatattgagttaccttttcccgctaaaggctgtctcgctcttgatgtaaacggacgtcctctggataaaaacattacgctgcatgatctgctgggttccagagcgtttctgttctccagaaatggcgagccgacaagatatacattgcagttgcatttgcgctccgttagtggattacaggcatggcacgaatggtgttatacggcgttgagcgatcgtcctgttgaattgaatctctatagtctgcgcgaacatattgagaacctgatttcacttgaggcaggtattgaccaggttgttgagatgcgtattacgggggcgggtgtggtcatggcctggcaaattcgtcgctataaatacagtctgcgctatgattatgaaaaagaactattactcagccagtcagtgaaccatcgtgctggacagattccttcccccgttatcatgctgttaagtgaacccgagaggaaatccatccccttagcatcaagaatgagcgagggagtgcctgtcggtgaatatgagttgagctcaatcgttaacaaaaatggaccgtggttggttgtccctaaaccgggtgaagagatggcttttcgtccctgcttcattcgtggcgaatcttcgttaccggtagaagaaagcaacatccgctcattgcagaaagcgacccagctttttaatccacaggcagaagttaataccatcacactggttctcggacagatggctaacgatcctgcccattccggctggcaatttatgcgtagcctgtacgatcaatttggttatttaccactggcaacctttgaagtatggcgtgcactggtgcagcatccgcaggcattggcaatgtcgctcttcaaatttgaaatgtcagcagagtacctgagtcgtattgagaatgagttccctattctatgggagtttttccccatctttgagatcaaagcggcatctgagcgtttcaaattgttcctgagccaaaaaggtgcaccggaggaaacccagaaattactggttactaatatgtttcaacggctggggctcgtgttcccgacatatgccgatgaaattgagaaatggttaagtaacggacatctccccccgtctattcctgagtcttttgtccacgtgtggtatcaggagcttttacgtgagcatagtgaagctcaatggccagagtacggcagcaagcggctgcatagctggatggcatcacaaaaaaatccagtgattggtattaatcctgacgcaaatcaccgctattccgtggccttgttacccgtcttcgctgcagctgtggcaagcggaaatgcttcttttgaatctgtatttgaccgtaaacccggtgccgtatttttcctgaggcaagtcagggatttcgattcccgctggtttaaggccatcttccagtgcagcctgttgcgttatgttgctaaaaaataa

SEQ ID NO: 29062 - DNA, 6345 bp, Escherichia coli HVH 208 (4-3112292); identical to SEQ ID NO: 28560

SEQ ID NO: 29063 - DNA, 3291 bp, Escherichia coli HVH 208 (4-3112292); identical to SEQ ID NO: 28561

SEQ ID NO: 29064 - DNA, 6345 bp, Escherichia coli HVH 215 (4-3008371); identical to SEQ ID NO: 28560

SEQ ID NO: 29065 - DNA, 3291 bp, Escherichia coli HVH 215 (4-3008371); identical to SEQ ID NO: 28561

SEQ ID NO: 29066 - DNA, 6345 bp, Escherichia coli HVH 22 (4-2258986); identical to SEQ ID NO: 28560

SEQ ID NO: 29067 - DNA, 3291 bp, Escherichia coli HVH 22 (4-2258986); identical to SEQ ID NO: 28561

SEQ ID NO: 29068 - DNA, 6345 bp, Escherichia coli HVH 223 (4-2976528); identical to SEQ ID NO: 28560

SEQ ID NO: 29069 - DNA, 1551 bp, Escherichia coli HVH 223 (4-2976528)
gtgataacaggtgtctggaaatataggggcaaatccaaagcggaaggggtacctccggcatttattacattacaagttctgcctaatttggcggctgaccccatcgatattgagttaccttttcccgctaaaggctgtctcgctcttgatgtaaacggacgtcctctggataaaaacattacgctgcatgatctgctgggttccagagcgtttctgttctccagaaatggcgagccgacaagatatacattgcagttgcatttgcgctccgttagtggattacaggcatggcacgaatggtgttatacggcgttgagcgatcgtcctgttgaattgaatctctatagtctgcgcgaacatattgagaacctgatttcacttgaggcaggtattgaccaggttgttgagatgcgtattacgggggcgggtgtggtcatggcctggcaaattcgtcgctataaatacagtctgcgctatgattatgaaaaagaactattactcagccagtcagtgaaccatcgtgctggacagattccttcccccgttatcatgctgttaagtgaacccgagaggaaatccatccccttagcatcaagaatgagcgagggagtgcctgtcggtgaatatgagttgagctcaatcgttaacaaaaatggaccgtggttggttgtccctaaaccgggtgaagagatggcttttcgtccctgcttcattcgtggcgaatcttcgttaccggtagaagaaagcaacatccgctcattgcagaaagcgacccagctttttaatccacaggcagaagttaataccatcacactggttctcggacagatggctaacgatcctgcccattccggctggcaatttatgcgtagcctgtacgatcaatttggttatttaccactggcaacctttgaagtatggcgtgcactggtgcagcatccgcaggcattggcaatgtcgctcttcaaatttgaaatgtcagcagagtacctgagtcgtattgagaatgagttccctattctatgggagtttttccccatctttgagatcaaagcggcatctgagcgtttcaaattgttcctgagccaaaaaggtgcaccggaggaaacccagaaattactggttactaatatgtttcaacggctggggctcgtgttcccgacatatgccgatgaaattgagaaatggttaagtaacggacatctccccccgtctattcctgagtcttttgtccacgtgtggtatcaggagcttttacgtgagcatagtgaagctcaatggccagagtacggcagcaagcggctgcatagctggatggcatcacaaaaaaatccagtgattggtattaatcctgacgcaaatcaccgctattccgtggccttgttacccgtcttcgctgcagctgtggcaagcggaaatgcttcttttgaatctgtatttgaccgtaaacccggtgccgtatttttcctgaggcaagtcagggatttcgattcccgctggtttaaggccatcttccagtgcagcctgttgcgttatgttgctaaaaaataa

SEQ ID NO: 29070 - DNA, 6345 bp, Escherichia coli HVH 29 (4-3418073); identical to SEQ ID NO: 28560

SEQ ID NO: 29071 - DNA, 3291 bp, Escherichia coli HVH 29 (4-3418073); identical to SEQ ID NO: 28561

SEQ ID NO: 29072 - DNA, 6315 bp, Escherichia coli HVH 43 (4-2173468); identical to SEQ ID NO: 28574

SEQ ID NO: 29073 - DNA, 3360 bp, Escherichia coli HVH 43 (4-2173468); identical to SEQ ID NO: 28647

SEQ ID NO: 29074 - DNA, 6315 bp, Escherichia coli HVH 44 (4-2298570); identical to SEQ ID NO: 28574

SEQ ID NO: 29075 - DNA, 3360 bp, Escherichia coli HVH 44 (4-2298570); identical to SEQ ID NO: 28647

SEQ ID NO: 29076 - DNA, 6345 bp, Escherichia coli HVH 45 (4-3129918); identical to SEQ ID NO: 28560

SEQ ID NO: 29077 - DNA, 3291 bp, Escherichia coli HVH 45 (4-3129918); identical to SEQ ID NO: 28561

SEQ ID NO: 29078 - DNA, 6345 bp, Escherichia coli HVH 63 (4-2542528); identical to SEQ ID NO: 28560

SEQ ID NO: 29079 - DNA, 3291 bp, Escherichia coli HVH 63 (4-2542528); identical to SEQ ID NO: 28561

SEQ ID NO: 29080 - DNA, 6345 bp, Escherichia coli HVH 69 (4-2837072); identical to SEQ ID NO: 28560

SEQ ID NO: 29081 - DNA, 3291 bp, Escherichia coli HVH 69 (4-2837072); identical to SEQ ID NO: 28561

SEQ ID NO: 29082 - DNA, 6345 bp, Escherichia coli HVH 85 (4-0792144)
atgactacacgctatttttcgtcacttattgaacaatcgttgtctcgttcaactgaagcaacgctcagtatcatgggcgttaccaacccgcagctgcgtgaacatctcgcgcaacaaatgggggctgattgtgggaaaccgggctcattccttgcttctccggtattccagcaaatgtttggctggaaggagtcaaaccacacgatgcgcagcctgacggaaggcaacgcattgttgagcaaagcagtggttgattcactggatgatcagaataatggccggtaccggtttggtgctgactggaggccttttacgcaccagttagccagttggaaagctttgctggaaaagaaacattcagtggtggtaaccagtggtacgggttcaggtaaaacggaatgttttatggtaccggtgctggaagatctttaccgggaactgcatgaaaatggcaacaatccgttggtcggtgtccgagccctttttctctatccattgaacgccctgattaattcacagcgcgagcgtctggatgcctggacgcgtggttttggtacagggatccgctactgcctttacaacggcaacaccgaaaacctacacgcttcggtaaaaagcgaacaggcaaaaaggccgaatgaggtgctctcgcgcgaaaaaatgcgtgaagaacctgcgccgattctggtgaccaacggcacgatgctggaatatatgatggttcgccaggtcgacgccccgattatccagcaatctaaagcacaaaaatcactacgctggattgtactggatgaagcgcatacctatgtagggtcgcaggccgctgaactggcgctccagctgcgtcgtgtgatgaccgcgtttggcatgacaccagatgacgtgcgctttgtcgcgacctctgcgaccattgccggcagcgacgctgaaaagcagctgaaaaaatttctctctgaattatccggtatcccgcaggagcgcatcgatgttctggacggaagtcgggtgattcctgaactggaaccatccaaaaacgtttctgttccgttagacgagatagagcaaatacctgatctggatctaagagataaaaatgataataaaattaaagggataagtcctgagcgcttttatgcgcttacgcattcccccgaagcgcgttacatacgtgagatgttggtcaaacagcccaatccgatgaagctggatgagataacagagcggttacacgtgctgacaaaacagcattacagccagcaggaagtactgcgttggatcgatgtctgttcagggactcaacctaatgcaaaggatcccgcatttcttaaagtcagggcgcatatcttccagcgtaatacccagggaatatgggcttgtgttgataaagattgcagattaaagcacggtacaccgctcgacaaaggctggccctttggctatgtgtatgtgaaccagcgacaaaattgtgactgtggaagccctgtatacgaagttgcattctgtaatgattgtaatgagcctcatcttctggcacgggacaaaaagggcaaactagtccagtgggaaaataaaggtggcgatgaattctctttgcaggatgaagtacctgttgaacatgacgctacagaagaaaaagtcgaaaaagagaacagttttcagcctccgttgattattgccgcaggagagaccagcgaggcaggttataccctacaacgcctcgaccgtcagacgcgccgtattggcgttattaacaatgacagcattccgctgattattaatgatattgaacaggtttgtagtgccagtggctgtggctacagaggcatgagtgggaaacagcccttccggcgtgcactattaggtgggccattttacgttactaatatcgtgcccaccgttctagagtattgtcaggactttaccagtgatgaaggcaaagagggcgtcggaccagattcgttgccaggacgaggtcgtcgactcatcacctttacagacagtcgacaagggacagcccgaatggcggtgcgtatgcagcaagaagcagaacgcagtcgcttacgcggaagcgtagtcgaaattctcagctggcatcaaaggacgcaaacgtctacagcgccgaatgccaatgccgatctggaaaaattagcggccagggcgaagcaagcccgtgagcaggcagaagaatatcgaagctggggaatgccagaccaggcgaaattgtcacaagcacaggctgaacagcttgaacaggcttatcaggctgcaaccggtgggaaagccgcgactatcctggtatcccgaacctggacggagatggttaacgagcttaaagagagagccgatatccgcgggccggttctgcaatataaccattatcttaagcctgaagtgtttaatgaaaacggcggcccccttaagctttctgaaatgttgttgttccgggaattcatgcgtcgccctaaacggactaacagcctggaaacacaggggctggttcaggttggttaccaggggctggagaaaatacataagagccccttgcactggcaggaaaaaggattaacgctggatgactggcgcgattttctcaaggttacgttggatcattacgttcgcgagagcaacttcacacagctggatgatgagctgaaaaactggattggtagccgtttttcatcaaaattcgtccgtaacccggaatcaaaagatcctgaagataatcagaacagacgctggcctcaaattcgtaatggcaacgtatcccatcgtttagcgaagttgctgatgctgggggctggattcaaaaccgtcaatgcggcaactattgatattatcaatacatggctgaaagaagcatgggcccaacttaccggaccgcttgcagtactgaaacccgatggcaaccgtttttatttaccgaaagagcatatgactttttctttaatcacggatgcctggatttgcccggtaaccaataaaatcctggatacggcttttaaaggcttaaccccttatctgcctacccatatttcgttcgagcatcttaccctggcgcaatatgacacttttgtcgcgcagaaagtcacaatgccggaaatctggaagctggatcgttcacaggaagactacgcagagggtctggcaaaagcacgcgactgggtcagccatgatccgctgatcgcacaattgcggtcggaaaacgtctggacagacattaacgatcgtgtcgtggaaggcggcttctactatcgtactgccgagcactctgcccagcagtcgtcagaacgtctgcaaagctatgaaaagatgttcaagaatgggcaactaaatgttctcaactgttccaccaccatggaaatgggggttgatatcgggggtattactgcggtggtaatgaacaacgtaccgccacatccggccaactatttacagcgcgccgggcgagccgggcgtagtaaagaatcacgcgcgatctcttacaccctatgtaaaggtaacccacacgaccagcaggtttttgccaacccgctctggccatttgaaaccatgatcccggcacccatggtcgcgatgaactccgcccgactggtgcaacgtcacgtcaatgcattattactgtccgactttttatgtaacgttattggcgaaaccgataaagaaaaaaccagcctcgatagcctctggtttttcggtgaagatgacgggcagtcaaaatgcgaacgctttaaaatctggctggaacgtccggttcttgatatcgacacggcgctggaacggctggtgaaaggtacggcgttgcatggtgcaagagccgaatatctgcgggataaaacaatcaacgcgatcaccttcctgcaacagcggtggctctccgtttatcgcgatctcgtgacacaggagcgtgagtcgcagccgcaaacgccttatcgtaagcgcatagagctggagaagaaacggcactgtggcgagtatctgctgcgcgatctggctgccagaaccttcctgccgggatacggtttcccgacagatgtagtgacgtttgataacttcacgatggaagattatatccgcgaaaaatcgcagaaaagtcgtgataaaaaggaccgtgaagataacgtttcccgttataaaggattaccttcccgtaacctcggtgttgccattcgtgaatatgcaccgggagcagagatcatccttgatggccgtgtcttccgctctgccggtgtctcactgcactggcacaacattaatgctgataccaatgaagcccagcgtctggattgcgcctggcgctgtcacaaatgcgggaccattggctatgaagaggggatgagcagttccgggatgctcttttgctccaatagcgcctgcggcgaaaaaataatcatggataatcgccgtcaggtgctgcagcctgccgggtttgtcaccgatgcacacgctccggtaacgaacaatattgaaaccatgaaattcgtcccggttgtccccgcgtgggtctttgttaaagcagagcccgtaccgttgcctaacccgctaatgggttatatggcttctggggctgatgggcatgttttccagcaaagtttgggggaaggtggacacggttatgcattgtgtctgagctgtggccgtgctgagtcgatgctgaatgaaaatgatgcgccgaaaagtatggaagctcactatccaccgcgtccgggtaaagcggatcgcgacagccagaatcatcgtctgatttgccccggttcgacggcactcatgaagaatgtcaccctgggcgcactggcgcgtaccgatgtctttgaaatggttctgcgcaaaccgcaaaacggcgagtatctgccagataacacagaggaggggcggattgttgccatgactctggcggttgctctgcgtcaggcgctggcgggcgttctgggtatctccgccgcagaactcggctattctgtacgtccggtcagactggaggatgggcaatcggtattagccgtacagctttatgatgtgatcagcggtggtgcaggttttgcctccagcgcaccggtacacattgaagctatattgcagggaatggtgaaacagttaggctgccgccattgtgagactgcatgtagtgaatgcctgcttgattcccagactcgccacgatcacgatttgctggatcgcaaagcggcgctggcctggcttggcgatgacttcacgtattacatcggtttaccggatgaagagacattctcgctgccggatgcccgctactgccctggcgccattggcgatacgattcgccgggcgattaacgaaggcgctgaaaagctcaccctgtggatgaccggcgcgcccaatgagtgggatttatacgcacgtcagttccgcgcggcggttcagaactatcggctaaaagacaacgtcgaggtcgatcttgttattcctacgggagtggatgacccggacctgttgcatgaactatcgcaatttactgcgctgggtgtgcggctgtgccatgttgaacaggatctgcaattaccgatcgttgcccaggtcacctttaccgatcgcgtgatgacgctggcctctcgcagccagcaggcaacgattccggggccggagtggcacctgaatgacgaactggtggtgcgtagtctcggttataaaacggtagaactgaacgagtttattctgcctgctaaagccaccaacgctgtcgagcgggtcaaagacattcagatccacaaacagttgaatggaccactgtcgcagtttgggcaacgcttctgggacgtgctgtttaacgaccatgaagaagcgcagtcactgatgaataacacgcgaattaccggcgttcactataccgatcgctatctgcaaaacccggttgcgctggcgttgttgggatcaattctgagaccgctaaaaacaaagctgaccgatggcgctgaagtgacgctggatacgctatttaaagataaagatcgccccggtaaccggcctttccatgactggatgagcatagcggattttcaggatttcgctgatcagtggtttgctgctgcgctgggcaggccggtagaactgacggtgttcgactcgccgcgcgatatccctcaccatcgtaaactgacggtgacttttgaggatggtcaggtattgaagatccgcttcgatcaggggatgggctactggcgcatcaacttttcatcgcaatggcattactttgatttccgcgatgacgtttctttccagttagtcaaaatggctcaggcctgcaaggaagggaatgtcgccaacagcgaagagagttgggcaacggatgtgctggtggaggtgatcgcctcctga

SEQ ID NO: 29083 - DNA, 3291 bp, Escherichia coli HVH 85 (4-0792144)
ttgggtcaatcagaatacatttcatgggtaaaatgtacttcctggctaagtaactttgtgaatcttagagggttgagacaaccggatggccgtcctctttatgaatatcatgcaaccaatgatgaatatacccaattaacgcagctactccgtgcagtcggtcaatcacaatctaatatatgtaatagggactttgctgcctgttttgttcttttttgctctgagtggtaccgcagggattatgaacggcaatgcggatggacgtgggaccctatatataaaaaaatagggatttcattcaccgccacagagcttggtactatcgtaccgaaagggatggaagattactggctgcgcccaattcgattttatgaatctgaacgacgcaattttctcggaacattattcagtgaaggtggtttacctttccggctactcaaagaatcagacagtcgctttctggctgttttctccaggatccttggacaatatgagcaagcaaagcagtcaggtttttctgccctttcgctggcaagagctgtcatagaaaaatcagcgctgccaactgtttttagcgaagatacctctgtagaacttatcagtcatatggctgataacctcaattccttagtacttactcacaacctaataaatcacaaagaaccagtacaacagcttgagaaggttcaccctacctggcgaagcgagtttccaataccgttagatgatgaaacaggaacgcattttttgaatggactgctatgcgcagcctctgtagaggctaagcctcgactacaaaaaaataagagtacgcgttgccaattctattggtcagaaaagcatccagatgagcttagggtgatagtatctcttccggacgaagtttcctttcctgtaacaagcgagccgtcaactacgcgctttgaacttgccatttgtgaagatggtgaggaagtctctggccttgggccagcctatgcttctctggaaaacagacaggcaacagttcgattacgtaaaagcgaagtgagatttggcaggcaaaatccatcggcaggtttgtcgttagtggctcgtgctggagggatgattgttgggagcattaaacttgatgacagtgaaattgccattggtgaggtgccgttaaccttcatcgttgatgcagatcaatggctgttacagggacaggcttcttgcagtgtgcgaagcagcgatgttctgattgtgctccctcgggataatagcaatgttgctggttttgatggccaatcgagggcagtaaacgtattaggactaaaagcactacctgtgaagggatgtcaggacgttacagttacagcaaatgaaacttatcggattcgcaccggaagagaacaaatcagcatcggaaggtttgctctaaatggaaagcgtgcaagctgggtttgtcatccagatgaaacatttattggtgtaccaaaagtcatttctacactaccggatattcaaagcattgatgtaacgcgttacctgagcggaatttcaattgagcaatgtcatatacaagagatgctgggggctcaatatctttctatccgtaatagtaagaatgaaacgctcttgcgtcgcaaaatcggtattttgcctgctgatttcagtattgagataaaaggtggaatacacgcaaatgaaggcactatcgtaatcaccacacagcatccttgtgtagcaaaacttaaagataaaacattggaggctacacgtaagcgtactgaggggcgaacagagatacaactcaaagcggaaggggtacctccggcatttattacattacaagttctgcctaatttggcggctgaccccatcgatattgagttaccttttcccgctaaaggctgtctcgctcttgatgtaaacggacgtcctctggataaaaacattacgctgcatgatctgctgggttccagagcgtttctgttctccagaaatggcgagccgacaagatatacattgcagttgcatttgcgctccgttagtggattacaggcatggcacgaatggtgttatacggcgttgagcgatcgtcctgttgaattgaatctctatagtctgcgcgaacatattgagaacctgatttcacttgaggcaggtattgaccaggttgttgagatgcgtattacgggggcgggtgtggtcatggcctggcaaattcgtcgctataaatacagtctgcgctatgattatgaaaaagaactattactcagccagtcagtgaaccatcgtgctggacagattccttcccccgttatcatgctgttaagtgaacccgagaggaaatccatccccttagcatcaagagtgagcgagggagtgcctgtcggtgaatatgagttgagctcaatcgttaacaaaaatggaccgtggttggttgtccctaaaccgggtgaagagatggcttttcgtccctgcttcattcgtggcgaatcttcgttaccggtagaagaaagcaacatccgctcattgcagaaagcgacccagctttttaatccacaggcagaagttaataccatcacactggttctcggacagatggctaacgatcctgcccattccggctggcaatttatgcgtagcctgtacgatcaatttggttatttaccactggcaacctttgaagtatggcgtgcactggtgcagcatccgcaggcattggcaatgtcgctcttcaaatttgaaatgtcagcagagtacctgagtcgtattgagaatgagttccctattctatgggagtttttccccatctttgagatcaaagcggcatctgagcgtttcaaattgttcctgagccaaaaaggtgcaccggaggaaacccagaaattactggttactaatatgtttcaacggctggggctcgtgttcccgacatatgccgatgaaattgagaaatggttaagtaacggacatctccccccgtctattcctgagtcttttgtccacgtgtggtatcaggagcttttacgtgagcatagtgaagctcaatggccagagtacggcagcaagcggctgcatagctggatggcatcacaaaaaaatccagtgattggtattaatcctgacgcaaatcaccgctattccgtggccttgttacccgtcttcgctgcagctgtggcaagcggaaatgcttcttttgaatctgtatttgaccgtaaacccggtgccgtatttttcctgaggcaagtcagggatttcgattcccgctggtttaaggccatcttccagtgcagcctgttgcgttatgttgctaaaaaataa

SEQ ID NO: 29084 - DNA, 6345 bp, Escherichia coli KOEGE 33 (68a); identical to SEQ ID NO: 28600

SEQ ID NO: 29085 - DNA, 3291 bp, Escherichia coli KOEGE 33 (68a); identical to SEQ ID NO: 28601

SEQ ID NO: 29086 - DNA, 6345 bp, Escherichia coli KOEGE 62 (175a); identical to SEQ ID NO: 28560

SEQ ID NO: 29087 - DNA, 3291 bp, Escherichia coli KOEGE 62 (175a)
ttgggtcaatcagaatacatttcatgggtaaaatgtacttcctggctaagtaactttgtgaatcttagagggttgagacaaccggatggccgtcctctttatgaatatcatgcaaccaatgatgaatatacccaattaacgcagctactccgtgcagtcggtcaatcacaatctaatatatgtaatagggactttgctgcctgttttgttcttttttgctctgagtggtaccgcagggattatgaacggcaatgcggatggacgtgggaccctatatataaaaaaatagggatttcattcaccgccacagagcttggtactatcgtaccgaaagggatggaagattactggctgcgcccaattcgattttatgaatctgaacgacgcaattttctcggaacattattcagtgaaggtggtttacctttccggctactcaaagaatcagacagtcgctttctggctgttttctccaggagccttggacaatatgagcaagcaaagcagtcaggtttttctgccctttcgctggcaagagctgtcatagaaaaatcagcgctgccaactgtttttagcgaagatacctctgtagaacttatcagtcatatggctgataacctcaattccttagtacttactcacaacctaataaatcacaaagaaccagtacaacagcttgagaaggttcaccctacctggcgaagcgagtttccaataccgttagatgatgaaacaggaacgcattttttgaatggactgctatgcgcagcctctgtagaggctaagcctcgactacaaaaaaataagagtacgcgttgccaattctattggtcagaaaagcatccagatgagcttagggtgatagtatctcttccggacgaagtttcctttcctgtaacaagcgagccgtcaactacgcgctttgaacttgccatttgtgaagatggtgaggaagtctctggccttgggccagcctatgcttctctggaaaacagacaggcaacagttcgattacgtaaaagcgaagtgagatttggcaggcaaaatccatcggcaggtttgtcgttagtggctcgtgctggagggatgattgttgggagcattaaacttgatgacagtgaaattgccattggtgaggtgccgttaaccttcatcgttgatgcagatcaatggctgttacagggacaggcttcttgcagtgtgcgaagcagcgatgttctgattgtgctccctcgggataatagcaatgttgctggttttgatggccaatcgagggcagtaaacgtattaggactaaaagcactacctgtgaagggatgtcaggacgttacagttacagcaaatgaaacttatcggattcgcaccggaagagaacaaatcagcatcggaaggtttgctctaaatggaaagcgtgcaagctgggtttgtcatccagatgaaacatttattggtgtaccaaaagtcatttctacactaccggatattcaaagcattgatgtaacgcgttacctgagcggaatttcaattgagcaatgtcatatacaagagatgctgggggctcaatatctttctatccgtaatagtaagaatgaaacgctcttgcgtcgcaaaatcggtattttgcctgctgatttcagtattgagataaaaggtggaatacacgcaaatgaaggcactatcgtaatcaccacacagcatccttgtgtagcaaaacttaaagataaaacattggaggctacacgtaagcgtactgaggggcgaacagagatacaactcaaagcggaaggggtacctccggcatttattacattacaagttctgcctaatttggcggctgaccccatcgatattgagttaccttttcccgctaaaggctgtctcgctcttgatgtaaacggacgtcctctggataaaaacattacgctgcatgatctgctgggttccagagcgtttctgttctccagaaatggcgagccgacaagatatacattgcagttgcatttgcgctccgttagtggattacaggcatggcacgaatggtgttatacggcgttgagcgatcgtcctgttgaattgaatctctatagtctgcgcgaacatattgagaacctgatttcacttgaggcaggtattgaccaggttgttgagatgcgtattacgggggcgggtgtggtcatggcctggcaaattcgtcgctataaatacagtctgcgctatgattatgaaaaagaactattactcagccagtcagtgaaccatcgtgctggacagattccttcccccgttatcatgctgttaagtgaacccgagaggaaatccatccccttagcatcaagaatgagcgagggagtgcctgtcggtgaatatgagttgagctcaatcgttaacaaaaatggaccgtggttggttgtccctaaaccgggtgaagagatggcttttcgtccctgcttcattcgtggcgaatcttcgttaccggtagaagaaagcaacatccgctcattgcagaaagcgacccagctttttaatccacaggcagaagttaataccatcacactggttctcggacagatggctaacgatcctgcccattccggctggcaatttatgcgtagcctgtacgatcaatttggttatttaccactggcaacctttgaagtatggcgtgcactggtgcagcatccgcaggcattggcaatgtcgctcttcaaatttgaaatgtcagcagagtacctgagtcgtattgagaatgagttccctattctatgggagtttttccccatctttgagatcaaagcggcatctgagcgtttcaaattgttcctgagccaaaaaggtgcaccggaggaaacccagaaattactggttactaatatgtttcaacggctggggctcgtgttcccgacatatgccgatgaaattgagaaatggttaagtaacggacatctccccccgtctattcctgagtcttttgtccacgtgtggtatcaggagcttttacgtgagcatagtgaagctcaatggccagagtacggcagcaagcggctgcatagctggatggcatcacaaaaaaatccagtgattggtattaatcctgacgcaaatcaccgctattccgtggccttgttacccgtcttcgctgcagctgtggcaagcggaaatgcttcttttgaatctgtatttgaccgtaaacccggtgccgtatttttcctgaggcaagtcagggatttcgattcccgctggtttaaggccatcttccagtgcagcctgttgcgttatgttgctaaaaaataa

SEQ ID NO: 29088 - DNA, 6345 bp, Escherichia coli KOEGE 68 (182a); identical to SEQ ID NO: 29082

SEQ ID NO: 29089 - DNA, 3291 bp, Escherichia coli KOEGE 68 (182a); identical to SEQ ID NO: 29083

SEQ ID NO: 29090 - DNA, 6345 bp, Escherichia coli KOEGE 73 (195a); identical to SEQ ID NO: 28560

SEQ ID NO: 29091 - DNA, 3291 bp, Escherichia coli KOEGE 73 (195a); identical to SEQ ID NO: 28561

SEQ ID NO: 29092 - DNA, 6345 bp, Escherichia coli KTE1; identical to SEQ ID NO: 28560

SEQ ID NO: 29093 - DNA, 3291 bp, Escherichia coli KTE1; identical to SEQ ID NO: 28561

SEQ ID NO: 29094 - DNA, 6345 bp, Escherichia coli KTE102; identical to SEQ ID NO: 28560

SEQ ID NO: 29095 - DNA, 1983 bp, Escherichia coli KTE102
gtgaagggatgtcaggacgttacagttacagcaaatgaaacttatcggattcgcaccggaagagaacaaatcagcatcggaaggtttgctctaaatggaaagcgtgcaagctgggtttgtcatccagatgaaacatttattggtgtaccaaaagtcatttctacactaccggatattcaaagcattgatgtaacgcgttacctgagcggaatttcaattgagcaatgtcatatacaagagatgctgggggctcaatatctttctatccgtaatagtaagaatgaaacgctcttgcgtcgcaaaatcggtattttgcctgctgatttcagtattgagataaaaggtggaatacacgcaaatgaaggcactatcgtaatcaccacacagcatccttgtgtagcaaaacttaaagataaaacattggaggctacacgtaagcgtactgaggggcgaacagagatacaactcaaagcggaaggggtacctccggcatttattacattacaagttctgcctaatttggcggctgaccccatcgatattgagttaccttttcccgctaaaggctgtctcgctcttgatgtaaacggacgtcctctggataaaaacattacgctgcatgatctgctgggttccagagcgtttctgttctccagaaatggcgagccgacaagatatacattgcagttgcatttgcgctccgttagtggattacaggcatggcacgaatggtgttatacggcgttgagcgatcgtcctgttgaattgaatctctatagtctgcgcgaacatattgagaacctgatttcacttgaggcaggtattgaccaggttgttgagatgcgtattacgggggcgggtgtggtcatggcctggcaaattcgtcgctataaatacagtctgcgctatgattatgaaaaagaactattactcagccagtcagtgaaccatcgtgctggacagattccttcccccgttatcatgctgttaagtgaacccgagaggaaatccatccccttagcatcaagaatgagcgagggagtgcctgtcggtgaatatgagttgagctcaatcgttaacaaaaatggaccgtggttggttgtccctaaaccgggtgaagagatggcttttcgtccctgcttcattcgtggcgaatcttcgttaccggtagaagaaagcaacatccgctcattgcagaaagcgacccagctttttaatccacaggcagaagttaataccatcacactggttctcggacagatggctaacgatcctgcccattccggctggcaatttatgcgtagcctgtacgatcaatttggttatttaccactggcaacctttgaagtatggcgtgcactggtgcagcatccgcaggcattggcaatgtcgctcttcaaatttgaaatgtcagcagagtacctgagtcgtattgagaatgagttccctattctatgggagtttttccccatctttgagatcaaagcggcatctgagcgtttcaaattgttcctgagccaaaaaggtgcaccggaggaaacccagaaattactggttactaatatgtttcaacggctggggctcgtgttcccgacatatgccgatgaaattgagaaatggttaagtaacggacatctccccccgtctattcctgagtcttttgtccacgtgtggtatcaggagcttttacgtgagcatagtgaagctcaatggccagagtacggcagcaagcggctgcatagctggatggcatcacaaaaaaatccagtgattggtattaatcctgacgcaaatcaccgctattccgtggccttgttacccgtcttcgctgcagctgtggcaagcggaaatgcttcttttgaatctgtatttgaccgtaaacccggtgccgtatttttcctgaggcaagtcagggatttcgattcccgctggtttaaggccatcttccagtgcagcctgttgcgttatgttgctaaaaaataa

SEQ ID NO: 29096 - DNA, 6345 bp, Escherichia coli KTE116; identical to SEQ ID NO: 28560

SEQ ID NO: 29097 - DNA, 3291 bp, Escherichia coli KTE116; identical to SEQ ID NO: 28561

SEQ ID NO: 29098 - DNA, 6345 bp, Escherichia coli KTE122; identical to SEQ ID NO: 28560

SEQ ID NO: 29099 - DNA, 3291 bp, Escherichia coli KTE122; identical to SEQ ID NO: 28561

SEQ ID NO: 29100 - DNA, 6315 bp, Escherichia coli KTE125; identical to SEQ ID NO: 28574

SEQ ID NO: 29101 - DNA, 3360 bp, Escherichia coli KTE125; identical to SEQ ID NO: 28647

SEQ ID NO: 29102 - DNA, 6345 bp, Escherichia coli KTE127; identical to SEQ ID NO: 28560

SEQ ID NO: 29103 - DNA, 3291 bp, Escherichia coli KTE127; identical to SEQ ID NO: 28561

SEQ ID NO: 29104 - DNA, 6345 bp, Escherichia coli KTE128; identical to SEQ ID NO: 28560

SEQ ID NO: 29105 - DNA, 3291 bp, Escherichia coli KTE128; identical to SEQ ID NO: 28561

SEQ ID NO: 29106 - DNA, 6345 bp, Escherichia coli KTE130; identical to SEQ ID NO: 28446

SEQ ID NO: 29107 - DNA, 1091 bp, Escherichia coli KTE130
ggggaaaaacgagtatttttagtcatcctgtttacctctttctcaggaagtttagtctccaggattcccggggcggttcacccgttatcatgctgttaagtgaacccgagaggaaatccattcccttagcatcaagaatgagcgagggagtgcctgtcggtgaatatgagttgagctcaatcgttaacaaaaacggaccatggttggttgttcctaaaccgggtgaagagatggcttttcgcccctgcttcattcgtggcgaatcttcgttaccggtagaagaaagcaacatccgctcattgcagaaagcgacccagctttttaatccacaggcagaagttaataccatcacacgggttctcggacagatggctaacgatcctgcccattccggctggcaatttatgcgtagcctgtacgatcaatttggttatttaccgctggcaacctttgaagtatggcgtgcactagtgcagcatccgcaggcattggcgatgtcgctcttcaaattcgaaatgtcagcagagtatctgagtcgtattgagaatgagttccctattttatgggagtttttccccatctttgagatcaaagctgcatctgagcgtttcaaattgttcctgagccaaaaaggtgcaccggaggaaacccagaaattactggttaccaatatgtttcaacggctggggctcgtgttcccgacatatgccgatgaaattgagaaatggttaagtaatggatatctccccccgtctattcctgaatcttgtgtccacgggtggtatcaggagctcttacgtgagcacagtgaagctcgctggcctgaatacggctgcaagcgtctgtataaatggatgatgtcacaaaaaaatccagtgattggtattaatcctgacgcaaatcaccgctattccgtggcctggttacccgtcttcgccgcagcggtggcaagcggaaatgcttcttttgaatctgtatttgaccgtaaacccggtgccgtatttttcctgaggcaagtcagggatttcgattcccgctggtttaaggccatcttccagttcagcctgttgcgttatgttgctaaaaaataa

SEQ ID NO: 29108 - DNA, 6345 bp, Escherichia coli KTE132; identical to SEQ ID NO: 28446

SEQ ID NO: 29109 - DNA, 1091 bp, Escherichia coli KTE132; identical to SEQ ID NO: 29107

SEQ ID NO: 29110 - DNA, 6345 bp, Escherichia coli KTE134; identical to SEQ ID NO: 28560

SEQ ID NO: 29111 - DNA, 3291 bp, Escherichia coli KTE134; identical to SEQ ID NO: 28561

SEQ ID NO: 29112 - DNA, 6345 bp, Escherichia coli KTE154
atgactacacgctatttttcgtcacttattgaacaatcgttgtctcgttcaactgaagcaacgctcagtatcatgggcgttacaaacccgcagttgcgtgaacatctcgcgcagcaaatgggggctgattgtgggaaaccgggctcattccttgcttctccggtattccagcaaatgtttggctggaaggagtcaaaccacacgatgcgcagtctgacggaaggcaacgcattgttgagcaaagcagtggttgattcactggatgatcagagtaatggccggtaccgatttggtgctgactggaagccttttacacaccagttagccagttggaaagctttgctggaaaagaaacattcagtggtggtaaccagtggtacgggttcaggtaaaacggaatgttttatggtaccggtgctggaagatctttaccgggaactgcatgaaaatggcaacaatccgttggtcggtgtccgagccctttttctctatccattgaacgccttgattaattcacagcgcgagcgtctggatgcctggacgcgtggttttggtactgggatccgctactgcttgtataacggaaatacagaagagctccacgcaaaaatgaaaacagtgcaggataatagaccaaatgaagtcttatcccgtgaaaagatgcgtctggagccagccccgattctggtgaccaacggcacgatgctggaatatatgatggttcgccaggtcgacgccccgattatccagcaatccaaagcacaaaaatcactacgctggattgtactggatgaagcgcatacctatgtcgggtcgcaggccgctgaactggcactccagctgcgtcgtgtgatgacagcgtttggcgtgacgccagatgatgtgcgctttgtagcgacctctgcgaccattgcctgcagcgacgccgaaaagcagctgaaaaaatttctctctgaattatccggtatcccgcaggagcgcatcgatgttctggacggaagtcgggtgattcctgaactggaaccatccaaaaacgtttctgttccgttagacgaaatagagcaaatacctgatctggatctaaaagataaaaatgataataaaattaaagggataagccctgagcgcttttatgcgcttacgcactcccccgaagcgcgttacatacgtgaaatgttggttagccaacccaatccaatgaaactggatgagatgacgcagcggttaaatgcgctgacaaaacagcattacagccagcaggaagtactgcgttggatcgatgtctgttcagggactcaacctaatgcaaaggatcccgcatttcttaaagtcagggcacatatcttccagcgtaatacccaaggaatatgggcttgtgttgataaagattgcagattaaagcacggtacaccgctcgaaaaaggctggccctttggctatgtgtatgtgaaccagcgacaaaattgtgactgtggaagccctgtatacgaagttgcattctgtaatgattgtaatgagcctcatcttctggcgcaggacaaaaagggcaaacttgtccaatgggaaaataaaggtggcgatgagttctccttgcaggatgaagtacctgttgaacatgacactacagaggaaaaagtcgaaaaagagaacggtttcctgcctccgttgattattgccgcaggagagaccagcgagacaggctataccctacaacgcctcgaccaccagacgcgccgtattggcgttattaacaatgacagcattccgctgattattaatgatgttgaacaggtttgtagcgccagtggctgtggctacagaggcatgagtgggaaacagcccttccggcgtgcactattaggtgggccattttacgttactaatatcgtgcccaccgttcttgagtattgtcaggactttaccagtgatgaaggcaaagagggcgtcggaccagattcgttgccagggcgaggacgtcgactcattacctttacggacagtcgacaaggtacagctcgaatggcggtgcgtatgcagcaagaagcagaacgcagtctcttacgcggaagcgtagtcgaaattctgagctggcatcaacggacgcaaacgtccacggcgccgaatgccaatgccgatctggaaaaattagcggccagggcaaagcaagcccgtgagcaggcagaagaatatcgaagctggggaatgccagaccaggcgaaattgtcacaagcacaggctgaacagcttgaacaggcttatcaggctgcaaccggtggaaaagcagcaactaccctggtatcccgcacctggacagaaatggttaacgagcttaaagataaagccgatatccgtggcccggtactgaaatataaccactatttgcagcctgaagtgtttaataaaaacggcgggccactaaagctttcggaaatgttgttgttccgggaattcatgcgtcgccctaaacggactaacagcctggaaacacaggggctggttcaggttggttaccaggggctggagaaaatacataagagccccttgcactggcaggaaaaaggattaacgctggatgactggcgcgattttctcaaggttacgttggatctttatgttcgcgaaagcaacttcacacagctggatgatgagctgaaaaactggattggtagccgtttttcatcaaaattcgtccgtaacccggaatcaaaagatcctgaagataatcagaacagacgctggcctcaaattcgtaatggcaacgtatcccatcgtttagcgaagttactgatgctgggggctggattcaaaaccgtcaatacggcgactattgatattatcaatacatggctgaaagaagcatgggcccaacttaccggaccacttgcagtactgaaacccgatggcaaccgtttttatttaccgaaagagcatatgactttttctttaatcacggatgcctggatttgcccggtaaccaataaaatcctggatacggcttttaaaggcttaaccccttatctgcccacccatatttcgttcgagcatcttacccaggcgcaatatgacacttttgtcgcgcagaaagtcaccatgccggaaatctggaagctggatcgttcacaggaagactacgcagagggtctggcaaaagcacgagactgggtcaacaatgatccgctgatcgcacaattgcggtcggaaaacgtctggacagacatcaacgatcgtgtagtggaaggcggtttctactatcgcactgccgagcactctgcccagcagtcgtcagaacgcctgcaaagctatgaaaagatgttcaagaacgggcaactaaatgttctcaactgttccaccaccatggaaatgggggttgatattgggggcattactgcggtggtaatgaacaacgttccgccacatccggccaactatttacagcgcgccgggcgagccgggcgtagtaaagaatcacgcgcgatctcttataccctatgcaaaggtaacccacacgaccagcaggtttttgccaacccactctggccatttgaaaccatgatcccggcacccatggtcgcgatgaactccgcccgactggtgcaacgtcacgtcaatgcattattactgtctgactttttatgtaacgttattggcgaaaccgataaagagaaaaccagcctcgatagcctctggtttttcggtgaagatgacgggcagtcaaaatgcgaacgctttaaagtctggctggaacgcccggttcttgatatcgacacggcgctggaacggctggtgaaaggtacggcgttgcatggcgcaagagccgaacatctgcgggataaaacaatcaatgcgatcaccttcctgcaacagcggtggctctccgtttatcgcgatctcgtgacccaggagcgtgagtcgcagccgcaaacgccttatcgtaagcgcatagagctggagaagaaacggcactgtggcgagtatctgctgcgcgatctggctgccagaaccttcctgccgggatacggtttcccgacagatgtagtgacgtttgataacttcacgatggaagattatatccgcgaaaaatcgcagaaaagtcgtgataaaaaggaccgtgaagataacgtctcccgttataaaggattaccttcccgtaacctcggtgttgccattcgtgaatatgcaccgggagcagagatcattcttgatggtcgtgtcttccgctctgccggtgtctcactgcactggcacaacattaatgctgataccaatgaagcccagcgtctggattgcgcctggcgctgtcacaaatgcgggaccattggctatgaagaggggatgagcagttccgggatgctcttttgctccaacagcgcctgcggcgaaaaaataaccatggataatcgccgtcaggtgttgcagcctgccgggtttgtcaccgatgcacacgctccggtaacgaacaatattgaaaccatgaaattcgtcccggttgtccccgcgtgggtctttgttaaagcagagcccgtaccgttgcctaacccgctaatgggttatatggcttctggggctgatgggcatgttttccagcaaagtttgggggaaggtggacacggttatgcattgtgtctgagctgtggccgtgcggagtcgatgctgaatgaaaatgatgcaccgaaaagtatggaagctcactatccaccgcgtccgggtaaagcggaccgcgacagccagaatcatcgtctgatttgccccggttcgacggcactcatgaagaacgtcaccctgggcgcactggcgcgcaccgatgtctttgaaatggttctgcgcaaaccgcaaaacggcgagtatctgccagataacacagaagaggggcggattgtcgctatgactctggcggttgctctgcgtcaggcgctggcaggcgttctgggtatctccgccgcagaactcggctattctgtacgtccggtcagactggaggatgggcaatcggtattagccgttcagctttatgatgtgatcagcggtggtgctggttttgcctccagcgcaccggtacatattgaagctatattgcagggaatggtgaaacagttaggctgccgccattgtgatactgcatgcagtgaatgtctgcttgattcccagactcgccacgatcacgatttgctggatcgcaaagtggcgctggcttggcttggcgatgacttcacgtattacatcggtttaccggatgaagagacattctcgctgccggatgcccgctactgccctggcgctattggcgatacgattcgccgggcgattaacgaaggcgctgaaaagctcaccctgtggatgactggcgcgcccaatgagtgggatttatacgcccgtcagttccgcgcggctattcagagctatcggctaaaagacaacgtcgaggtcgatcttgttattcctgcgggagtggatgacccagacctgttgcatgaactatcgcaatttactgcgctgggtgtgcggttgtgccatgttgagcaggagctgcaattaccgattgttgcccaggtcacctttgccgatcgcgtgatgacgctggcctctcgcagtcagcaggcaacgattccggggccggagtggcacctgaatgacgaactggtggtgcgtagtctcggttatcaaacggtagaactgaacgagtttattctgcccgctaaagccgccaacgctgtcgagcgggtcaaagacattcagatccacaaacagttgaatggaccactttcgcagtttgggcaacgcttctgggacgtgctgtttaacgaccatgaagaagcgcagtcactgatgaaaaacacgcgaattaccggcgttcactataccgatcgctatctgcaaaacccggttgcgctggcgttgttgggatcaattctgaaaccgctaaaaacaaagctgaccgatggcgctgaagtggcgctggatacgctgtttaaagataaagatcgccccggtaaccggcctttccatgactggatgagcatagcggattttcaggatttcgctgatcagtggtttgctgctgcgctgggcaggccgatagaactgacggtgttcgattcgccgcgcgatatccctcaccatcgtaaactgacggtgacttttgaggatggtcaggtattgaagatccgcttcgatcaggggatgggctactggcgcatcaactttgcatcgcaatggcattactttgatttccgcgatgacgtttctttccagttagtcaaaatggctcaggcctgcaaggaagggaatgtggccaacagcgaagagagctgggcaacggatgtgctggtggaggtgatcgcctcctga

SEQ ID NO: 29113 - DNA, 2154 bp, Escherichia coli KTE154
gtgccgttaaccttcatcgttgatgcagatcaatggctgttacagggacaggcctcctgcagtgtgcgaagcagcgatgttctgattgtgctccctcgggacaatagcactgttgctggttttgatggccaatcgagtgcagtaaacgtattaggacttaaagcgctacctgttaagggatgtcaggacgttacagttacagcaaatgaaacttatcggattcgcaccggaagagaacaaatcagcatcggaaggtttgctctaaatggaaagcgtgcaagctgggtttgtcatccagatgagacatttattggtgtaccaaaagtcatttctacactaccagatattcaaagcattgatgtaacgcgttacctgagcggaatttcaattgagcaatgtcatatacaagagatgctaggggctcaatatctttctatccgtaatagtaataatgaaacgctcttgcgtcgcaaaatcggtatcttgcctgctgatttcagtattgagataaaaggtggaatgcacgcaaatgaaggcactatcgtaatcaccacacagcatccttgtgtagcaacacttaaagataaaacattggaggctacacgtaagcgtactgaggggcgaacagagatacaactcaaagcggaaggggtacctccggcatttattacattacaagttctgcctaatttggcggctgataccatcgacattgagttacctttcccagctaaaggctgccttgctcttgatgtaaacggacgtcctctggataaaaacattacgctgcatgatctgctgggttccagagcattcctgttctccagaaatggtgagccgacaaaatatacattgcagttgcatttgcgctccattagtggattacaggcatggcacgaatggagttatacggcattgagcgagcgtcctgttgaattgaatctctatagtctacgtgaacacattgaaaatctgatttcacttgaggcaggtattgatcaggttgttgagatgcgtattacgggggcgggtgtggtcatggcctggcaaattcgtcgctataaatacagcctgcgctatgattatgaaaaagaactattactcagccagtcagtgaaccatcgtgctggacagattccttcccccgttatcatgctgttaagtgaacccgagaggaaatccattcccttagcatcaagaatgagcgagggagtgcctgtcggtgaatatgagttgagctcaatcgttaacaaaaacggaccatggttggttgttcctaaaccgggtgaagagatggcttttcgcccctgcttcattcgtggcgaatcttcgttaccggtagaagaaagcaacatccgctcattgcagaaagcgacccagctttttaatccacaggcagaagttaataccatcacacgggttctcggacagatggctaacgatcctgcccattccggctggcaatttatgcgtagcctgtacgatcaatttggttatttaccgctggcaacctttgaagtatggcgtgcactagtgcagcatccgcaggcattggcgatgtcgctcttcaaattcgaaatgtcagcagagtatctgagtcgtattgagaatgagttccctattttatgggagtttttccccatctttgagatcaaagctgcatctgagcgtttcaaattgttcctgagccaaaaaggtgcaccggaggaaacccagaaattactggttaccaatatgtttcaacggctggggctcgtgttcccgacatatgccgatgaaattgagaaatggttaagtaatggatatctccccccgtctattcctgaatcttgtgtccacgggtggtatcaggagctcttacgtgagcacagtgaagctcgctggcctgaatacggctgcaagcgtctgtataaatggatgatgtcacaaaaaaatccagtgattggtattaatcctgacgcaaatcaccgctattccgtggcctggttacccgtcttcgccgcagcggtggcaagcggaaatgcttcttttgaatctgtatttgaccgtaaacccggtgccgtatttttcctgaggcaagtcagggatttcgattcccgctggtttaaggccatcttccagttcagcctgttgcgttatgttgctaaaaaataa

SEQ ID NO: 29114 - DNA, 6345 bp, Escherichia coli KTE158; identical to SEQ ID NO: 29082

SEQ ID NO: 29115 - DNA, 3291 bp, Escherichia coli KTE158; identical to SEQ ID NO: 29083

SEQ ID NO: 29116 - DNA, 6315 bp, Escherichia coli KTE161
atggacgttcagcaactgcattatgcgccacttctaaatcagcttcatcagcgcgcggtgaggtcggtggtaagtcagttggcattgcggagcaagtcgttgactcattatctggaatcacaatatttccagcctcccggtcaggaggggtcactgcttgcagacccggtattcgaaagcacgttcggctggatgcctgcggatgaaacaatggaggatttgcgggacaagctaatttccagcccgctggttgatgcattgagcaaagcgccggtgccatttcgtcatcaacttacggcgtggcgaacgattctggaagacaaaaaatccttgttagtgagcagcggtacgggatccgggaaaacagaatgctttatggtaccggttctagaagatcttattcgtcagcaaaaatcgacccgtcagtcactaacagggacacaagctattttcttgtatccgttaaatgcattaattaacagccaacaggagcggcttcgtgaatggacgcgcggatttaaggggaaaatacgcttcgcgctatataatggcgaaacccggcataccaaatacgaagttcaggaagatcagttgaaagtacctgaacaagctttgagtcgggaagccatttacgaagcaccaccttccatcatggtgacgaataccaccatgctggaatatatgctgattcgtcgtaaagatgccccaatcatcgaaaagtctcaggggatattaaagtatatcgtcctggatgaagcccatagttatattggttctcaggctgctgagttagcgctgcttttacgtcgtgttatgcaggctttcaatgttggacctggcacagataaacctgtgcagattatcgcgacctctgccactattggtgaagactctcctgaaggtaataaggagcttgctaaatttgtcgctgatcttgcgggcgttacagaacgtgatgtcaaagtggttcgcggctatcgacaaataccgcgggtatcggagtcgctgattcgtcatgaatatcccacatctttaacttctcttaaatctttgagccctcaggatctttaccaacagctttgtcattaccgtgtagcccagcaattgcgtcaggcgttaactcatcccggacggcaggcagtacgtttgagtgagttgctcaatgttgccagaagaacctggccagatattaatcaccgtgagttactgcaactcctcgacctaatggcgagatcgcgagaaggtgaactggcttttacgccattacgtatgcatgggtttatcagaacactggcgggtctatgggcatgttcaaacaaacaatgcttacataaagcgcatgaattaaatcagagtgactggccatttggtcaggtatggtttgagcagcgccaatattgtgactgtggtgcgccggtatttgaagttttacgttgctccgggtgtggttcagcttatttgtctgccaaagaggaggtgcgcggtgatggaacgaactggttggtagcgcaacccgccgctgccgaagtggatgaatttgctcttgatgtagatgtttattctgaagatgaagacaacgacgaattagacaataactctcaatttgatcgtctgattgcgatcgatggtgaaaaatatatcatttcactggaagaaacgacggcggggaaaattgatagtgaagcgcaaaagcactatgaaataaacctgttaagaccggaatctcgaggtgagggacgtaataattcctttgcttgtgtttgctgtggtgacacccaacgaaaaaataatcctttattccgtccgcttcgacttggcgcgcccttttttttaaatgaaattattcctactctgctggagttttcaccattaccgcagacaagagaagagcagttaggaccgtttaatggtcgacgtctgctcacctttacggattcacgtcagggcactgcccgcatttctgcccgcttacagcaggatgccgataaagcgacgttgcgagctctttgttaccaggagttggccaatattaatgagccatcagcaaagctcagcccggcacactgcgcattgttagagagttttattacccagttttctatccttcctttaaaaaactctattgacgcgctgaaaaaagcgatggttgctaatgaagagcttagcccggcggacattcaggcacttaaaattatcgagccgatggtgagttccttaagcccggatcatgctgaagcgatgcaaatactccaggctaactctggcaatcagcagaagaaaaccatgtcatggcaaacactgtctgaacagctggttggcagtgtggaccttgccgatagaatgagaggcagttttaaagaattgtctgggcttgatcttactaaacaacagtttgcagatttttgtttatacagtgagtttggtcgccgccctaaaaatgcctggaccctcgaaagtatgggtctggtagccattcactatccatttattgataaagttacaacctgcccgcaggactggaagacattattacccgatcccgataagcaattagcggaatggcgtaatttattgaagattactcttgatttctttatacgtgaaaacagtgccgttttttacgaaaacgagcaataccctcgctggatgggggctcgtttcccggtaaaaatgctccagggtccagataaaaaaaacaaagggcagaaacgtgatcaactttggccacaaatacgcgatcgccattataaccgggtcattaagctattaattgcagtctttccggcaatacaacctgagcaggctcactggaaatcgttagttaaccacttaatgattgaggtctgggatgcaattcgaccctgcttacgtcagtttgagtcgggttatcagctggatattaaacaacaagctgaattttacagtccaaagcaagtgtggcgttgcccctatactcgacgtgcgttagacgtcacgttactgggatactctccgtatttgccgggtagcaaagaaattgcacctgaaaaagcagtgttgattgaaatgcctgagcttcctgtacgtcactggcgtttgtctggtggtggagaaatcgcccgagaagaacgtctggagtggctggaaagtaatgcgctgattcaacatgcccgcgaggaaggattatggtctactcgcagcgaccgactggccctgaaagatagctggtatcgtctggaggaacactctgcgcagagaacgcctgagcagaaccaatttaatgaaaaacaatttaagtcaggcaaagttaatgtgctgaactgctccacgaccatggagatgggggtggacattggtggtatgagtttggtggcaatgaacaacgttcctccagctccggcaaattatttgcagcgtgcaggccgcgcgggtcgacgtggagagagtgcatctgctgccattacgttatgtaaaaacacggcgcatggaatggaggtattcaaagaccccctctgggcgttcaacactactgccagtgcgccacgggttcgttttgggagcagcagtattgttcaacgacatgttaatgccctggttttaggtctgtttttacgagctgaagttcctgatgcgacaaaactgagttgcaaatggttctttgaaggtgatgagagccagtgtcttcgttttctccattggttaaataaccaggccgatcagctggcggataaacttaaacgccttactcagggaaccgtcctgatgtcattgacggcaacccagctcttgacccgcacacaagcaatgatgcagcaggttgatatccgctggagaagccaacttgcgatactgttggaaaatatcgaagcgttgaaggcggataacagcgcgtgggaagaaacgccagcaggtaaagccatcgcttatcagcttcgtgattatcgcggtgcatatctgttttctaaactcattagtgaagcgttcctgccggggcatggtttcccggttggcgtcgtcaatttcaattatctgacggcagatgagctggaaaaacgtcgcgcaataaaagctactcaggctgaccctaatgaagggggagaaagcttttctcgtcgtattgaaaaattgcccagccgtgatttgcctacagcattacgcgagtatgctccaggtgcagatgtggtattgggcggaaaagtatatcgttcctcgggcattatgcttggcaaggtacttgccagcgggcaggagctgtcaggcgatcatcatattccgtggttctggcattgtcgtaaatgtggtgcgggggcaaccagtactacccgtcctgtcgaatgtagtcactgcaaagcggatatacagcaacttgatgtgaagcgttatttacagcctgttggttttgcgacagatatccgttatcaggcgcataatgatgtatccatgcctgcacaacttccctggaaagatccacgtgttcttgtaccgtcttcggtgtgggtttctttacccgatgctgggctaggacgttaccgttttagccatagtggggaattgttccacttcagtgaaggggaatttgggcacggctacgcaatttgcctctcatgtggtcgggcagaatctcaaaatcaaccccagcgtacccctgaaaatcttaagaacccagagagggaaaatacgcattacctgttgcgagggggcagtaacgatcgtctgggtagcaataaattgtgccacggtcacgtgcataaagatctttggttggggtatagcagtcgtacagatatggttgagctgcaactcaatgatgataatggcctgttgatccgtgatgaggttgccgcgcgttcccttgcggtcgctttgcgtgaagggttagcgcataaattgggtatcgaaaatactgagctgggcgtgacgacgcagcaagcgcgcgatatcaatggctataccggatattccatcttcatttacgacaataatgcgggtggtgcaggttatgcagtgcaattgatcgaccattgggctgatgtctttaattacgccagaaaattgctcgattgcagttgcgataaattctgtcaccactgcttgctcagctacgacagtcagcattatgtcaacagattagatcgtcaccatgcattaaccctgcttaccaatgtacggttgcagcgacttaacctcgcgccagaatatcagtacttcggcgatggtagccgggttgaaactaaccctctgagtttacgtattgcgcaatgcctgaacagcgagatttatgacccctgctcgctggttcttgcggggccgcaggaacagtgggactttgcccaatggccattatttaaagagttgctccagtttgcctcctccggtgggaatgttgagttgctggtggccacgccgctggcaaacttaactgatagctccagacatcagctttccgcgttggcggcgatgccgggaggtcgcttacaagtgaaatccattgccactgcgcagctcatgcaaggaaaggggcgctggcttgcgcaggtgactcgcgaagggcaaagccaacagtgggccgcagacgacagcgctaccgttgcacctggtgaattatggggacaaagtgcgtcttcaccagtagtgacacttaaaggaacgtccggaaaaaccttctcgggtcagaccttaagtgcagaagatttactgcccgccttacccaccggggcggtgcgcatcaatctctgtgaacaactggacgggccgctggaaggttttggttcgcgtttctggtcgttagtcacgcaacagcacgctggctggaagcaggcatttacccgccacaaagagataacgcatgttgagtacagcgatcgttatcttaatagcccattcacggcgcgtttgttaggtgaaatcttaaccgagctggttgaacagggaatggcggaacgcgccagcctcactgtttgcgtcaaaaaattggattacaactctcgccaacacgacgctctctataacgcgtggcttaatgaggaagatcgtcagcaggttgtgaccactttacttgaagaaggatatctggggcctgcgtggccgggagcaattagctggttaacgggggataaccagagtacggagcatggacgagaactgacagtcaccttcagcgatggcagtcagcattatgtcctgctcgacatggggcttagctactggcgctgtattgaagacaccttctttgattttgctctgcgagtaccgcagcaagttgaacggctggcaaacacgcgagcgcgagctgttgcctcgggtaatgaccttaggagttatgttatcgctggataa

SEQ ID NO: 29117 - DNA, 3360 bp, Escherichia coli KTE161; identical to SEQ ID NO: 28647

SEQ ID NO: 29118 - DNA, 6345 bp, Escherichia coli KTE166; identical to SEQ ID NO: 28446

SEQ ID NO: 29119 - DNA, 3291 bp, Escherichia coli KTE166
ttgggtcaatcagaatacatttcatgggtaaaatgtacttcctggctaagtaactttgtgaatcttagagggttgagacaaccggatggacgtcctctttatgaatatcatgcaaccaatgctgaatataaccaattaacgcagctactctgtgctgttggtcaatcacaatctaatatatgtaatagagactttgctgcctgttttgttcttttttgctctgagtggtaccgcagggattatgaacggcaatgcggatggacgtgggaccctatatataaaaaaatagggatttcattcaccgccacagagcttggtactatcgtaccgaaagggatggaagatcactggctgcgcccaattcgattttatgaatctgaacgacgtaattttctcggaacattattcagtgaaggtggtttacctttccggctactcaaagaatcagacagtcgctttctggctgttttctccaggatccttggacaatatgagcaagcaaagcagtcaggtttttctgccctttcgctggcaagagctgtcatagaaaaatcagcgctgccaactgtttttagcgaagatacctctgtagaacttatcagtcatatggctgataacctcaattccttagtacttactcacaacctaacaaatcacaaagaaccagtacaacagcttgataaggttcaccctacctggcgaagcgagtttccaataccgttagatgatgaaacaggaacgcattttttgaatggactgctatgcgcagcctctgtagaggctaagcctcgactacaaaaaaataagagtacgcgttgccaattctattggtcagaaaagcatccagatgagcttagggtgatagtatctcttcctgacgaagtttcctttcctgtaactagcgagccgtcaactacgcgctttgaacttgccatttatgaagatggtgaggaagtctctggccttgggccagcctatgcttccctggaaaacagacaggcaacagttcgattacgtaaaagcgaagtgagatttgtcaggcaaaatccatctgcaggtttgtcgttagtggctcgtgctggagggatgattgttgggagcattaaacttgatgacagtgaaattgccattggtgaggtgccgttaaccttcatcgttgatgcagatcaatggctgttacagggacaggcctcctgcagtgtgcgaagcagcgatgttctgattgtgctccctcgggacaatagcactgttgctggttttgatggccaatcgagtgcagtaaacgtattaggacttaaagcgctacctgttaagggatgtcaggacgttacagttacagcaaatgaaacttatcggattcgcaccggaagagaacaaatcagcatcggaaggtttgctctaaatggaaagcgtgcaagctgggtttgtcatccagatgagacatttattggtgtaccaaaagtcatttctacactaccagatattcaaagcattgatgtaacgcgttacctgagcggaatttcaattgagcaatgtcatatacaagagatgctaggggctcaatatctttctatccgtaatagtaataatgaaacgctcttgcgtcgcaaaatcggtatcttgcctgctgatttcagtattgagataaaaggtggaatgcacgcaaatgaaggcactatcgtaatcaccacacagcatccttgtgtagcaacacttaaagataaaacattggaggctacacgtaagcgtactgaggggcgaacagagatacaactcaaagcggaaggggtacctccggcatttattacattacaagttctgcctaatttggcggctgataccatcgacattgagttacctttcccagctaaaggctgccttgctcttgatgtaaacggacgtcctctggataaaaacattacgctgcatgatctgctgggttccagagcattcctgttctccagaaatggtgagccgacaaaatatacattgcagttgcatttgcgctccattagtggattacaggcatggcacgaatggagttatacggcattgagcgagcgtcctgttgaattgaatctctatagtctacgtgaacacattgaaaatctgatttcacttgaggcaggtattgatcaggttgttgagatgcgtattacgggggcgggtgtggtcatggcctggcaaattcgtcgctataaatacagcctgcgctatgattatgaaaaagaactattactcagccagtcagtgaaccatcgtgctggacagattccttcccccgttatcatgctgttaagtgaacccgagaggaaatccattcccttagcatcaagaatgagcgagggagtgcctgtcggtgaatatgagttgagctcaatcgttaacaaaaacggaccatggttggttgttcctaaaccgggtgaagagatggcttttcgcccctgcttcattcgtggcgaatcttcgttaccggtagaagaaagcaacatccgctcattgcagaaagcgacccagctttttaatccacaggcagaagttaataccatcacacgggttctcggacagatggctaacgatcctgcccattccggctggcaatttatgcgtagcctgtacgatcaatttggttatttaccgctggcaacctttgaagtatggcgtgcactagtgcagcatccgcaggcattggcgatgtcgctcttcaaattcgaaatgtcagcagagtatctgagtcgtattgagaatgagttccctattttatgggagtttttccccatctttgagatcaaagctgcatctgagcgtttcaaattgttcctgagccaaaaaggtgcaccggaggaaacccagaaattactggttaccaatatgtttcaacggctggggctcgtgttcccgacatatgccgatgaaattgagaaatggttaagtaatggatatctccccccgtctattcctgaatcttgtgtccacgggtggtatcaggagctcttacgtgagcacagtgaagctcgctggcctgaatacggctgcaagcgtctgtataaatggatgatgtcacaaaaaaatccagtgattggtattaatcctgacgcaaatcaccgctattccgtggcctggttacccgtcttcgccgcagcggtggcaagcggaaatgcttcttttgaatctgtatttgaccgtaaacccggtgccgtatttttcctgaggcaagtcagggatttcgattcccgctggtttaaggccatcttccagttcagcctgttgcgttatgttgctaaaaaataa

SEQ ID NO: 29120 - DNA, 6345 bp, Escherichia coli KTE170
atgactacacgctatttttcgtcacttattgaacaatcgttgtctcgttcaactgaagcaacgctcagtatcatgggcgttaccaacccgcagctgcgtgaacatctcgcgcaacaaatgggggctgattgtgggaaaccgggctcattccttgcttctccggtattccagcaaatgtttggctggaaggagtcaaaccacacgatgcgcagcctgacggaaggcaacgcattgttgagcaaagcagtggttgattcactggatgatcagaataatggccggtaccggtttggtgctgactggaggccttttacgcaccagttagccagttggaaagctttgctggaaaagaaacattcagtggtggtaaccagtggtacgggttcaggtaaaacggaatgttttatggtaccggtgctggaagatctttaccgggaactgcatgaaaatggcaacaatccgttggtcggtgtccgagccctttttctctatccattgaacgccctgattaattcacagcgcgagcgtctggatgcctggacgcgtggttttggtacagggatccgctactgcctttacaacggcaacaccgaaaacctacacgcttcggtaaaaagcgaacaggcaaaaaggccgaatgaggtgctctcgcgcgaaaaaatgcgtgaagaacctgcgccgattctggtgaccaacggcacgatgctggaatatatgatggttcgccaggtcgacgccccgattatccagcaatctaaagcacaaaaatcactacgctggattgtactggatgaagcgcatacctatgtagggtcgcaggccgctgaactggcgctccagctgcgtcgtgtgatgaccgcgtttggcgtgacaccagatgacgtgcgctttgtcgcgacctctgcgaccattgccggcagcgacgctgaaaagcagctgaaaaaatttctctctgaattatccggtatcccgcaggagcgcatcgatgttctggacggaagtcgggtgattcctgaactggaaccatccaaaaacgtttctgttccgttagacgagatagagcaaatacctgatctggatctaagagataaaaatgataataaaattaaagggataagtcctgagcgcttttatgcgcttacgcattcccccgaagcgcgttacatacgtgagatgttggtcaaacagcccaatccgatgaagctggatgagataacagagcggttacacgtgctgacaaaacagcattacagccagcaggaagtactgcgttggatcgatgtctgttcagggactcaacctaatgcaaaggatcccgcatttcttaaagtcagggcgcatatcttccagcgtaatacccagggaatatgggcttgtgttgataaagattgcagattaaagcacggtacaccgctcgacaaaggctggccctttggctatgtgtatgtgaaccagcgacaaaattgtgactgtggaagccctgtatacgaagttgcattctgtaatgattgtaatgagcctcatcttctggcacgggacaaaaagggcaaactagtccagtgggaaaataaaggtggcgatgaattctctttgcaggatgaagtacctgttgaacatgacgctacagaagaaaaagtcgaaaaagagaacagttttcagcctccgttgattattgccgcaggagagaccagcgaggcaggttataccctacaacgcctcgaccgtcagacgcgccgtattggcgttattaacaatgacagcattccgctgattattaatgatattgaacaggtttgtagtgccagtggctgtggctacagaggcatgagtgggaaacagcccttccggcgtgcactattaggtgggccattttacgttactaatatcgtgcccaccgttctagagtattgtcaggactttaccagtgatgaaggcaaagagggcgtcggaccagattcgttgccaggacgaggtcgtcgactcatcacctttacagacagtcgacaagggacagcccgaatggcggtgcgtatgcagcaagaagcagaacgcagtcgcttacgcggaagcgtagtcgaaattctcagctggcatcaaaggacgcaaacgtctacagcgccgaatgccaatgccgatctggaaaaattagcggccagggcgaagcaagcccgtgagcaggcagaagaatatcgaagctggggaatgccagaccaggcgaaattgtcacaagcacaggctgaacagcttgaacaggcttatcaggctgcaaccggtgggaaagctgcgactatcctggtatcccgaacctggacggagatggttaacgagcttaaagagagagccgatatccgcgggccggttctgcaatataaccattatcttaagcctgaagtgtttaatgaaaacggcggcccccttaagctttctgaaatgttgttgttccgggaattcatgcgtcgccctaaacggactaacagcctggaaacacaggggctggttcaggttggttaccaggggctggagaaaatacataagagccccttgcactggcaggaaaaaggattaacgctggatgactggcgcgattttctcaaggttacgttggatcattacgttcgcgagagcaacttcacacagctggatgatgagctgaaaaactggattggtagccgtttttcatcaaaattcgtccgtaacccggaatcaaaagatcctgaagataatcagaacagacgctggcctcaaattcgtaatggcaacgtatcccatcgtttagcgaagttgctgatgctgggggctggattcaaaaccgtcaatgcggcaactattgatattatcaatacatggctgaaagaagcatgggcccaacttaccggaccgcttgcagtactgaaacccgatggcaaccgtttttatttaccgaaagagcatatgactttttctttaatcacggatgcctggatttgcccggtaaccaataaaatcctggatacggcttttaaaggcttaaccccttatctgcctacccatatttcgttcgagcatcttaccctggcgcaatatgacacttttgtcgcgcagaaagtcacaatgccggaaatctggaagctggatcgttcacaggaagactacgcagagggtctggcaaaagcacgcgactgggtcagccatgatccgctgatcgcacaattgcggtcggaaaacgtctggacagacattaacgatcgtgtcgtggaaggcggcttctactatcgtactgccgagcactctgcccagcagtcgtcagaacgtctgcaaagctatgaaaagatgttcaagaatgggcaactaaatgttctcaactgttccaccaccatggaaatgggggttgatatcgggggtattactgcggtggtaatgaacaacgtaccgccacatccggccaactatttacagcgcgccgggcgagccgggcgtagtaaagaatcacgcgcgatctcttacaccctatgtaaaggtaacccacacgaccagcaggtttttgccaacccgctctggccatttgaaaccatgatcccggcacccatggtcgcgatgaactccgcccgactggtgcaacgtcacgtcaatgcattattactgtccgactttttatgtaacgttattggcgaaaccgataaagaaaaaaccagcctcgatagcctctggtttttcggtgaagatgacgggcagtcaaaatgcgaacgctttaaaatctggctggaacgtccggttcttgatatcgacacggcgctggaacggctggtgaaaggtacggcgttgcatggtgcaagagccgaatatctgcgggataaaacaatcaacgcgatcaccttcctgcaacagcggtggctctccgtttatcgcgatctcgtgacacaggagcgtgagtcgcagccgcaaacgccttatcgtaagcgcatagagctggagaagaaacggcactgtggcgagtatctgctgcgcgatctggctgccagaaccttcctgccgggatacggtttcccgacagatgtagtgacgtttgataacttcacgatggaagattatatccgcgaaaaatcgcagaaaagtcgtgataaaaaggaccgtgaagataacgtttcccgttataaaggattaccttcccgtaacctcggtgttgccattcgtgaatatgcaccgggagcagagatcatccttgatggccgtgtcttccgctctgccggtgtctcactgcactggcacaacattaatgctgataccaatgaagcccagcgtctggattgcgcctggcgctgtcacaaatgcgggaccattggctatgaagaggggatgagcagttccgggatgctcttttgctccaatagcgcctgcggcgaaaaaataatcatggataatcgccgtcaggtgctgcagcctgccgggtttgtcaccgatgcacacgctccggtaacgaacaatattgaaaccatgaaattcgtcccggttgtccccgcgtgggtctttgttaaagcagagcccgtaccgttgcctaacccgctaatgggttatatggcttctggggctgatgggcatgttttccagcaaagtttgggggaaggtggacacggttatgcattgtgtctgagctgtggccgtgctgagtcgatgctgaatgaaaatgatgcgccgaaaagtatggaagctcactatccaccgcgtccgggtaaagcggatcgcgacagccagaatcatcgtctgatttgccccggttcgacggcactcatgaagaatgtcaccctgggcgcactggcgcgtaccgatgtctttgaaatggttctgcgcaaaccgcaaaacggcgagtatctgccagataacacagaggaggggcggattgttgccatgactctggcggttgctctgcgtcaggcgctggcgggcgttctgggtatctccgccgcagaactcggctattctgtacgtccggtcagactggaggatgggcaatcggtattagccgtacagctttatgatgtgatcagcggtggtgcaggttttgcctccagcgcaccggtacacattgaagctatattgcagggaatggtgaaacagttaggctgccgccattgtgagactgcatgtagtgaatgcctgcttgattcccagactcgccacgatcacgatttgctggatcgcaaagcggcgctggcctggcttggcgatgacttcacgtattacatcggtttaccggatgaagagacattctcgctgccggatgcccgctactgccctggcgccattggcgatacgattcgccgggcgattaacgaaggcgctgaaaagctcaccctgtggatgaccggcgcgcccaatgagtgggatttatacgcacgtcagttccgcgcggcggttcagaactatcggctaaaagacaacgtcgaggtcgatcttgttattcctacgggagtggatgacccggacctgttgcatgaactatcgcaatttactgcgctgggtgtgcggctgtgccatgttgaacaggatctgcaattaccgatcgttgcccaggtcacctttaccgatcgcgtgatgacgctggcctctcgcagccagcaggcaacgattccggggccggagtggcacctgaatgacgaactggtggtgcgtagtctcggttataaaacggtagaactgaacgagtttattctgccggctaaagccaccaacgctgtcgagcgggtcaaagacattcagatccacaaacagttgaatggaccactgtcgcagtttgggcaacgcttctgggacgtgctgtttaacgaccatgaagaagcgcagtcactgatgaataacacgcgaattaccggcgttcactataccgatcgctatctgcaaaacccggttgcgctggcgttgttgggatcaattctgagaccgctaaaaacaaagctgaccgatggcgctgaagtgacgctggatacgctatttaaagataaagatcgccccggtaaccggcctttccatgactggatgagcatagcggattttcaggatttcgctgatcagtggtttgctgctgcgctgggcaggccggtagaactgacggtgttcgactcgccgcgcgatatccctcaccatcgtaaactgacggtgacttttgaggatggtcaggtattgaagatccgcttcgatcaggggatgggctactggcgcatcaacttttcatcgcaatggcattactttcatttccgcgatgacgtttctttccagttagtcaaaatggctcaggcctgcaaggaagggaatgtcgccaacagcgaagagagttgggcaacggatgtgctggtggaggtgatcgcctcctga

SEQ ID NO: 29121 - DNA, 2685 bp, Escherichia coli KTE170
atggctgataacctcaattccttagtacttactcacaacctaataaatcacaaagaaccagtacaacagcttgagaaggttcaccctacctggcgaagcgagtttccaataccgttagatgatgaaacaggaacgcattttttgaatggactgctatgcgcagcctctgtagaggctaagcctcgactacaaaaaaataagagtacgcgttgccaattctattggtcagaaaagcatccagatgagcttagggtgatagtatctcttccggacgaagtttcctttcctgtaacaagcgagccgtcaactacgcgctttgaacttgccatttgtgaagatggtgaggaagtctctggccttgggccagcctatgcttctctggaaaacagacaggcaacagttcgattacgtaaaagcgaagtgagatttggcaggcaaaatccatcggcaggtttgtcgttagtggctcgtgctggagggatgattgttgggagcattaaacttgatgacagtgaaattgccattggtgaggtgccgttaaccttcatcgttgatgcagatcaatggctgttacagggacaggcttcttgcagtgtgcgaagcagcgatgttctgattgtgctccctcgggataatagcaatgttgctggttttgatggccaatcgagggcagtaaacgtattaggactaaaagcactacctgtgaagggatgtcaggacgttacagttacagcaaatgaaacttatcggattcgcaccggaagagaacaaatcagcatcggaaggtttgctctaaatggaaagcgtgcaagctgggtttgtcatccagatgaaacatttattggtgtaccaaaagtcatttctacactaccggatattcaaagcattgatgtaacgcgttacctgagcggaatttcaattgagcaatgtcatatacaagagatgctgggggctcaatatctttctatccgtaatagtaagaatgaaacgctcttgcgtcgcaaaatcggtattttgcctgctgatttcagtattgagataaaaggtggaatacacgcaaatgaaggcactatcgtaatcaccacacagcatccttgtgtagcaaaacttaaagataaaacattggaggctacacgtaagcgtactgaggggcgaacagagatacaactcaaagcggaaggggtacctccggcatttattacattacaagttctgcctaatttggcggctgaccccatcgatattgagttaccttttcccgctaaaggctgtctcgctcttgatgtaaacggacgtcctctggataaaaacattacgctgcatgatctgctgggttccagagcgtttctgttctccagaaatggcgagccgacaagatatacattgcagttgcatttgcgctccgttagtggattacaggcatggcacgaatggtgttatacggcgttgagcgatcgtcctgttgaattgaatctctatagtctgcgcgaacatattgagaacctgatttcacttgaggcaggtattgaccaggttgttgagatgcgtattacgggggcgggtgtggtcatggcctggcaaattcgtcgctataaatacagtctgcgctatgattatgaaaaagaactattactcagccagtcagtgaaccatcgtgctggacagattccttcccccgttatcatgctgttaagtgaacccgagaggaaatccatccccttagcatcaagaatgagcgagggagtgcctgtcggtgaatatgagttgagctcaatcgttaacaaaaatggaccgtggttggttgtccctaaaccgggtgaagagatggcttttcgtccctgcttcattcgtggcgaatcttcgttaccggtagaagaaagcaacatccgctcattgcagaaagcgacccagctttttaatccacaggcagaagttaataccatcacactggttctcggacagatggctaacgatcctgcccattccggctggcaatttatgcgtagcctgtacgatcaatttggttatttaccactggcaacctttgaagtatggcgtgcactggtgcagcatccgcaggcattggcaatgtcgctcttcaaatttgaaatgtcagcagagtacctgagtcgtattgagaatgagttccctattctatgggagtttttccccatctttgagatcaaagcggcatctgagcgtttcaaattgttcctgagccaaaaaggtgcaccggaggaaacccagaaattactggttactaatatgtttcaacggctggggctcgtgttcccgacatatgccgatgaaattgagaaatggttaagtaacggacatttccccccgtctattcctgagtcttttgtccacgtgtggtatcaggagcttttacgtgagcatagtgaagctcaatggccagagtacggcagcaagcggctgcatagctggatggcatcacaaaaaaatccagtgattggtattaatcctgacgcaaatcaccgctattccgtggccttgttacccgtcttcgctgcagctgtggcaagcggaaatgcttcttttgaatctgtatttgaccgtaaacccggtgccgtatttttcctgaggcaagtcagggatttcgattcccgctggtttaaggccatcttccagtgcagcctgttgcgttatgttgctaaaaaataa

SEQ ID NO: 29122 - DNA, 6345 bp, Escherichia coli KTE181; identical to SEQ ID NO: 28560

SEQ ID NO: 29123 - DNA, 3291 bp, Escherichia coli KTE181; identical to SEQ ID NO: 28561

SEQ ID NO: 29124 - DNA, 6345 bp, Escherichia coli KTE2; identical to SEQ ID NO: 28560

SEQ ID NO: 29125 - DNA, 3291 bp, Escherichia coli KTE2; identical to SEQ ID NO: 28561

SEQ ID NO: 29126 - DNA, 6345 bp, Escherichia coli KTE200; identical to SEQ ID NO: 28560

SEQ ID NO: 29127 - DNA, 3291 bp, Escherichia coli KTE200; identical to SEQ ID NO: 28561

SEQ ID NO: 29128 - DNA, 6315 bp, Escherichia coli KTE202; identical to SEQ ID NO: 28574

SEQ ID NO: 29129 - DNA, 3360 bp, Escherichia coli KTE202; identical to SEQ ID NO: 28647

SEQ ID NO: 29130 - DNA, 6345 bp, Escherichia coli KTE204; identical to SEQ ID NO: 28560

SEQ ID NO: 29131 - DNA, 3291 bp, Escherichia coli KTE204; identical to SEQ ID NO: 28561

SEQ ID NO: 29132 - DNA, 6345 bp, Escherichia coli KTE208; identical to SEQ ID NO: 28560

SEQ ID NO: 29133 - DNA, 3291 bp, Escherichia coli KTE208; identical to SEQ ID NO: 28561

SEQ ID NO: 29134 - DNA, 6345 bp, Escherichia coli KTE222; identical to SEQ ID NO: 28446

SEQ ID NO: 29135 - DNA, 3291 bp, Escherichia coli KTE222; identical to SEQ ID NO: 29119

SEQ ID NO: 29136 - DNA, 6345 bp, Escherichia coli KTE225; identical to SEQ ID NO: 29120

SEQ ID NO: 29137 - DNA, 2685 bp, Escherichia coli KTE225; identical to SEQ ID NO: 29121

SEQ ID NO: 29138 - DNA, 6345 bp, Escherichia coli KTE235; identical to SEQ ID NO: 28560

SEQ ID NO: 29139 - DNA, 3291 bp, Escherichia coli KTE235; identical to SEQ ID NO: 28561

SEQ ID NO: 29140 - DNA, 6345 bp, Escherichia coli KTE26; identical to SEQ ID NO: 28560

SEQ ID NO: 29141 - DNA, 3291 bp, Escherichia coli KTE26; identical to SEQ ID NO: 28561

SEQ ID NO: 29142 - DNA, 6345 bp, Escherichia coli KTE44
atgactacacgctatttttcgtcacttattgaacaatcgttgtctcgttcaactgaagcaacgctcagtatcatgggcgttaccaacccgcagttgcgtgaacatctcgcgcaacaaatgggggctgattgtgggaaaccgggctcattccttgcttctccggtattccagcaaatgtttggatggaaggagtcaaatcacacgatgcgcagcctgacggaaggcaacgcattgttgagcaaagcagtggttgattcactggataatcagagtaatggcaggtaccggtttggtgctgactggaagccttttacacaccagttagccagttggaaagctttgctggaaaagaaacattcagtggtggtaaccagtggtacgggttcaggtaaaacggaatgttttatggtaccggtgctggaagatctttaccgggaactgcatgaaaatggcaacaatccgttggtcggtgtccgagccctttttctctatccattgaacgccctgattaattcacagcgcgagcgtctggatgcctggacgcgtgggtttggtaccgggatccgctactgcctttacaacggcaacaccgaaaacctacacgcttcggtaaaaagcgaacaggcaaaaaggccgaatgaggtgctctcgcgcgaaaaaatgcgtgaagaacctgcgccgattctggtgaccaacggcacgatgctggaatatatgatggttcgccaggtcgacgccccgattatccagcaatctaaagcacaaaaatcactacgctggattgtactggatgaagcgcatacctatgtagggtcgcaggccgctgaactggcgctccagctgcgtcgtgtgatgaccgcgtttggcgtgacaccagatgacgtgcgctttgtcgcgacctctgcgaccattgccggcagcgacgctgaaaagcagctgaaaaaatttctctctgaattatccggtatcccgcaggagcgcatcgatgttctggacggaagtcgggtgattcctgaactggaaccatccaaaaacgtttctcttccgttagacgagatagagcaaatacctgatctggatttaagagataaaaatgataataaaattaaagggataagtcctgagcgcttttatgcgcttacgcattcccccgaagcgcgttacatacgtgagatgttggtcaaacagcccaatccgatgaagctggatgagataacagaacggttaaatgcgctgacaaaacagcattacagccagcaggaagtactgcgttggatcgatgtctgttcagggactcaacctaatgcaaaggatcccgcatttcttaaagtcagggcgcatatcttccagcgtaatacccagggaatatgggcttgtgttgataaagattgcagattaaagcacagtacaccgctcgaaaaaggctggccctttggctatgtgtatgtgaaccagcgacaaaattgtgactgtggaagccctgtgtacgaagttgcattctgcaatgattgtaatgagcctcatcttctggcacgggataaaaagggcaaactagtccagtgggaaaataaaggtggcgatgaattctctttgcaggatgaagtacctgttgaacatgacgctacagaagaaaaagtcgaaaaagagaacagttttcagcctccgttaattattgccgcaggagagaccagcgaggcaggttataccctacaacgcctcgaccgtcagacgcgccgtattggcgttattaacaatgacagcattccgctgattattaatgatattgaacaggtttgtagtgccagtggctgtggctacagaggcatgagtgggaaacagcccttccggcgtgcactattaggtgggccattttacgttactaatatcgtgcccaccgttctagagtattgtcaggactttaccagtgatgaaggcaaagagggcgtcggaccagattcgttgccaggacgaggtcgtcgactcatcacctttacagacagtcgacaagggacagcccgaatggcggtgcgtatgcagcaagaagcagaacgcagtcgcttacgcggaagcgtagtcgaaattctcagatggcatcaaaggacgcaaacgtctacagcgccgaatgccaatgccgatctggaaaaattagcggccagggcgaagcaagcccgtgagcaggcagaagaatatcgaagctggggaatgccagaccaggcgaaattgtcacaagcacaggctgaacagcttgaacaggcttatcaggctgcaaccggtgggaaagccgcgactatcctggtatcccgaacctggacggagatggttaacgagcttaaagagagagctgatatccgcgggccggttctgcaatataaccattatcttaagcctgaagtgtttaatgaaaacggcggcccccttaagctttctgaaatgttgttgttccgggaattcatgcgtcgccctaaacggactaacagcctggaaacacaggggctggttcaggttggttaccaggggctggagaaaatacataagagccccttgcactggcaggaaaaaggattaacgctggatgactggcgcgattttctcaaggttacgttggatctttatgttcgcgaaagcaacttcacacagctggatgatgagctgaaaaactggattggtagccgtttttcatcaaaattcgtccgtaacccggaatcaaaagatcctgaagataatcagaacagacgctggcctcaaattcgtaatggcaacgtatcccatcgtttagcgaagttactgatgctgggggctggattcaaaaccgtcaatacggcgactattgatattatcaatacatggctgaaagaagcatgggcccaacttaccgggccacttgcagtactgaaacccgatggcaaccgtttttatttaccgaaagagcatatgactttttctttaatcacggatgcctggatttgcccggtaaccaataaaatcctggatacggcttttaaaggcttaaccccttatctgcccacccatatttcgttcgagcatcttacccaggcgcaatatgacacttttgtcgcgcagaaagtcaccatgccggaaatctggaagctggatcgttcacaggaagactacgcagagggtctggcaaaagcacgagactgggtcaacaatgatccgctgatcgcacaattgcggtcggaaaacgtctggacagacatcaacgatcgtgtcgtggaaggcggtttctactatcgcactgccgagcactctgcccagcagtcgtcagaacgcctgcaaagctatgaaaagatgttcaagaacgggcaactaaatgttctcaactgttccaccaccatggaaatgggggttgatattgggggcattactgcggtggtaatgaacaacgttccgccacatccggccaactatttacagcgcgccgggcgagccgggcgtagtaaagaatcacgcgcgatctcttataccctatgcaaaggtaacccacacgaccagcaggtttttgccaacccactctggccatttgaaaccatgatcccggcacccatggtcgcgatgaactccgcccgactggtgcaacgtcacgtcaatgcattattactgtctgactttttatgtaacgttattggcgaaaccgataaagagaaaaccagcctcgatagcctctggtttttcggtgaagatgacgggcagtcaaaatgcgaacgctttaaagtctggctggaacgcccggttcttgatatcgacacggcgctggaacggctggtgaaaggtacggcgttgcatggcgcaagagccgaacatctgcgggataaaacaatcaatgcgatcaccttcctgcaacagcggtggctctccgtttatcgcgatctcgtgacccaggagcgagagtcgcagccgcaaacgccttatcgtaagcgcatagagctggagaagaaacggcactgtggcgagtatctgctgcgcgatctggctgccagaactttcctgccgggatacggtttcccgacagatgtagtgacgtttgataacttcacgatggaagattatatccgcgaaaaatcgcagaaaagtcgtgataaaaaggaccgtgaagataacgtctcccgttataaaggattaccttcccgtaacctcggtgttgccattcgtgaatatgcaccgggagcagagatcattcttgatggccgtgtcttccgctctgccggtgtctcactgcactggcacaacattaatgctgataccaatgaagcccagcgtctggattgcgcctggcgctgtcacaaatgcgggaccattggctatgaagaggggatgagcagttccgggatgctcttttgctccaacagcgcctgcggcgaaaaaataaccatggataatcgccgtcaggtgttgcagcctgccgggtttgtcaccgatgcacacgctccggtaacgaacaatattgaaaccatgaaattcgtcccggttgtccccgcctgggtctttgttaaagcagagcccgtaccgttgcctaacccgctaatgggttatatggcttctggggctgatgggcatgttttccagcaaagtctgggggaaggtggacacggttatgcattgtgtctgagctgtggccgtgcggagtcgatgctgaatgaaaatgatgctccgaaaagtatggaagctcactatcctccgcgtccgggtaaagcggaccgcgacagccagaatcatcgtctgatttgccccggttcgacagcactcatgaagaacgtcaccctgggcgcactggcgcgcaccgatgtctttgaaatggttctgcgcaaaccacaaaatggcgagtatctgccagataacacagaggaggggcggattgtcgccatgactctggcggttgctctgcgtcaggcgctggcaggcgttctgggtatctccgccgcagaactcggctattctgtacgtccggtcagactggaggatgggcaatcggtattagccgttcagctttatgatgtgatcagtggtggtgcaggttttgcctccagcgcaccggtacacattgaagctatattgcagggaatggtgaaacagttaggctgccgccattgtgatactgcatgtagtgaatgcctgcttgattcccagactcgccacgatcacgatttgctggatcgcaaagttgcgctggcctggcttggcgatgacttcacgtattacatcggtttaccggatgaagagacattctcgctgccggatgcccgctactgccctggcgctattggcgatacgattcgccgggcgattaacgaaggtgctgaaaagcttaccctatggatgaccggcgcgcccaatgagtgggatttatacgcccgtcagttccgcgcagctattcagagctatcggctaaaagacaacgtcgaggtcgatcttgttatccctgcgggagtggatgacccggatctattgcatgaactttcgcaatttactgcgctgggtgtgcggttgtgccatgttgagcaggagctgcaattaccgattgttgcccaggtcacctttgccgatcgcgtgatgacgctggcctctcgcagtcagcaggcaacgattccggggccggagtggcacctgaatgacgaactggtggtgcgtagtctcggttatcaaacggtagaactgaacgagtttattctgcccgctaaagccgccaacgctgtcgagcgggtcaaagacattcagatccacaaacagttgaatggaccactttcgcagtttgggcaacgcttctgggacgtgctgtttaacgaccatgaagaagcgcagtcactgatgaaaaacacgcgaattaccggcgttcactataccgatcgctatctgcaaaacccggttgcgctggcgttgttgggatcaattctgaaaccgctaaaaacaaagctgaccgatggcgctgaagtggcgctggatacgctgtttaaagataaagatcgccccggtaaccggcctttccatgactggatgagcatagcggattttcaggatttcgctgatcagtggtttgctgctgcgctgggcaggccgatagaactgacggtgttcgattcgccgcgcgatatccctcaccatcgtaaactgacggtgacttttgaggatggtcaggtattgaagatccgcttcgatcaggggatgggctactggcgcatcaactttgcatcgcaatggcattactttgatttccgcgatgacgtttctttccagttagtcaaaatggctcaggcctgcaaggaagggaatgtggccaacagcgaagagagctgggcaacggatgtgctggtggaggtgatcgcctcctga

SEQ ID NO: 29143 - DNA, 3291 bp, Escherichia coli KTE44
ttgggtcaatcagaatacatttcatgggtaaaatgtacttcctggctaagtaactttgtgaatcttagagggttgagacaaccggatggccgtcctctttatgaatatcatgcaaccaatgatgaatatacccaattaacgcagctactccgtgcagtcggtcaatcacaatctaatatatgtaatagggactttgctgcctgttttgttcttttttgctctgagtggtaccgcagggattatgaacggcaatgcggatggacgtgggaccctatatataaaaaaatagggatttcattcaccgccacagagcttggtactatcgtaccgaaagggatggaagattactggctgcgcccaattcgattttatgaatctgaacgacgcaattttctcggaacattattcagtgaaggtggtttacctttccggctactcaaagaatcagacagtcgctttctggctgttttctccaggatccttggacaatatgagcaagcaaagcagtcaggtttttcagccctttcgctggcaagagctgtcatagaaaaatcagcgctgccaactgtttttagcgaagatacctctgtagaacttatcagtcatatggctgataacctcaattccttagtacttactcacaacctaataaatcacaaagaaccagtacaacagcttgataaggttcaccctacctggcgaagcgagtttccaataccgttagatgatgaaacaggaacgcattttttgaatggactgctatgcgcagcctctgtagaggctaagcctcgactacaaaaaaataagagtacgcgttgccaattttattggtcagaaaagcatccagatgagcttagggcgatagtatctcttcctgacgaagtttcctttcctgtaacaagcgagccgtcaactacgcgctttgaacttgccatttgtgaagatggtgaggaagtctctggccttgggccagcctatgcttctctggaaaacagacaggcaacagttcgattacgtaaaagcgaagtgagatttggcaggcaaaatccatcggcaggtttgtcgttagtggctcgtgctggagggatgattgttgggagcattaaacttgatgacagtgaaattgccattggtgaggtgccgttaaccttcatcgttgatgcagatcaatggctgttacagggacaggcttcttgcagtgtgcgaagcagcgatgttctgattgtgctccctcgggataatagctatgttgctggttttgatggccaatcgagcgcagtaaacgtattaggactaaaagcactacctgttaagggatgtcaggtcgttacgattacagcaaatgaaacttatcggattcgcaccggaagagaacaaatcagcatcggaaggtttgctctaaatggaaagcgtgcaagctgggtttgtcatccagatgaaacatttattggtgtaccaaaagtcatttctacactaccagatattcaaagcattgatgtaacgcgttacctgagcggaatttcaattgagcaatgtcatatacaagagatgctgggggctcaatatctttctatccgtaatagtaagaatgaaacgctcttgcgtcgcaaaatcggtattttgcctgctgatttcagtattgagataaaaggtggaatacacgcaaatgaaggcactatcgtaatcaccacacagcatccttgtgtagcaaaacttaaagataaaacattggaggctacacgtaagcgtactgaggggcgaacagagatacaactcaaagcggaaggggtacctccggcatttattacattacaagttctgcctaatttggcggctgaccccatcgatattgagttaccttttcccgctaaaggctgtctcgctcttgatgtaaacggacgtcctctggataaaaacattacgctgcatgatctgctgggttccagagcgtttctgttctccagaaatggcgagccgacaaaatatacattgcagttatatttgcgctccgttagtggattacaggcatggcatgaatggtgttatacggcgttgagcgatcgtcctgttgaattgaatctctatagtctgcgcgaacatattgagaacctgatttcacttgaggcaggtattgatcaggttgttgagatgcgtattacgggggcaggtgtggtcatggcctggcaaattcgtcgctataaatacagcctgcgctatgattatgaaaaagaactattactcagccagtcagtgaaccatcgtgctgggcagattccttcccccgttatcatgctgttaagtgaacccgagaggaaatccattcccttagcatctagaatgagcgagggagtgcctgtcggtgaatatgagttgagctcaatcgttaacaaaaatgggccatggttggttgttcctaaaccgggtgaggagatggcttttcgtccctgcttcattcgtggcgaatattcgttaccggtagaagaaagcaacatccgctcattgcagaaagcgacccagctttttaatccacaggcagaagttaataccatcacactggttctcggacagatggctaacgatcctgcccattccggctggcaatttatgcgtagcctgtacgatcaattcgggtatttaccactggcaacctttgaagtatggcgtgcactggtgcagcatccgcaggcattggcaatgtcgctcttcaaatttgaaatgtcagcagagtacctgagtcgtattgagaatgagttccctattctatgggagtttttccccatctttgagatcaaagcggcatctgagcgtttcaaattgttcctgagccaaaaaggtgcaccggaggaaacccagaaattactggttactaatatgtttcaacggctggggctcgtgttcccgacatatgccgatgaaattgagaaatggttaagtaacggatatctccccccatctattcctgagtcttttgtccacgtgtggtatcaggagcttttacgtgagcatagtgaagctcaatggccagagtacggcagcaagcggctgcatagctggatggcatcacaaaaaaatccagttattggtattaatcctgacgcaaatcaccgctattccgtggccttgttacccgtcttcgctgcagctgtggcaagcggaaatgcttcttttgaatctgtatttgaccgtaaacccggtgccgtatttttcctgaggcaagtcagggatttcgattcccgctggtttaaggccatcttccagtgcagcctgttgcgttatgttgctaaaaaataa

SEQ ID NO: 29144 - DNA, 6315 bp, Escherichia coli KTE50; identical to SEQ ID NO: 28574

SEQ ID NO: 29145 - DNA, 3360 bp, Escherichia coli KTE50; identical to SEQ ID NO: 28647

SEQ ID NO: 29146 - DNA, 4755 bp, Escherichia coli KTE51
ttgcaggatgaagtacctgttgaacatgacactacagaggaaaaagtcgaaaaagagaacggtttcctgcctccgttgattattgccgcaggagagaccagcgagacaggctataccctacaacgcctcgaccaccagacgcgccgtattggcgttattaacaatgacagcattccgctgattattaatgatgttgaacaggtttgtagcgccagtggctgtggctacagaggcatgagtgggaaacagcccttccggcgtgcactattaggtgggccattttacgttactaatatcgtgcccaccgttcttgagtattgtcaggactttaccagtgatgaaggcaaagagggcgtcggaccagattcgttgccagggcgaggacgtcgactcattacctttacggacagtcgacaaggtacagctcgaatggcggtgcgtatgcagcaagaagcagaacgcagtctcttacgcggaagcgtagtcgaaattctgagctggcatcaacggacgcaaacgtccacggcgccgaatgccaatgccgatctggaaaaattagcggccagggcaaagcaagcccgtgagcaggcagaagaatatcgaagctggggaatgccagaccaggcgaaattgtcacaagcacaggctgaacagcttgaacaggcttatcaggctgcaaccggtggaaaagcagcaactaccctggtatcccgcacctggacagaaatggttaacgagcttaaagataaagccgatatccgtggcccggtactgaaatataaccactatttgcagcctgaagtgtttaataaaaacggcgggccactaaagctttcggaaatgttgttgttccgggaattcatgcgtcgccctaaacggactaacagcctggaaacacaggggctggttcaggttggttaccaggggctggagaaaatacataagagccccttgcactggcaggaaaaaggattaacgctggatgactggcgcgattttctcaaggttacgttggatctttatgttcgcgaaagcaacttcacacagctggatgatgagctgaaaaactggattggtagccgtttttcatcaaaattcgtccgtaacccggaatcaaaagatcctgaagataatcagaacagacgctggcctcaaattcgtaatggcaacgtatcccatcgtttagcgaagttactgatgctgggggctggattcaaaaccgtcaatacggcgactattgatattatcaatacatggctgaaagaagcatgggcccaacttaccggaccacttgcagtactgaaacccgatggcaaccgtttttatttaccgaaagagcatatgactttttctttaatcacggatgcctggatttgcccggtaaccaataaaatcctggatacggcttttaaaggcttaaccccttatctgcccacccatatttcgttcgagcatcttacccaggcgcaatatgacacttttgtcgcgcagaaagtcaccatgccggaaatctggaagctggatcgttcacaggaagactacgcagagggtctggcaaaagcacgagactgggtcaacaatgatccgctgatcgcacaattgcggtcggaaaacgtctggacagacatcaacgatcgtgtagtggaaggcggtttctactatcgcactgccgagcactctgcccagcagtcgtcagaacgcctgcaaagctatgaaaagatgttcaagaacgggcaactaaatgttctcaactgttccaccaccatggaaatgggggttgatattgggggcattactgcggtggtaatgaacaacgttccgccacatccggccaactatttacagcgcgccgggcgagccgggcgtagtaaagaatcacgcgcgatctcttataccctatgcaaaggtaacccacacgaccagcaggtttttgccaacccactctggccatttgaaaccatgatcccggcacccatggtcgcgatgaactccgcccgactggtgcaacgtcacgtcaatgcattattactgtctgactttttatgtaacgttattggcgaaaccgataaagagaaaaccagcctcgatagcctctggtttttcggtgaagatgacgggcagtcaaaatgcgaacgctttaaagtctggctggaacacccggttcttgatatcgacacggcgctggaacggctggtgaaaggtacggcgttgcatggcgcaagagccgaacatctgcgggataaaacaatcaatgcgatcaccttcctgcaacagcggtggctctccgtttatcgcgatctcgtgacccaggagcgtgagtcgcagccgcaaacgccttatcgtaagcgcatagagctggagaagaaacggcactgtggcgagtatctgctgcgcgatctggctgccagaaccttcctgccgggatacggtttcccgacagatgtagtgacgtttgataacttcacgatggaagattatatccgcgaaaaatcgcagaaaagtcgtgataaaaaggaccgtgaagataacgtctcccgttataaaggattaccttcccgtaacctcggtgttgccattcgtgaatatgcaccgggagcagagatcattcttgatggtcgtgtcttccgctctgccggtgtctcactgcactggcacaacattaatgctgataccaatgaagcccagcgtctggattgcgcctggcgctgtcacaaatgcgggaccattggctatgaagaggggatgagcagttccgggatgctcttttgctccaacagcgcctgcggcgaaaaaataaccatggataatcgccgtcaggtgttgcagcctgccgggtttgtcaccgatgcacacgctccggtaacgaacaatattgaaaccatgaaattcgtcctggttgtccccgcgtgggtctttgttaaagcagagcccgtaccgttgcctaacccgctaatgggttatatggcttctggggctgatgggcatgttttccagcaaagtttgggggaaggtggacacggttatgcattgtgtctgagctgtggccgtgcggagtcgatgctgaatgaaaatgatgcaccgaaaagtatggaagctcactatccaccgcgtccgggtaaagcggaccgcgacagccagaatcatcgtctgatttgccccggttcgacggcactcatgaagaacgtcaccctgggcgcactggcgcgcaccgatgtctttgaaatggttctgcgcaaaccgcaaaacggcgagtatctgccagataacacagaagaggggcggattgtcgctatgactctggcggttgctctgcgtcaggcgctggcaggcgttctgggtatctccgccgcagaactcggctattctgtacgtccggtcagactggaggatgggcaatcggtattagccgttcagctttatgatgtgatcagcggtggtgctggttttgcctccagcgcaccggtacatattgaagctatattgcagggaatggtgaaacagttaggctgccgccattgtgatactgcatgcagtgaatgtctgcttgattcccagactcgccacgatcacgatttgctggatcgcaaagtggcgctggcttggcttggcgatgacttcacgtattacatcggtttaccggatgaagagacattctcgctgccggatgcccgctactgccctggcgctattggcgatacgattcgccgggcgattaacgaaggcgctgaaaagctcaccctgtggatgactggcgcgcccaatgagtgggatttatacgcccgtcagttccgcgcggctattcagagctatcggctaaaagacaacgtcgaggtcgatcttgttattcctgcgggagtggatgacccagacctgttgcatgaactatcgcaatttactgcgctgggtgtgcggttgtgccatgttgagcaggagctgcaattaccgattgttgcccaggtcacctttgccgaacgcgtgatgacgctggcctctcgcagtcagcaggcaacgattccggggccggagtggcacctgaatgacgaactggtggtgcgtagtctcggttatcaaacggtagaactgaacgagtttattctgcccgctaaagccgccaacgctgtcgagcgggtcaaagacattcagatccacaaacagttgaatggaccactttcgcagtttgggcaacgcttctgggacgtgctgtttaacgaccatgaagaagcgcagtcactgatgaaaaacacgcgaattaccggcgttcactataccgatcgctatctgcaaaacccggttgcgctggcgttgttgggatcaattctgaaaccgctaaaaacaaagctgaccgatggcgctgaagtggcgctggatacgctgtttaaagataaagatcgccccggtaaccggcctttccatgactggatgagcatagcggattttcaggatttcgctgatcagtggtttgctgctgcgctgggcaggccgatagaactgacggtgttcgattcgccgcgcgatatccctcaccatcgtaaactgacggtgacttttgaggatggtcaggtattgaagatccgcttcgatcaggggatgggctactggcgcatcaactttgcatcgcaatggcattactttgatttccgcgatgacgtttctttccagttagtcaaaatggctcaggcctgcaaggaagggaatgtggccaacagcgaagagagctgggcaacggatgtgctggtggaggtgatcgcctcctga

SEQ ID NO: 29147 - DNA, 666 bp, Escherichia coli KTE51
ttgggtcaatcagaatacatttcatgggtaaaatgtacttcctggctaagtaactttgtgaatcttagagggttgagacaaccggatggacgtcctctttatgaatatcatgcaaccaatgctgaatataaccaattaacgcagctactctgtgctgttggtcaatcacaatctaatatatgtaatagagactttgctgcctgttttgttcttttttgctctgagtggtaccgcagggattatgaacggcaatgcggatggacgtgggaccctatatataaaaaaatagggatttcattcaccgccacagagcttggtactatcgtaccgaaagggatggaagattactggctgcgcccaattcgattttatgaatctgaacgacgtaattttctcggaacattattcagtgaaggtggtttacctttccggctactcaaagaatcagacagtcgctttctggctgttttctccaggatccttggacaatatgagcaagcaaagctgaaccgccccgggtttcctggagagtattttatctgtgaactcaggctgccagatcatcgtttccgatggaagcataataagctttttctgcttctgccggaggagtatggcccagcctttccagcaatcgtcgattgttataccagtccacccacgtga

SEQ ID NO: 29148 - DNA, 6345 bp, Escherichia coli KTE56; identical to SEQ ID NO: 28446

SEQ ID NO: 29149 - DNA, 3291 bp, Escherichia coli KTE56; identical to SEQ ID NO: 28447

SEQ ID NO: 29150 - DNA, 6345 bp, Escherichia coli KTE68; identical to SEQ ID NO: 28560

SEQ ID NO: 29151 - DNA, 3291 bp, Escherichia coli KTE68; identical to SEQ ID NO: 28561

SEQ ID NO: 29152 - DNA, 6345 bp, Escherichia coli KTE81
atgactacacgctatttttcgtcacttattgaacaatcgttgtctcgttcaactgaagcaacgctcagtatcatgggcgttaccaacccgcagctgcgtgaacatctcgcgcaacaaatgggggctgattgtgggaaaccgggctcattccttgcttctccggtattccagcaaatgtttggatggaaggagtcaaatcacacgatgcgcagcctgacggaaggcaacgcattgttgagcaaagcagtggttgattcactggataatcagagtaatggcaggtaccggtttggtgctgactggaagccttttacacaccagttagccagttggaaagctttgctggaaaagaaacattcagtggtggtaaccagtggtacgggttcaggtaaaacggaatgttttatggtaccggtgctggaagatctttaccgggaactgcatgaaaatggcaacaatccgttggtcggtgtccgagccctttttctctatccattgaacgccctgattaattcacagcgcgagcgtctggatgcctggacgcgtgggtttggtaccgggatccgctactgcctttacaacggcaacaccgaaaacctacacgcttcggtaaaaagcgaacaggcaaaaaggccgaatgaggtgctctcgcgcgaaaaaatgcgtgaagaacctgcgccgattctggtgaccaacggcacgatgctggaatatatgatggttcgccaggtcgacgccccgattatccagcaatctaaagcacaaaaatcactacgctggattgtactggatgaagcgcatacctatgtagggtcgcaggccgctgaactggcgctccagctgcgtcgtgtgatgaccgcgtttggcgtgacaccagatgacgtgcgctttgtcgcgacctctgcgaccattgccggcagcgacgctgaaaagcagctgaaaaaatttctctctgaattatccggtatcccgcaggagcgcatcgatgttctggacggaagtcgggtgattcctgaactggaaccatccaaaaacgtttctcttccgttagacgagatagagcaaatacctgatctggatttaagagataaaaatgataataaaattaaagggataagtcctgagcgcttttatgcgcttacgcattcccccgaagcgcgttacatacgtgagatgttggtcaaacagcccaatccgatgaagctggatgagataacagaacggttaaatgcgctgacaaaacagcattacagccagcaggaagtactgcgttggatcgatgtctgttcagggactcaacctaatgcaaaggatcccgcatttcttaaagtcagggcgcatatcttccagcgtaatacccagggaatatgggcttgtgttgataaagattgcagattaaagcacagtacaccgctcgaaaaaggctggccctttggctatgtgtatgtgaaccagcgacaaaattgtgactgtggaagccctgtgtacgaagttgcattctgcaatgattgtaatgagcctcatcttctggcacgggataaaaagggcaaactagtccagtgggaaaataaaggtggcgatgaattctctttgcaggatgaagtacctgttgaacatgacgctacagaagaaaaagtcgaaaaagagaacagttttcagcctccgttaattattgccgcaggagagaccagcgaggcaggttataccctacaacgcctcgaccgtcagacgcgccgtattggcgttattaacaatgacagcattccgctgattattaatgatattgaacaggtttgtagtgccagtggctgtggctacagaggcatgagtgggaaacagcccttccggcgtgcactattaggtgggccattttacgttactaatatcgtgcccaccgttctagagtattgtcaggactttaccagtgatgaaggcaaagagggcgtcggaccagattcgttgccaggacgaggtcgtcgactcatcacctttacagacagtcgacaagggacagcccgaatggcggtgcgtatgcagcaagaagcagaacgcagtcgcttacgcggaagcgtagtcgaaattctcagctggcatcaaaggacgcaaacgtctacagcgccgaatgccaatgccgatctggaaaaattagcggccagggcgaagcaagcccgtgagcaggcagaagaatatcgaagctggggaatgccagaccaggcgaaattgtcacaagcacaggctgaacagcttgaacaggcttatcaggctgcaaccggtgggaaagccgcgactatcctggtatcccgaacctggacggagatggttaacgagcttaaagagagagctgatatccgcgggccggttctgcaatataaccattatcttaagcctgaagtgtttaatgaaaacggcggcccccttaagctttctgaaatgttgttgttccgggaattcatgcgtcgccctaaacggactaacagcctggaaacacaggggctggttcaggttggttaccaggggctggagaaaatacataagagccccttgcactggcaggaaaaaggattaacgctggatgactggcgcgattttctcaaggttacgttggatctttatgttcgcgaaagcaacttcacacagctggatgatgagctgaaaaactggattggtagccgtttttcatcaaaattcgtccgtaacccggaatcaaaagatcctgaagataatcagaacagacgctggcctcaaattcgtaatggcaacgtatcccatcgtttagcgaagttactgatgctgggggctggattcaaaaccgtcaatacggcgactattgatattatcaatacatggctgaaagaagcatgggcccaacttaccgggccacttgcagtactgaaacccgatggcaaccgtttttatttaccgaaagagcatatgactttttctttaatcacggatgcctggatttgcccggtaaccaataaaatcctggatacggcttttaaaggcttaaccccttatctgcccacccatatttcgttcgagcatcttacccaggcgcaatatgacacttttgtcgcgcagaaagtcaccatgccggaaatctggaagctggatcgttcacaggaagactacgcagagggtctggcaaaagcacgagactgggtcaacaatgatccgctgatcgcacaattgcggtcggaaaacgtctggacagacatcaacgatcgtgtcgtggaaggcggtttctactatcgcactgccgagcactctgcccagcagtcgtcagaacgcctgcaaagctatgaaaagatgttcaagaacgggcaactaaatgttctcaactgttccaccaccatggaaatgggggttgatattgggggcattactgcggtggtaatgaacaacgttccgccacatccggccaactatttacagcgcgccgggcgagccgggcgtagtaaagaatcacgcgcgatctcttataccctatgcaaaggtaacccacacgaccagcaggtttttgccaacccactctggccatttgaaaccatgatcccggcacccatggtcgcgatgaactccgcccgactggtgcaacgtcacgtcaatgcattattactgtctgactttttatgtaacgttattggcgaaaccgataaagagaaaaccagcctcgatagcctctggtttttcggtgaagatgacgggcagtcaaaatgcgaacgctttaaagtctggctggaacgcccggttcttgatatcgacacggcgctggaacggctggtgaaaggtacggcgttgcatggcgcaagagccgaacatctgcgggataaaacaatcaatgcgatcaccttcctgcaacagcggtggctctccgtttatcgcgatctcgtgacccaggagcgtgagtcgcagccgcaaacgccttatcgtaagcgcatagagctggagaagaaacggcacggtggcgagtatctgctgcgcgatctggctgccagaaccttcctgccgggatacggtttcccgacagatgtagtgacgtttgataacttcacgatggaagattatatccgcgaaaaatcgcagaaaagtcgtgataaaaaggaccgtgaagataacgtctcccgttataaaggattaccttcccgtaacctcggtgttgccattcgtgaatatgcaccgggagcagagatcattcttgatggccgtgtcttccgctctgccggtgtctcactgcactggcacaacattaatgctgataccaatgaagcccagcgtctggattgcgcctggcgctgtcacaaatgcgggaccattggctatgaagaggggatgagcagttccgggatgctcttttgctccaacagcgcctgcggcgaaaaaataaccatggataatcgccgtcaggtgttgcagcctgccgggtttgtcaccgatgcacacgctccggtaacgaacaatattgaaaccatgaaattcgtcccggttgtccccgcctgggtctttgttaaagcagagcccgtaccgttgcctaacccgctaatgggttatatggcttctggggctgatgggcatgttttccagcaaagtctgggggaaggtggacacggttatgcattgtgtctgagctgtggccgtgcggagtcgatgctgaatgaaaatgatgctccgaaaagtatggaagctcactatcctccgcgtccgggtaaagcggaccgcgacagccagaatcatcgtctgatttgccccggttcgacagcactcatgaagaacgtcaccctgggcgcactggcgcgcaccgatgtctttgaaatggttctgcgcaaaccacaaaatggcgagtatctgccagataacacagaggaggggcggattgtcgccatgactctggcggttgctctgcgtcaggcgctggcaggcgttctgggtatctccgccgcagaactcggctattctgtacgtccggtcagactggaggatgggcaatcggtattagccgttcagctttatgatgtgatcagtggtggtgcaggttttgcctccagcgcaccggtacacattgaagctatattgcagggaatggtgaaacagttaggctgccgccattgtgatactgcatgtagtgaatgcctgcttgattcccagactcgccacgatcacgatttgctggatcgcaaagttgcgctggcctggcttggcgatgacttcacgtattacatcggtttaccggatgaagagacattctcgctgccggatgcccgctactgccctggcgctattggcgatacgattcgccgggcgattaacgaaggtgctgaaaagcttaccctatggatgaccggcgcgcccaatgagtgggatttatacgcccgtcagttccgcgcagctattcagagctatcggctaaaagacaacgtcgaggtcgatcttgttatccctgcgggagtggatgacccggatctattgcatgaactttcgcaatttactgcgctgggtgtgcggttgtgccatgttgagcaggagctgcaattaccgattgttgcccaggtcacctttgccgatcgcgtgatgacgctggcctctcgcagtcagcaggcaacgattccggggccggagtggcacctgaatgacgaactggtggtgcgtagtctcggttatcaaacggtagaactgaacgagtttattctgcccgctaaagccgccaacgctgtcgagcgggtcaaagacattcagatccacaaacagttgaatggaccactttcgcagtttgggcaacgcttctgggacgtgctgtttaacgaccatgaagaagcgcagtcactgatgaaaaacactcgaattaccggcgttcactataccgatcgctatctgcaaaacccggttgcgctggcgttgttgggatcaattctgaaaccgctaaaaacaaagctgaccgatggcgctgaagtggcgctggatacgctgtttaaagataaagatcgccccggtaaccggcctttccatgactggatgagcatagcggattttcaggatttcgctgatcagtggtttgctgctgcgctgggcaggccgatagaactgacggtgttcgattcgccgcgcgatatccctcaccatcgtaaactgacggtgacttttgaggatggtcaggtattgaagatccgcttcgatcaggggatgggctactggcgcatcaactttgcatcgcaatggcattactttgatttccgcgatgacgtttctttccagttagtcaaaatggctcaggcctgcaaggaagggaatgtggccaacagcgaagagagctgggcaacggatgtgctggtggaggtgatcgcctcctga

SEQ ID NO: 29153 - DNA, 3291 bp, Escherichia coli KTE81
ttgggtcaatcagaatacatttcatgggtaaaatgtacttcctggctaagtaactttgtgaatcttagagggttgagacaaccggatggccgtcctctttatgaatatcatgcaaccaatgatgaatatacccaattaacgcagctactccgtgcagtcggtcaatcacaatctaatatatgtaatagggactttgctgcctgttttgttcttttttgctctgagtggtaccgcagggattatgaacggcaatgcggatggacgtgggaccctatatataaaaaaatagggatttcattcaccgccacagagcttggtactatcgtaccgaaagggatggaagattactggctgcgcccaattcgattttatgaatctgaacgacgcaattttctcggaacattattcagtgaaggtggtttacctttccggctactcaaagaatcagacagtcgctttctggctgttttctccaggatccttggacaatatgagcaagcaaagcagtcaggtttttcagccctttcgctggcaagagctgtcatagaaaaatcagcgctgccaactgtttttagcgaagatacctctgtagaacttatcagtcatatggctgataacctcaattccttagtacttactcacaacctaataaatcacaaagaaccagtacaacagcttgataaggttcaccctacctggcgaagcgagtttccaataccgttagatgatgaaacaggaacgcattttttgaatggactgctatgcgcagcctctgtagaggctaagcctcgactacaaaaaaataagagtacgcgttgccaattttattggtcagaaaagcatccagatgagcttagggcgatagtatctcttcctgacgaagtttcctttcctgtaacaagcgagccgtcaactacgcgctttgaacttgccatttgtgaagatggtgaggaagtctctggccttgggccagcctatgcttctctggaaaacagacaggcaacagttcgattacgtaaaagcgaagtgagatttggcaggcaaaatccatcggcaggtttgtcgttagtggctcgtgctggagggatgattgttgggagcattatacttgatgacagtgaaattgccattggtgaggtgccgttaaccttcatcgttgatgcagatcaatggctgttacagggacaggcttcttgcagtgtgcgaagcagcgatgttctgattgtgctccctcgggataatagctatgttgctggttttgatggccaatcgagcgcagtaaacgtattaggactaaaagcactacctgttaagggatgtcaggtcgttacgattacagcaaatgaaacttatcggattcgcaccggaagagaacaaatcagcatcggaaggtttgctctaaatggaaagcgtgcaagctgggtttgtcatccagatgaaacatttattggtgtaccaaaagtcatttctacactaccagatattcaaagcattgatgtaacgcgttacctgagcggaatttcaattgagcaatgtcatatacaagagatgctgggggctcaatatctttctatccgtaatagtaagaatgaaacgctcttgcgtcgcaaaatcggtattttgcctgctgatttcagtattgagataaaaggtggaatacacgcaaatgaaggcactatcgtaatcaccacacagcatccttgtgtagcaaaacttaaagataaaacattggaggctacacgtaagcgtactgaggggcgaacagagatacaactcaaagcggaaggggtacctccggcatttattacattacaagttctgcctaatttggcggctgaccccatcgatattgagttaccttttcccgctaaaggctgtctcgctcttgatgtaaacggacgtcctctggataaaaacattacgctgcatgatctgctgggttccagagcgtttctgttctccagaaatggcgagccgacaaaatatacattgcagttatatttgcgctccgttagtggattacaggcatggcatgaatggtgttatacggcgttgagcgatcgtcctgttgaattgaatctctatagtctgcgcgaacatattgagaacctgatttcacttgaggcaggtattgatcaggttgttgagatgcgtattacgggggcaggtgtggtcatggcctggcaaattcgtcgctataaatacagcctgcgctatgattatgaaaaagaactattactcagccagtcagtgaaccatcgtgctgggcagattccttcccccgttatcatgctgttaagtgaacccgagaggaaatccattcccttagcatctagaatgagcgagggagtgcctgtcggtgaatatgagttgagctcaatcgttaacaaaaatgggccatggttggttgttcctaaaccgggtgaggagatggcttttcgtccctgcttcattcgtggcgaatattcgttaccggtagaagaaagcaacatccgctcattgcagaaagcgacccagctttttaatccacaggcagaagttaataccatcacactggttctcggacagatggctaacgatcctgcccattccggctggcaatttatgcgtagcctgtacgatcaattcgggtatttaccactggcaacctttgaagtatggcgtgcactggtgcagcatccgcaggcattggcaatgtcgctcttcaaatttgaaatgtcagcagagtacctgagtcgtattgagaatgagttccctattctatgggagtttttccccatctttgagatcaaagcggcatctgagcgtttcaaattgttcctgagccaaaaaggtgcaccggaggaaacccagaaattactggttactaatatgtttcaacggctggggctcgtgttcccgacatatgccgatgaaattgagaaatggttaagtaacggatatctccccccatctattcctgagtcttttgtccacgtgtggtatcaggagcttttacgtgagcatagtgaagctcaatggccagagtacggcagcaagcggctgcatagctggatggcatcacaaaaaaatccagttattggtattaatcctgacgcaaatcaccgctattccgtggccttgttacccgtcttcgctgcagctgtggcaagcggaaatgcttcttttgaatctgtatttgaccgtaaacccggtgccgtatttttcctgaggcaagtcagggatttcgattcccgctggtttaaggccatcttccagtgcagcctgttgcgttatgttgctaaaaaataa

SEQ ID NO: 29154 - DNA, 6345 bp, Escherichia coli KTE82; identical to SEQ ID NO: 28560

SEQ ID NO: 29155 - DNA, 3291 bp, Escherichia coli KTE82; identical to SEQ ID NO: 28561

SEQ ID NO: 29156 - DNA, 6345 bp, Escherichia coli KTE83; identical to SEQ ID NO: 28560

SEQ ID NO: 29157 - DNA, 3291 bp, Escherichia coli KTE83; identical to SEQ ID NO: 28561

SEQ ID NO: 29158 - DNA, 6345 bp, Escherichia coli M718; identical to SEQ ID NO: 28486

SEQ ID NO: 29159 - DNA, 3339 bp, Escherichia coli M718; identical to SEQ ID NO: 28605

SEQ ID NO: 29160 - DNA, 6315 bp, Escherichia coli M919; identical to SEQ ID NO: 28456

SEQ ID NO: 29161 - DNA, 3360 bp, Escherichia coli M919
ttgcttgtgaaaactccagttaacccacttttgcaatggcttaacatgttttttagtcgccgttcattatccggagctgatggacgggcgttatatgcttaccgttgtactgatacagagtacgaaagtttggcagaactactgcgtacatatgccccccgtagttatccaagaacgatattcatttcctatagcgatgttctatttagcatatatgccgcagagtttatccgccggactcatacggtcggacaccctaaatgggacacaattttagattctattaactggaaagttccgtatgttcatcgacagaagctggttaatgatggcattcgctactggaaaagaaagataagaaatctgggacaagcttcgggttatctgcatacactggcttgtgaaggtggtttgcctatccgcatgattgaaaatgagagcggttatttgattacctatttcagaaggatatatcaggcgcttcgtgggcaatcatctcaatatcctgccgctaaaattgcacaagaattaggcgatacgattcctgtcacaatgcaaaacgaactggtctatgaaatagccggtgaattctgcgagactctctgccgattacttagtgagcatcctcctcatagcagtgatcccgtttctgcattacgtaagctctctccagactggcatcttcaacttccactcgttctccccgaagcgaatgctgcagagattgtaaggcgattactttctcaatcttctgaaatacgcagtgcaagtagtcttcaggttgaaagaatctgggtcgatgttgatgacagttggtattgcgatgcccggttccgattcccggccacaatgcgtacagaacagttaacctctttgtttgaatgccatattcagccggagcagacccgactcatcatttcaggaaaatggaaaaatggcggggcaaggttggcaatgctaagccgttatgagcagcaagattggcgggtcgagttattacctattgcgatgcaaaaactctctggtgcagatgcaatggccgaaatctcattgtcgcttcatgaaggtccaattctgttaggtcacacaattccaaaaggcggttatgaacttactgaagaacttccctgggtttttgaagcgatgaatgagagtgaatcgcagctaaaacttgttggtatggggtctgtgagttccaggctaaatgctctgtttatttcgctaccgaaaaatagccatttagatattagtggagaaggtgagtttgatatcccaaggttgctgaaaaacagtgaacgcagcttaactaaaataagtggagtatttagcgttgttttacatgatggtgctgtttgtacaattcgcacccagcaactttatgattctgcgattgaatattatattaaatcgacagaagttgaactggttaaatcggattatcctgtccatcgagcctggccgaagatcggttggaaaaaggatctgcaatatggcattgtaccggagaaagaacttttttggcgttccattcgttcaggtaataatgcctggtattctgtcgcatcagaaatgccaaaaggacagatagaagtccggcgaatagttaatgatgaggttttatttagcggtaaagttgtagttttaccagcagacttcgatattaatattatacctgagagtgctctgcaaggcattattatgctttctggtataacggatactagaattgataaatattcaaacaatgaaaaagtaacacttaagtccgattattcacaaaacgagtgtgctatttattataattcatcgctgatgctggaaaataccgttgatttacgggtctcctggaaagatggttctaatcttaaactattattacctaagccggttagcggtggccgatttgtaactaatgatggttctgttcattttgatggtgtggcatctatagcacatttgcatggaatagatgctgagttattaaccatatcatgtgctggaagaggatatcttaatatcgagttattggatgaaaatccagtagctgaaaaattccgctatttacatgccgaccttcctcttttatcaggacgcaatgacaaattacaacaaatttcactttatgagaactataatttgctaaatgctatgctggcatgtgcatggaacagcaatagtacattatgtgttgatttttactctgacagatttggaaaggataaagcaacactcaatattaaacgctacgatggtagttttattgaacacgatcaagggttactggttgatataaaaaattctgttgtttttcctgcaaatagaatagacgaactggttgttgatgctatttctcttaagaatcctggcttacacatatcattgttaaaaaaagatgagtttgcttatgatctttcagctctgaatgttcaggatagtccatggttaattgtgggaaaacttgatggtacagctcgcattgcaccagtaattaaatggatgctacctgtattgcagacaaatgatttattactaaatgctctatgcgaagcagacccagaacagcgcaaaaaaaattttaatgagctaatttttgaaatagataacaacccattgcaaaattattgctgtttattaacagagtatattaagaaatacaaaatgaataatggcttatccttgctggatctggacttgttcagaggtatttcgagtaattaccgcgtggttgttcaattgttaatatcatcatgtctttctggtgatagcgatacgatttatgatatacaggaagaattacccttttcatggggatggattcccgtttcaatctggaaagatgttttccaaaaatgttggacttatctggagaaacagattaacgataaaacattagcattacatatattgcaaccctttattgcttttatgaaccatcgtgcacatatcgatcgtcggctggctccgattgcgaatatgttacttacatatagtgagagcctaccaaccggttgtgatgtattgccaactgttagtcgtgagcagtttaatgaagctaaacagatgctattaaggaaccccgacagctttgggcgtatcagtatcttccctaaagaactttggtctagtgctattactccagagttaaaatctgtttttaataagctttggattgaagataaatatcactcacggcttgaaaaacgttttaatttgatgttagtcgcagcgctgttaacccaaaaagataataacctgatacatcaactgtctgcgctttttgaatttcactatcagcaagccccacagcaattaggggtaatctatcaatattattttgaacaagcaggagtatgtcattga

SEQ ID NO: 29162 - DNA, 6345 bp, Escherichia coli MGH 58; identical to SEQ ID NO: 28560

SEQ ID NO: 29163 - DNA, 1143 bp, Escherichia coli MGH 58
atgcgtattacgggggcgggtgtggtcatggcctggcaaattcgtcgctataaatacagtctgcgctatgattatgaaaaagaactattactcagccagtcagtgaaccatcgtgctggacagattccttcccccgttatcatgctgttaagtgaacccgagaggaaatccatccccttagcatcaagaatgagcgagggagtgcctgtcggtgaatatgagttgagctcaatcgttaacaaaaatggaccgtggttggttgtccctaaaccgggtgaagagatggcttttcgtccctgcttcattcgtggcgaatcttcgttaccggtagaagaaagcaacatccgctcattgcagaaagcgacccagctttttaatccacaggcagaagttaataccatcacactggttctcggacagatggctaacgatcctgcccattccggctggcaatttatgcgtagcctgtacgatcaatttggttatttaccactggcaacctttgaagtatggcgtgcactggtgcagcatccgcaggcattggcaatgtcgctcttcaaatttgaaatgtcagcagagtacctgagtcgtattgagaatgagttccctattctatgggagtttttccccatctttgagatcaaagcggcatctgagcgtttcaaattgttcctgagccaaaaaggtgcaccggaggaaacccagaaattactggttactaatatgtttcaacggctggggctcgtgttcccgacatatgccgatgaaattgagaaatggttaagtaacggacatctccccccgtctattcctgagtcttttgtccacgtgtggtatcaggagcttttacgtgagcatagtgaagctcaatggccagagtacggcagcaagcggctgcatagctggatggcatcacaaaaaaatccagtgattggtattaatcctgacgcaaatcaccgctattccgtggccttgttacccgtcttcgctgcagctgtggcaagcggaaatgcttcttttgaatctgtatttgaccgtaaacccggtgccgtatttttcctgaggcaagtcagggatttcgattcccgctggtttaaggccatcttccagtgcagcctgttgcgttatgttgctaaaaaataa

SEQ ID NO: 29164 - DNA, 6273 bp, Escherichia coli MS 146-1; identical to SEQ ID NO: 28604

SEQ ID NO: 29165 - DNA, 3339 bp, Escherichia coli MS 146-1; identical to SEQ ID NO: 28605

SEQ ID NO: 29166 - DNA, 6315 bp, Escherichia coli MS 187-1
atggacgttcagcaactgcattatgcgccacttctaaatcagcttcatcagcgtgcggtgaggtcggtggtaagtcagttggcattgcggagcaagtcgttgactcattatctggaatcacaatattttcagcctcccggtcaggaggggtcactgcttgcagacccggtattcgaaagtacattcggctggatgcctgcggatgacacaatggaggatttgcgggacaagctgatctccagcccgctggttgatgcattgagcaaagcgccagtgccatttcgtcatcaacttactgcgtggcgaacgattctggaagacaaaaaatccttgttagtgagcagcggtacgggatccgggaaaacagaatgctttatggtaccggttctggaagatcttattcgtcagcaaaaatcgacccgccagtcactaacagggacacaagctattttcttgtatccgttaaatgcattaattaacagccaacaggagcggcttcgcgaatggacgcgcggatttaaggggaaaatacgcttcgcgctatataatggcgaaacccggcataccaaatacgaaattcaggaagatcagttgaaagtacctgaacaagctttgagtcgggaagccatttatgaagcaccaccttccatcatggtgacgaataccaccatgctggaatatatgctgattcgtcgtaaagatgccccaatcatcgaaaagtctcaggggatgttaaagtatatcgtcctggatgaagcccatagttatattggttctcaggctgctgagttagcgctgcttttacgtcgtgttatgcaggctttcaatgttggacccggcacagataaacctgtgcagattatcgcgacctctgccactattggtgaagactctcctgaaggtaataaggagcttgctaaatttgtcgctgatctcgcgggcgttacagaacgtgatgtcaaagtggttcgcggttatcgacaaataccgcgggtatcggagtcgctgattcgtcatgaataccccacatctttaacttctcttaaatccctgagccctcaggatctttaccaacagctttgtcattaccgtgtggcccagcaattgcgtcaggcgttaactcatcccggacggcaggcagtacgtttgagtgagttgctcaatgttgccagaagaacctggccagatattaatcaccgtgagctactgcaactcctcgatctaatggcaagatcgcgagaaggtgaactggcttttacgccattacgtatgcatgggtttatcagaacactggcgggtctatgggcatgttcaaacaaacaatgctcacataaagcacatgaattaaatcagagtgactggccatttggtcaggtatggtttgagcagcgccaatattgtgactgtggagcgccggtatttgaagttttacgttgctccgggtgtggttcagcttatttgtctgccaaagaggagatgcgcggtgatggaacgaactggttggtagcgcaaccagccgctgccgaagtggatgagtttgctcttgatgtagatgtttattctgaagatgaagacaacgacgaattagacaataactctcaatttgatcgtctgattgcgagcgatggtgaaaaatatatcatttcactggaagaaacgacggcggggaaaattgatagtgaagcgcaaaagcactatgaaataaacctgttaagaccggaatctcgaggtgagggacgcaataactcctttgcttgtgtttgctgtggtgacactcaacggaaaaataatcctttattccgtccgcttcggctcggcgcgcccttttttttaaatgaaattattcctactctgctggagttttctccattaccgcaaacaagagaagagcagttaggaccgtttaatggtcgacgcttgctcacctttacggattcgcgtcagggtaccgctcgcatttcagcccgcttacagcaggatgccgataaagcgacgttgcgagctctttgttaccaggagctggcaaatattacagagccttcagcaaaactcagcccggcacactgtgcactgttagagaaagttattagccagttttctgtcctccctttaaaaaattccatcgacgcgctgaaaaaagcgatggctgcgaatgaggagcttagcccgacggacattcaggcacttaaaattattgagccgatggtgagttccttaagcacggagcatgctgaagcgatgcaaatacttcaggctaactctggcaatcagcagaagaaaaccatgtcatggcaaacgctgtctgaacagctggttggcagtgtggaccttgccgatagaatgagaggcagttttaaagaattgtctgggcttgatcttactaaacaacagtttgcagatttttgtttatacagcgagtttggtcgccgccctaaaaatgcctggaccctcgaaagtctgggtctggtagccattcactatccattcattgataaagttacaacctgcccgcaggactggaagacattattacccgatcccgataagcaattagcggaatggcgtaatttattgaagattactcttgatttctttatccgtgaaaacagtgccgttttttacgaaaacgagcaataccctcgctggatgggggcacgtttcccggtaaaaatgctccaggggccagataaaaaaaacaaagggcagaaacgtgatcaactttggccacaaatacgcgatcgccattataaccgggtcattaagctattaatcgcagtctttccggcaatacaacctgagcaggctcactggaaatcgttagttaaccacttaatgattgaggtctgggatgcaattcgaccctgcttacgtcagtttgagtcgggttatcagctggatattaaacaacaagctgaattttacagtccaaagcaagtgtggcgttgcccctatactcgacgtgcgttagacgtcacgttgctgggatactctccgtatttgccgggtagcaaagaaattgcacctgaaaaagcagtgttgattgaaatgcctgagcttcctgtacgtcactggcgtttgtctggtggtggagaaatcgcccgagaagaacgtctggagtggctggaaagtaatgcgctgattcaacatgcccgcgaggaaggattatggtctactcgcagcgaccgactggccctgaaagatagctggtatcgtctggaggaacactctgcgcagagaacgcctgagcagaaccagtttaatgaaaaacaatttaagtcaggcaaagttaatgtgctgaactgttccacgaccatggagatgggggtggatattggtggtatgagtttggtggcaatgaacaacgttcctccagcgccggcaaattatttgcaacgtgcaggtcgcgcggggcgtcgtggagagagtgcatctgctgccattacgttatgtaaaaacacggcgcatggaatggaggtattcaaagaccccctctgggcgttcaacactactgccagtgcgccacgggttcgttttgggagcagtagtattgttcaacgacatgttaatgccctggttttaggtctgtttttacgagctgaagttcctgatgcgacaaaactgagttgcaaatggttctttgaaggtgatgagagccagtgtcttcgttttcttcattggttaaatcaccaggccgatgagctggcggataaacttaaacgccttactcagggaaccgtcctgatgtcattgacggcaacccagctcttgacccgcacacaagcaatgatgcagcaggttgatatccgctggagaagccaacttgcgatactgttggaaaatatcgaagcgttgaaggcggataacagcgcgtgggaagaaacgccagcaggtaaagccatcgcttatcagcttcgtgattatcgcggtgcatatctgttttctaaactcattagtgaagcgttcctgccggggcatggtttcccggttggcgtagtcaatttcaattatctgacggcagatgagctggaaaaacgtcgcgcaataaaagccactcaggctgaccctaatgaagggggagaaagcttttctcgtcgtattgaaaaattgcccagccgtgatttgcctacagcattacgcgagtatgcgcctggtgcagatgtggtattgggcggaaaagtatatcgttcctcgggcattatgcttggcaaggtgcttgccagcgggcaggagctgtcaggcgatcatcatattccgtggttctggcattgccgcaaatgtggtgcgggggcaaccagtactacccatcctgtcgaatgtagtcactgcaaagcggatatacagcaacttgatgtgaagcgttatttacagcctgttggttttgcgacagatattcgttatcaggcacataatgatgtatccatgcctgcacaacttccctggaaagatccacgtgttcttgtaccgtcttcggtgtgggtttctttacccgatgctgggctaggacgttaccgtttaagccatagtggggaattgttccacttcagtgaaggggaatttgggcacggctacgcaatttgcctctcatgtggtcgggcagaatctcaaactcaaccccagcgtacccctgaaaatctaaagaacccagagcgggaaaatacgcattacctgttgcgagggggcagtaacgatcgtcaggggagcaataaattgtgccacggtcatgtgcataaagatctgtggttggggtatagcagtcgtacagatatggttgagctgcaacttaatgatgataatggcctgttgatccgtgatgaggttgccgcgcgttcccttgcggtcgctttgcgtgaagggttagcgcataaattgggtatcgaaaatactgagctgggcgtgacgacgcagcaagcgcgcgatatcaatggctataccggatattccatcttcatatacgacaataatgcgggtggtgcaggttatgcagtgcaattgatcgaccattgggctgatgtctttaattacgccagaaaattgctcgattgcagttgcgataaattttgtcaccactgcttgctcagctacgacagtcagcattatgtcaacagattagatcgtcaccatgcattaaccctgcttaccaatgtacggttgcagcgacttaacctcgcgccagaatatcagtacttcggcgatggtagccgggttgaaactaaccctctgagtttacgtattgcgcaatgcctgaacagcgagatttatgactcctgctcgctggttcttgcggggccgcaggaacagtgggactttgcccaatggccattatttaaagagttgctccagtttgcctcctccggtgggaatgttgagttgctggtggccacgccgctggaaaacttaactgatagctccagacatcagctttccgcgttggcggcgatgccgggaggacgcttacaagtgaaatccattgccactgcgcaactcatgcaaggcaaggggcgctggcttgcgcaggtgactcgcgaagggcaaagccaacagtgggccgcagacgacagcgctaccgttgcccctggtgaattatggggacaaagtgcgtcttcaccagtagtgacacttaaaggaacgtccggaaaaaccttctcgggtcagaccttaagtgcagaagatttactgcccgccttacccaccggggcggtgcgcatcaatctctgtgaacaactggacgggccgctggaaggttttggttcgcgtttctggtcgttagtcacgcaacagcacgctggctggaagcaggcatttacccgccacaaagagataacgcatgttgagtacagcgatcgttatcttaatagcccattcacggcgcgtttgttaggtgaaatcttaaccgagctggttgaacagggaatggcggaacgcgccagcctcactgtttgcgtcaaaaaattggattacaactctcgccaacacgacgctctctataacgcgtggcttaatgaggaagatcgtcagcaggttgtgaccactttacttgaagaaggatatctggggcctgcgtggccgggagcaattagctggttaacgggggataaccagagtacggagcatggacgagagctgacagtcaccttcagcgatggcagtcagcattatgtcctgctcgacatggggcttagctactggcgctgtattgaagataccttctttgattttgccctgcgagtaccgcagcaagttgaacggctggcaaacacgcgagcgcgagctgttgccccgggtaatgaccttaggagttatattatcgctggataa

SEQ ID NO: 29167 - DNA, 2937 bp, Escherichia coli MS 187-1
atgattgaaaatgagagcggttatttgattacctatttcagaaggatatatcaggcgcttcgtgggcaatcatctcaatatcctgccgctaaaattgcacaagaattaggcgatacgattcctgtcacaatgcaaaacgaactggtctatgaaatagccggtgaattctgcgagactctctgccgattacttagtgagcatcctcctcatagcagtgatcccgtttctgcattacgtaagctctctccagactggcatcttcaacttccactcgttctccccgaagcgaatgctgcagagattgtaaggcgattactttctcaatcttctgaaatacgcagtgcaagtagtcttcaggttgaaagaatctgggtcgatgttgatgacagttggtattgcgatgcccggttccgattcccggccacaatgcgtacagaacagttaacctctttgtttgaatgccatattcagccggagcagacccgactcatcatttcaggaaaatggaaaaatggcggggcaaggttggcaatgctaagccgttatgagcagcaagattggcgggtcgagttattacctattgcgatgcaaaaactctctggtgcagatgcaatggccgaaatctcattgtcgcttcatgaaggtccaattctgttaggtcacacaattccaaaaggcggttatgaacttactgaagaacttccctgggtttttgaagcgatgaatgagagtgaatcgcagctaaaacttgttggtatggggtctgtgagttccaggctaaatgctctgtttatttcgctaccgaaaaatagccatttagatattagtggagaaggtgagtttgatatcccaaggttgctgaaaaacagtgaacgcagcttaactaaaataagtggagtatttagcgttgttttacatgatggtgctgtttgtacaattcgcacccagcaactttatgattctgcgattgaatattatattaaatcgacagaagttgaactggttaaatcggattatcctgtccatcgagcctggccgaagatcggttggaaaaaggatctgcaatatggcattgtaccggagaaagaacttttttggcgttccattcgttcaggtaataatgcctggtattctgtcgcatcagaaatgccaaaaggacagatagaagtccggcgaatagttaatgatgaggttttatttagcggtaaagttgtagttttaccagcagacttcgatattaatattatacctgagagtgctcagcaaggcattattatgctttctggtataacggatactagaattgataaatattcaaacaatgaaaaagtaacacttaagtccgattattcacaaaacgagtgtgctatttattataattcatcgctgatgctggaaaataccgttgatttacgggtctcctggaaagatggttctaatcttaaactattattacctaagccggttagcggtggccgatttgtaactaatgatggttctgttcattttgatggtgtggcatctatagcacatttgcatggaatagatgctgagttattaaccatatcatgtgctggaagaggatatcttaatatcgagttattggatgaaaatccagtagctgaaaaattccgctatttacatgccgaccttcctcttttatcaggacgcaatgacaaattacaacaaatttcactttatgagaactataatttgctaaatgctatgctggcatgtgcatggaacagcaatagtacattatgtgttgatttttactctgacagatttggaaaggataaagcaacactcaatattaaacgctacgatggtagttttattgaacacgatcaagggttactggttgatataaaaaattctgttgtttttcctgcaaatagaatagacgaactggttgttgatgctatttctcttaagaatcctggcttacacatatcattgttaaaaaaagatgagtttgcttatgatctttcagctctgaatgttcaggatagtccatggttaattgtgggaaaacttgatggtacagctcgcattgcaccagtaattaaatggatgctacctgtattgcagacaaatgatttattactaaatgctctatgcgaagcagacccagaacagcgcaaaaaaaattttaatgagctaatttttgaaatagataacaacccattgcaaaattattgctgtttattaacagagtatattaagaaatacaaagtgaataatggcttatccttgctggatctggacttgttcagaggtatttcgagtaattaccgcgtggttgttcaattgttaatatcatcatgtctttctggtgatagcgatacgatttatgatatacaggaagaattacccttttcatggggatggattccagtttcaatctggaaagatgttttccaaaaatgttggacttatctggagaaacagattaacgataaaacattagcattacatatattgcaaccctttattgcttttatgaaccatcgtgcacatatcgatcgtcggctggctccgattgcgaatatgttacttacatatagtgagagcctatcaaccggttgtgatgtattgccaactgttagtcgtgagcagtttaatgaagctaaacagatgctattaaggaaccccgacagctttgggcgtatcagtatcttccctaaagaactttggtctagtgctattactccagagttaaaatctgtttttaataagctttggattgaagataaatatcactcacggcttgaaaaacgttttaatttgatgttagtcgcagcgctgttaacccaaaaagataataacctgatacatcaactgtctgcgctttttgaatttcactatcagcaagccccacagcaattaggggtaatctatcaatattattttgaacaagcaggagtatgtcattga

SEQ ID NO: 29168 - DNA, 6345 bp, Escherichia coli MS 196-1
atgactacacgctatttttcgtcacttattgaacaatcgttgtctcgttcaactgaagcaacgctcagtatcatgggcgttacaaacccgcagttgcgtgaacatctcgcgcagcaaatgggggctgattgtgggaaaccgggctcattccttgcttctccggtattccagcaaatgtttggctggaaggagtcaaaccacacgatgcgcagtctgacggaaggcaacgcattgttgagcaaagcagtggttgattcactggatgatcagagtaatggccggtaccgatttggtgctgactggaagccttttacacaccagttagccagttggaaagctttgctggaaaagaaacattcagtggtggtaaccagtggtacgggttcaggtaaaacggaatgttttatggtaccggtgctggaagatctttaccgggaactgcatgaaaatggcaacaatccgttggtcggtgtccgagccctttttctctatccattgaacgccttgattaattcacagcgcgagcgtctggatgcctggacgcgtggttttggtactgggatccgctactgcttgtataacggaaatacagaagagctccacgcaaaaatgaaaacagtgcaggataatagaccaaatgaagtcttatcccgtgaaaagatgcgtctggagccagccccgattctggtgaccaacggcacgatgctggaatatatgatggttcgccaggtcgacgccccgattatccagcaatccaaagcacaaaaatcactacgctggattgtactggatgaagcgcatacctatgtcgggtcgcaggccgctgaactggcactccagctgcgtcgtgtgatgacagcgtttggcgtgacgccagatgatgtgcgctttgtagcgacctctgcgaccattgcctgcagcgacgccgaaaagcagctgaaaaaatttctctctgaattatccggtatcccgcaggagcgcatcgatgttctggacggaagtcgggtgattcctgaactggaaccatccaaaaacgtttctgttccgttagacgaaatagagcaaatacctgatctggatctaaaagataaaaatgataataaaattaaagggataagccctgagcgcttttatgcgcttacgcactcccccgaagcgcgttacatacgtgaaatgttggttagccaacccaatccaatgaaactggatgagatgacgcagcggttaaatgcgctgacaaaacagcattacagccagcaggaagtactgcgttggatcgatgtctgttcagggactcaacctaatgcaaaggatcccgcatttcttaaagtcagggcgcatatcttccagcgtaatacccaaggaatatgggcttgtgttgataaagattgcagattaaagcacggtacaccgctcgaaaaaggctggccctttggctatgtgtatgtgaaccagcgacaaaattgtgactgtggaagccctgtatacgaagttgcattctgtaatgattgtaatgagcctcatcttctggcgcaggacaaaaagggcaaacttgtccaatgggaaaataaaggtggcgatgagttctccttgcaggatgaagtacctgttgaacatgacactacagaggaaaaagtcgaaaaagagaacggtttcctgcctccgttgattattgccgcaggagagaccagcgagacaggctataccctacaacgcctcgaccaccagacgcgccgtattggcgttattaacaatgacagcattccgctgattattaatgatgttgaacaggtttgtagcgccagtggctgtggctacagaggcatgagtgggaaacagcccttccggcgtgcactattaggtgggccattttacgttactaatatcgtgcccaccgttcttgagtattgtcaggactttaccagtgatgaaggcaaagagggcgtcggaccagattcgttgccagggcgaggacgtcgactcattacctttacggacagtcgacaaggtacagctcgaatggcggtgcgtatgcagcaagaagcagaacgcagtctcttacgcggaagcgtagtcgaaattctgagctggcatcaacggacgcaaacgtccacggcgccgaatgccaatgccgatctggaaaaattagcggccagggcaaagcaagcccgtgagcaggcagaagaatatcgaagctggggaatgccagaccaggcgaaattgtcacaagcacaggctgaacagcttgaacaggcttatcaggctgcaaccggtggaaaagcagcaactaccctggtatcccgcacctggacagaaatggttaacgagcttaaagataaagccgatatccgtggcccggtactgaaatataaccactatttgcagcctgaagtgtttaataaaaacggcgggccactaaagctttcggaaatgttgttgttccgggaattcatgcgtcgccctaaacggactaacagcctggaaacacaggggctggttcaggttggttaccaggggctggagaaaatacataagagccccttgcactggcaggaaaaaggattaacgctggatgactggcgcgattttctcaaggttacgttggatctttatgttcgcgaaagcaacttcacacagctggatgatgagctgaaaaactggattggtagccgtttttcatcaaaattcgtccgtaacccggaatcaaaagatcctgaagataatcagaacagacgctggcctcaaattcgtaatggcaacgtatcccatcgtttagcgaagttactgatgctgggggctggattcaaaaccgtcaatacggcgactattgatattatcaatacatggctgaaagaagcatgggcccaacttaccggaccacttgcagtactgaaacccgatggcaaccgtttttatttaccgaaagagcatatgactttttctttaatcacggatgcctggattttcccggtaaccaataaaatcctggatacggcttttaaaggcttaaccccttatctgcccacccatatttcgttcgagcatcttacccaggcgcaatatgacacttttgtcgcgcagaaagtcaccatgccggaaatctggaagctggatcgttcacaggaagactacgcagagggtctggcaaaagcacgagactgggtcaacaatgatccgctgatcgcacaattgcggtcggaaaacgtctggacagacatcaacgatcgtgtagtggaaggcggtttctactatcgcactgccgagcactctgcccagcagtcgtcagaacgcctgcaaagctatgaaaagatgttcaagaacgggcaactaaatgttctcaactgttccaccaccatggaaatgggggttgatattgggggcattactgcggtggtaatgaacaacgttccgccacatccggccaactatttacagcgcgccgggcgagccgggcgtagtaaagaatcacgcgcgatctcttataccctatgcaaaggtaacccacacgaccagcaggtttttgccaacccactctggccatttgaaaccatgatcccggcacccatggtcgcgatgaactccgcccgactggtgcaacgtcacgtcaatgcattattactgtctgactttttatgtaacgttattggcgaaaccgataaagagaaaaccagcctcgatagcctctggtttttcggtgaagatgacgggcagtcaaaatgcgaacgctttaaagtctggctggaacgcccggttcttgatatcgacacggcgctggaacggctggtgaaaggtacggcgttgcatggcgcaagagccgaacatctgcgggataaaacaatcaatgcgatcaccttcctgcaacagcggtggctctccgtttatcgcgatctcgtgacccaggagcgtgagtcgcagccgcaaacgccttatcgtaagcgcatagagctggagaagaaacggcactgtggcgagtatctgctgcgcgatctggctgccagaaccttcctgccgggatacggtttcccgacagatgtagtgacgtttgataacttcacgatggaagattatatccgcgaaaaatcgcagaaaagtcgtgataaaaaggaccgtgaagataacgtctcccgttataaaggattaccttcccgtaacctcggtgttgccattcgtgaatatgcaccgggagcagagatcattcttgatggtcgtgtcttccgctctgccggtgtctcactgcactggcacaacattaatgctgataccaatgaagcccagcgtctggattgcgcctggcgctgtcacaaatgcgggaccattggctatgaagaggggatgagcagttccgggatgctcttttgctccaacagcgcctgcggcgaaaaaataaccatggataatcgccgtcaggtgttgcagcctgccgggtttgtcaccgatgcacacgctccggtaacgaacaatattgaaaccatgaaattcgtcccggttgtccccgcgtgggtctttgttaaagcagagcccgtaccgttgcctaacccgctaatgggttatatggcttctggggctgatgggcatgttttccagcaaagtttgggggaaggtggacacggttatgcattgtgtctgagctgtggccgtgcggagtcgatgctgaatgaaaatgatgcaccgaaaagtatggaagctcactatccaccgcgtccgggtaaagcggaccgcgacagccagaatcatcgtctgatttgccccggttcgacggcactcatgaagaacgtcaccctgggcgcactggcgcgcaccgatgtctttgaaatggttctgcgcaaaccgcaaaacggcgagtatctgccagataacacagaagaggggcggattgtcgctatgactctggcggttgctctgcgtcaggcgctggcaggcgttctgggtatctccgccgcagaactcggctattctgtacgtccggtcagactggaggatgggcaatcggtattagccgttcagctttatgatgtgatcagcggtggtgctggttttgcctccagcgcaccggtacatattgaagctatattgcagggaatggtgaaacagttaggctgccgccattgtgatactgcatgcagtgaatgtctgcttgattcccagactcgccacgatcacgatttgctggatcgcaaagtggcgctggcttggcttggcgatgacttcacgtattacatcggtttaccggatgaagagacattctcgctgccggatgcccgctactgccctggcgctattggcgatacgattcgccgggcgattaacgaaggcgctgaaaagctcaccctgtggatgactggcgcgcccaatgagtgggatttatacgcccgtcagttccgcgcggctattcagagctatcggctaaaagacaacgtcgaggtcgatcttgttattcctgcgggagtggatgacccagacctgttgcatgaactatcgcaatttactgcgctgggtgtgcggttgtgccatgttgagcaggagctgcaattaccgattgttgcccaggtcacctttgccgatcgcgtgatgacgctggcctctcgcagtcagcaggcaacgattccggggccggagtggcacctgaatgacgaactggtggtgcgtagtctcggttatcaaacggtagaactgaacgagtttattctgcccgctaaagccgccaacgctgtcgagcgggtcaaagacattcagatccacaaacagttgaatggaccactttcgcagtttgggcaacgcttctgggacgtgctgtttaacgaccatgaagaagcgcagtcactgatgaaaaacacgcgaattaccggcgttcactataccgatcgctatctgcaaaacccggttgcgctggcgttgttgggatcaattctgaaaccgctaaaaacaaagctgaccgatggcgctgaagtggcgctggatacgctgtttaaagataaagatcgccccggtaaccggcctttccatgactggatgagcatagcggattttcaggatttcgctgatcagtggtttgctgctgcgctgggcaggccgatagaactgacggtgttcgattcgccgcgcgatatccctcaccatcgtaaactgacggtgacttttgaggatggtcaggtattgaagatccgcttcgatcaggggatgggctactggcgcatcaactttgcatcgcaatggcattactttgatttccgcgatgacgtttctttccagttagtcaaaatggctcaggcctgcaaggaagggaatgtggccaacagcgaagagagctgggcaacggatgtgctggtggaggtgatcgcctcctga

SEQ ID NO: 29169 - DNA, 888 bp, Escherichia coli MS 196-1
ttggttgttcctaaaccgggtgaagagatggcttttcgcccctgcttcattcgtggcgaatcttcgttaccggtagaagaaagcaacatccgctcattgcagaaagcgacccagctttttaatccacaggcagaagttaataccatcacacgggttctcggacagatggctaacgatcctgcccattccggctggcaatttatgcgtagcctgtacgatcaatttggttatttaccgctggcaacctttgaagtatggcgtgcactagtgcagcatccgcaggcattggcgatgtcgctcttcaaattcgaaatgtcagcagagtatctgagtcgtattgagaatgagttccctattttatgggagtttttccccatctttgagatcaaagctgcatctgagcgtttcaaattgttcctgagccaaaaaggtgcaccggaggaaacccagaaattactggttaccaatatgtttcaacggctggggctcgtgttcccgacatatgccgatgaaattgagaaatggttaagtaatggatatctccccccgtctattcctgaatcttgtgtccacgggtggtatcaggagctcttacgtgagcacagtgaagctcgctggcctgaatacggctgcaagcgtctgtataaatggatgatgtcacaaaaaaatccagtgattggtattaatcctgacgcaaatcaccgctattccgtggcctggttacccgtcttcgccgcagcggtggcaagcggaaatgcttcttttgaatctgtatttgaccgtaaacccggtgccgtatttttcctgaggcaagtcagggatttcgattcccgctggtttaaggccatcttccagttcagcctgttgcgttatgttgctaaaaaataa

SEQ ID NO: 29170 - DNA, 6273 bp, Escherichia coli MS 198-1; identical to SEQ ID NO: 28604

SEQ ID NO: 29171 - DNA, 3339 bp, Escherichia coli MS 198-1; identical to SEQ ID NO: 28605

SEQ ID NO: 29172 - DNA, 6315 bp, Escherichia coli NE037; identical to SEQ ID NO: 28464

SEQ ID NO: 29173 - DNA, 2937 bp, Escherichia coli NE037; identical to SEQ ID NO: 28445

SEQ ID NO: 29174 - DNA, 6315 bp, Escherichia coli NE098; identical to SEQ ID NO: 28464

SEQ ID NO: 29175 - DNA, 2937 bp, Escherichia coli NE098; identical to SEQ ID NO: 28445

SEQ ID NO: 29176 - DNA, 6315 bp, Escherichia coli O127:H27 str. C43/90; identical to SEQ ID NO: 28456

SEQ ID NO: 29177 - DNA, 3360 bp, Escherichia coli O127:H27 str. C43/90
ttgcttgtgaaaactccagttaacccacttttgcaatggcttaacatgttttttagtcgccgttcattatccggagctgatggacgggcgttatatgcttaccgttgtactgatacagagtacgaaagtttggcagaactactgcgtacatatgccccccgtagttatccaagaacgatattcatttcctatagcgatgttctatttagcatatatgccgcagagtttatccgccggactcatacggtcggacaccctaaatgggacacaattttagattctattaactggaaagttccgtatgttcatcgacagaagctggttaatgatggcattcgctactggaaaagaaagataagaaatctgggacaagcttcgggttatctgcatacactggcttgtgaaggtggtttgcctatccgcatgattgaaaatgagagcggttatttgattacctatttcagaaggatatatcaggcgcttcgtgggcaatcatctcaatatcctgccgctaaaattgcacaagaattaggcgatacgattcctgtcacaatgcaaaacgaactggtctatgaaatagccggtgaattctgcgagactctctgccgattacttagtgagcatcctcctcatagcagtgatcccgtttctgcattacgtaagctctctccagactggcatcttcaacttccactcgttctccccgaagcgaatgctgcagagattgtaaggcgattactttctcaatcttctgaaatacgcagtgcaagtagtcttcaggttgaaagaatctgggtcgatgttgatgacagttggtattgcgatgcccggttccgattcccggccacaatgcgtacagaacagttaacctctttgtttgaatgccatattcagccggagcagacccgactcatcatttcaggaaaatggaaaaatggcggggcaaggttggcaatgctaagccgttatgagcagcaagattggcgggtcgagttattacctattgcgatgcaaaaactctctggtgcagatgcaatggccgaaatctcattgtcgcttcatgaaggtccaattctgttaggtcacacaattccaaaaggcggttatgaacttactgaagaacttccctgggtttttgaagcgatgaatgagagtgaatcgcagctaaaacttgttggtatggggtctgtgagttccaggctaaatgctctgtttatttcgctaccgaaaaatagccatttagatattagtggagaaggtgagtttgatatcccaaggttgctgaaaaacagtgaacgcagcttaactaaaataagtggagtatttagcgttgttttacatgatggtgctgtttgtacaattcgcacccagcaactttatgattctgcgattgaatattatattaaatcgacagaagttgaactggttaaatcggattatcctgtccatcgagcctggccgaagatcggttggaaaaaggatctgcaatatggcattgtaccggagaaagaacttttttggcgttccattcgttcaggtaataatgcctggtattctgtcgcatcagaaatgccaaaaggacagatagaagtccggcgaatagttaatgatgaggttttatttagcggtaaagttgtagttttaccagcagacttcgatattaatattatacctgagagtgctcagcaaggcattattatgctttctggtataacggatactagaattgataaatattcaaacaatgaaaaagtaacacttaagtccgattattcacaaaacgagtgtgctatttattataattcatcgctgatgctggaaaataccgttgatttacgggtctcctggaaagatggttctaatcttaaactattattacctaagccggttagcggtggccgatttgtaactaatgatggttctgttcattttgatggtgtggcatctatagcacatttgcatggaatagatgctgagttattaaccatatcatgtgctggaagaggatatcttaatatcgagttattggatgaaaatccagtagctgaaaaattccgctatttacatgccgaccttcctcttttatcaggacgcaatgacaaattacaacaaatttcactttatgagaactataatttgctaaatgctatgctggcatgtgcatggaacagcaatagtacattatgtgttgatttttactctgacagatttggaaaggataaagcaacactcaatattaaacgctacgatggtagttttattgaacacgatcaagggttactggttgatataaaaaattctgttgtttttcctgcaaatagaatagacgaactggttgttgatgctatttctcttaagaatcctggcttacacatatcattgttaaaaaaagatgagtttgcttatgatctttcagctctgaatgttcaggatagtccatggttaattgtgggaaaacttgatggtacagctcgcattgcaccagtaattaaatggatgctacctgtattgcagacaaatgatttattactaaatgctctatgcgaagcagacccagaacagcgcaaaaaaaattttaatgagctaatttttgaaatagataacaacccattgcaaaattattgctgtttattaacagagtatattaagaaatacaaaatgaataatggcttatccttgctggatctggacttgttcagaggtatttcgagtaattaccgcgtggttgttcaattgttaatatcatcatgtctttctggtgatagcgatacgatttatgatatacaggaagaattacccttttcatggggatggattcccgtttcaatctggaaagatgttttccaaaaatgttggacttatctggagaaacagattaacgataaaacattagcattacatatattgcaaccctttattgcttttatgaaccatcgtgcacatatcgatcgtcggctggctccgattgcgaatatgttacttacatatagtgagagcctaccaaccggttgtgatgtattgccaactgttagtcgtgagcagtttaatgaagctaaacagatgctattaaggaaccccgacagctttgggcgtatcagtatcttccctaaagaactttggtctagtgctattactccagagttaaaatctgtttttaataagctttggattgaagataaatatcactcacggcttgaaaaacgttttaatttgatgttagtcgcagcgctgttaacccaaaaagataataacctgatacatcaactgtctgcgctttttgaatttcactatcagcaagccccacagcaattaggggtaatctatcaatattattttgaacaagcaggagtatgtcattga

SEQ ID NO: 29178 - DNA, 6315 bp, Escherichia coli O145:H28 str. 4865/96; identical to SEQ ID NO: 28444

SEQ ID NO: 29179 - DNA, 2937 bp, Escherichia coli O145:H28 str. 4865/96; identical to SEQ ID NO: 28445

SEQ ID NO: 29180 - DNA, 6315 bp, Escherichia coli O145:H28 str. RM12581; identical to SEQ ID NO: 28444

SEQ ID NO: 29181 - DNA, 3360 bp, Escherichia coli O145:H28 str. RM12581; identical to SEQ ID NO: 28813

SEQ ID NO: 29182 - DNA, 6315 bp, Escherichia coli O145:H28 str. RM13514; identical to SEQ ID NO: 28444

SEQ ID NO: 29183 - DNA, 3360 bp, Escherichia coli O145:H28 str. RM13514; identical to SEQ ID NO: 28813

SEQ ID NO: 29184 - DNA, 6315 bp, Escherichia coli O145:NM str. 06-3484; identical to SEQ ID NO: 28444

SEQ ID NO: 29185 - DNA, 2937 bp, Escherichia coli O145:NM str. 06-3484; identical to SEQ ID NO: 28445

SEQ ID NO: 29186 - DNA, 6315 bp, Escherichia coli O145:NM str. 08-4270; identical to SEQ ID NO: 28482

SEQ ID NO: 29187 - DNA, 2937 bp, Escherichia coli O145:NM str. 08-4270; identical to SEQ ID NO: 28445

SEQ ID NO: 29188 - DNA, 6315 bp, Escherichia coli O145:NM str. 2010C-3507; identical to SEQ ID NO: 28444

SEQ ID NO: 29189 - DNA, 2937 bp, Escherichia coli O145:NM str. 2010C-3507; identical to SEQ ID NO: 28445

SEQ ID NO: 29190 - DNA, 6315 bp, Escherichia coli O145:NM str. 2010C-3508; identical to SEQ ID NO: 28444

SEQ ID NO: 29191 - DNA, 2937 bp, Escherichia coli O145:NM str. 2010C-3508; identical to SEQ ID NO: 28445

SEQ ID NO: 29192 - DNA, 6315 bp, Escherichia coli O145:NM str. 2010C-3510; identical to SEQ ID NO: 28444

SEQ ID NO: 29193 - DNA, 2937 bp, Escherichia coli O145:NM str. 2010C-3510; identical to SEQ ID NO: 28445

SEQ ID NO: 29194 - DNA, 6315 bp, Escherichia coli O145:NM str. 2010C-3511; identical to SEQ ID NO: 28444

SEQ ID NO: 29195 - DNA, 2937 bp, Escherichia coli O145:NM str. 2010C-3511; identical to SEQ ID NO: 28445

SEQ ID NO: 29196 - DNA, 6315 bp, Escherichia coli O145:NM str. 2010C-3516; identical to SEQ ID NO: 28444

SEQ ID NO: 29197 - DNA, 2937 bp, Escherichia coli O145:NM str. 2010C-3516; identical to SEQ ID NO: 28445

SEQ ID NO: 29198 - DNA, 6315 bp, Escherichia coli O145:NM str. 2010C-3517; identical to SEQ ID NO: 28444

SEQ ID NO: 29199 - DNA, 2937 bp, Escherichia coli O145:NM str. 2010C-3517; identical to SEQ ID NO: 28445

SEQ ID NO: 29200 - DNA, 6315 bp, Escherichia coli O145:NM str. 2010C-3518; identical to SEQ ID NO: 28444

SEQ ID NO: 29201 - DNA, 2937 bp, Escherichia coli O145:NM str. 2010C-3518; identical to SEQ ID NO: 28445

SEQ ID NO: 29202 - DNA, 6315 bp, Escherichia coli O145:NM str. 2010C-3521; identical to SEQ ID NO: 28444

SEQ ID NO: 29203 - DNA, 2937 bp, Escherichia coli O145:NM str. 2010C-3521; identical to SEQ ID NO: 28445

SEQ ID NO: 29204 - DNA, 6315 bp, Escherichia coli O145:NM str. 2010C-3526; identical to SEQ ID NO: 28444

SEQ ID NO: 29205 - DNA, 2937 bp, Escherichia coli O145:NM str. 2010C-3526; identical to SEQ ID NO: 28445

SEQ ID NO: 29206 - DNA, 6315 bp, Escherichia coli O145:NM str. 2010C-4557C2; identical to SEQ ID NO: 28444

SEQ ID NO: 29207 - DNA, 2937 bp, Escherichia coli O145:NM str. 2010C-4557C2; identical to SEQ ID NO: 28445

SEQ ID NO: 29208 - DNA, 6315 bp, Escherichia coli O157: str. 2010EL-2044
atggacgttcagcaactgcattatgcgccacttctaaatcagcttcatcagcgtgcggtgaggtcggtggtaagtcagttggcattgcggagcaagtcgttgactcattatctggaatcacaatattttcagcctcccggtcaggaggggtcactgcttgcagacccggtattcgaaagtacattcggctggatgcctgcggatgaaacaatggaggatttgcgggacaagctgatctccagcccgctggttgatgcattgagcaaagcaccagtgccatttcgtcatcaacttactgcgtggcgaacgattctggaagacaaaaaatccttgttagtgagcagcggtacgggatccgggaaaacagaatgctttatggtaccggttctggaagatcttattcgtcagcaaaaatcgacccgccagtcactaacagggacacaagctattttcttgtatccgttaaatgcattaattaacagccaacaggagcggcttcgcgaatggacgcgcggatttaaggggaaaatacgcttcgcgctatataatggcgaaacccggcataccaaatacgaaattcaggaagatcagttgaaagtacctgaacaagctttgagtcgggaagccatttatgaagcaccaccttccatcatggtgacgaataccaccatgctggaatatatgctgattcgtcgtaaagatgccccaatcatcgaaaagtctcaggggatgttaaagtatatcgtcctggatgaagcccatagttatattggttctcaggctgctgagttagcgctgcttttacgtcgtgttatgcaggctttcaatgttggacccggcacagataaacctgtgcagattatcgcgacctctgccactattggtgaagactctcctgaaggtaataaggagcttgctaaatttgtcgctgatctcgcgggcgttacagaacgtgatgtcaaagtggttcgcggttatcgacaaataccgcgggtatcggagtcgctgattcgtcatgaataccccacatctttaacttctcttaaatccctgagccctcaggatctttaccaacagctttgtcattaccgtgtggcccagcaattgcgtcaggcgttaactcatcccggacggcaggcagtacgtttgagtgagttgctcaatgttgccagaagaacctggccagatattaatcaccgtgagctactgcaactcctcgatctaatggcaagatcgcgagaaggtgaactggcttttacgccattacgtatgcatgggtttatcagaacactggcgggtctatgggcatgttcaaacaaacaatgctcacataaagcacatgaattaaatcagagtgactggccatttggtcaggtatggtttgagcagcgccaatattgtgactgtggagcgccggtatttgaagttttacgttgctccgggtgtggttcagcttatttgtctgccaaagaggagatgcgcggtgatggaacgaactggttggtagcgcaaccagccgctgccgaagtggatgagtttgctcttgatgtagatgtttattctgaagatgaagacaacgacgaattagacaataactctcaatttgatcgtctgattgcgagcgatggtgaaaaatatatcatttcactggaagaaacgacggcggggaaaattgatagtgaagcgcaaaagcactatgaaataaacctgttaagaccggaatctcgaggtgagggacgcaataactcctttgcttgtgtttgctgtggtgacactcaacggaaaaataatcctttattccgtccgcttcggctcggcgcgcccttttttttaaatgaaattattcctactctgctggagttttctccattaccgcaaacaagagaagagcagttaggaccgtttaatggtcgacgcttgctcacctttacggattcgcgtcagggtaccgctcgcatttcagcccgcttacagcaggatgccgataaagcgacgttgcgagctctttgttaccaggagctggcaaatattacagagccttcagcaaaactcagcccggcacactgtgcactgttagagaaagttattagccagttttctgtcctccctttaaaaaattccatcgacgcgctgaaaaaagcgatggctgcgaatgaggagcttagcccgacggacattcaggcacttaaaattattgagccgatggtgagttccttaagcacggagcatgctgaagcgatgcaaatacttcaggctaactctggcaatcagcagaagaaaaccatgtcatggcaaacgctgtctgaacagctggttggcagtgtggaccttgccgatagaatgagaggcagttttaaagaattgtctgggcttgatcttactaaacaacagtttgcagatttttgtttatacagcgagtttggtcgccgccctaaaaatgcctggaccctcgaaagtctgggtctggtagccattcactatccattcattgataaagttacaacctgcccgcaggactggaagacattattacccgatcccgataagcaattagcggaatggcgtaatttattgaagattactcttgatttctttatccgtgaaaacagtgccgttttttacgaaaacgagcaataccctcgctggatgggggcacgtttcccggtaaaaatgctccaggggccagataaaaaaaacaaagggcagaaacgtgatcaactttggccacaaatacgcgatcgccattataaccgggtcattaagctattaatcgcagtctttccggcaatacaacctgagcaggctcactggaaatcgttagttaaccacttaatgattgaggtctgggatgcaattcgaccctgcttacgtcagtttgagtcgggttatcagctggatattaaacaacaagctgaattttacagtccaaagcaagtgtggcgttgcccctatactcgacgtgcgttagacgtcacgttgctgggatactctccgtatttgccgggtagcaaagaaattgcacctgaaaaagcagtgttgattgaaatgcctgagcttcctgtacgtcactggcgtttgtctggtggtggagaaatcgcccgagaagaacgtctggagtggctggaaagtaatgcgctgattcaacatgcccgcgaggaaggattatggtctactcgcagcgaccgactggccctgaaagatagctggtatcgtctggaggaacactctgcgcagagaacgcctgagcagaaccagtttaatgaaaaacaatttaagtcaggcaaagttaatgtgctgaactgttccacgaccatggagatgggggtggatattggtggtatgagtttggtggcaatgaacaacgttcctccagcgccggcaaattatttgcaacgtgcaggtcgcgcggggcgtcgtggagagagtgcatctgctgccattacgttatgtaaaaacacggcgcatggaatggaggtattcaaagaccccctctgggcgttcaacactactgccagtgcgccacgggttcgttttgggagcagtagtattgttcaacgacatgttaatgccctggttttaggtctgtttttacgagctgaagttcctgatgcgacaaaactgagttgcaaatggttctttgaaggtgatgagagccagtgtcttcgttttctccattggttaaatcaccaggccgatcagctggcggataaacttaaacgccttactcagggaaccgtactgatgtcattgacggcaacccagctcttgacccgcacacaagcaatgatgcagcaggttgatatccgctggagaagccaacttgcgatactgttggaaaatatcgaagcgttgaaggcggataacagcgcgtgggaagaaacaccagcaggtaaagccatcgcttatcagcttcgtgattatcgcggtgcatatctgttttctaaactcattagtgaagcgttcctgccggggcatggtttcccggttggcgtagtcaatttcaattatctgacggcagatgagctggaaaaacgtcgcgcaataaaagccactcaggctgaccctaatgaagggggagaaagcttttctcgtcgtattgaaaaattgcccagccgtgatttgcctacagcattacgcgagtatgcgcctggtgcagatgtggtattgggcggaaaagtatatcgttcctcgggcattatgcttggcaaggtgcttgccagcgggcaggagctgtcaggcgatcatcatattccgtggttctggcattgccgtaaatgtggtgcgggggcaaccagtactacccatcctgtcgaatgtagtcactgcaaagcggatatacagcaacttgatgtgaagcgttatttacagcctgttggttttgcgacagatattcgttatcaggcacataatgatgtatccatgcctgcacaacttccctggaaagatccacgtgttcttgtaccgtcttcggtgtgggtttctttacccgatgctgggctaggacgttaccgttttagccatagtggggaattgttccacttcagtgaaggggaatttgggcacggctacgcaatttgcctctcatgtggtcgggcagaatctcaaactcaaccccagcgtacccctgaaaatctaaagaacccagagagggaaaatacgcattacctgttgcgagggggcagtaacgatcgtcaggggagcaataaattgtgccacggtcatgtgcataaagatctgtggttgggatatagcagtcgtacagatatggttgagctgcaactcaatgatgataatggcctgttgatccgtgatgaggttgccgcgcgttcccttgcggtcgctttgcgtgaagggttagcgcataaattgggtatcgaaaatactgagctgggcgtgacgacgcagcaagcgcgcgatatcaatggctataccggatattccatcttcatttacgacaataatgcgggtggtgcaggttatgcagtgcaattgatcgaccattgggctgatgtctttaattacgccagaaaattgctcgattgcagttgcgataaattctgtcaccactgcttgctcagctacgacagtcagcattatgtcaacagattagatcgtcaccatgcattaaccctgcttaccaatgtacggttgcagcgacttaacctcgcgccagaatatcagtacttcggcgatggtagccgggttgaaactaaccctctgagtttacgtattgcgcaatgcctgaacagcgagatttatgactcctgctcgctggttcttgcggggccgcaggaacagtgggactttgcccaatggccattatttaaagagttgctccagtttgcctcctccggtgggaatgttgagttgctggtggccacgccgctggcaaacttaactgatagctccagacatcagctttccgcgttggcggcgatgccgggaggtcgcttacaagtgaaatccattgccactgcgcagctcatgcaaggaaaggggcgctggcttgcgcaggtgactcgcgaagggcaaagccaacagtgggccgcagacgacagcgctaccgttgcacctggtgaattatggggacaaagtgcgtcttcaccagtagtgacacttaaaggaacgtccggaaaaaccttctcgggtcagaccttaagtgcagaagatttactgcccgccttacccaccggggcggtgcgcatcaatctctgtgaacaactggacgggccgctggaaggttttggttcgcgtttctggtcgttagtcacgcaacagcacgctggctggaagcaggcatttacccgccacaaagagataacgcatgttgagtacagcgatcgttatcttaatagcccattcacggcgcgtttgttaggtgaaatcttaaccgagctggttgaacagggaatggcggaacgcgccagcctcactgtttgcgtcaaaaaattggattacaactctcgccaacacgacgctctctataacgcgtggcttaatgaggaagatcgtcagcaggttgtgaccactttacttgaagaaggatatctggggcctgcgtggccgggagcaattagctggttaacgggggataaccagagtacggagcatggacgagaactgacagtcaccttcagcgatggcagtcagcattatgtcctgctcgacatggggcttagctactggcgctgtattgaagataccttctttgattttgccctgcgagtaccgcagcaagttgaacggctggcaaacacgcgagcgcgagctgttgccccgggtaatgaccttaggagttatattatcgctggataa

SEQ ID NO: 29209 - DNA, 2937 bp, Escherichia coli O157: str. 2010EL-2044; identical to SEQ ID NO: 28445

SEQ ID NO: 29210 - DNA, 6315 bp, Escherichia coli O157: str. 2010EL-2045; identical to SEQ ID NO: 29208

SEQ ID NO: 29211 - DNA, 2937 bp, Escherichia coli O157: str. 2010EL-2045; identical to SEQ ID NO: 28445

SEQ ID NO: 29212 - DNA, 6315 bp, Escherichia coli O157:H- str. 493-89; identical to SEQ ID NO: 28464

SEQ ID NO: 29213 - DNA, 2937 bp, Escherichia coli O157:H- str. 493-89; identical to SEQ ID NO: 28445

SEQ ID NO: 29214 - DNA, 6315 bp, Escherichia coli O157:H- str. H 2687; identical to SEQ ID NO: 28464

SEQ ID NO: 29215 - DNA, 2937 bp, Escherichia coli O157:H- str. H 2687; identical to SEQ ID NO: 28445

SEQ ID NO: 29216 - DNA, 6315 bp, Escherichia coli O157:H7; identical to SEQ ID NO: 28494

SEQ ID NO: 29217 - DNA, 2937 bp, Escherichia coli O157:H7; identical to SEQ ID NO: 28445

SEQ ID NO: 29218 - DNA, 6315 bp, Escherichia coli O157:H7; identical to SEQ ID NO: 28540

SEQ ID NO: 29219 - DNA, 2937 bp, Escherichia coli O157:H7; identical to SEQ ID NO: 28957

SEQ ID NO: 29220 - DNA, 6315 bp, Escherichia coli O157:H7; identical to SEQ ID NO: 28464

SEQ ID NO: 29221 - DNA, 2937 bp, Escherichia coli O157:H7
atgattgaaaatgagagcggttatttgattacctatttcagaaggatatatcaggcgcttcgtgggcaatcatctcaatatcctgccgctaaaattgcacaagaattaggcgatacgattcctgtcacaatgcaaaacgaactggtctatgaaatagccggtgaattctgcgagactctctgccgattacttagtgagcatcctcctcatagcagtgatcccgtttctgcattacgtaagctctctccagactggcatcttcaacttccactcgttctccccgaagcgaatgctgcagagattgtaaggcgattactttctcaatcttctgaaatacgcagtgcaagtagtcttcaggttgaaagaatctgggtcgatgttgatgacagttggtattgcgatgcccggttccgattcccggccacaatgagtacagaacagttaacctctttgtttgaatgccatattcagccggagcagacccgactcatcatttcaggaaaatggaaaaatggcggggcaaggttggcaatgctaagccgttatgagcagcaagattggcgggtcgagttattacctattgcgatgcaaaaactctctggtgcagatgcaatggccgaaatctcattgtcgcttcatgaaggtccaattctgttaggtcacacaattccaaaaggcggttatgaacttactgaagaacttccctgggtttttgaagcgatgaatgagagtgaatcgcagctaaaacttgttggtatggggtctgtgagttccaggctaaatgctctgtttatttcgctaccgaaaaatagccatttagatattagtggagaaggtgagtttgatatcccaaggttgctgaaaaacagtgaacgcagcttaactaaaataagtggagtatttagcgttgttttacatgatggtgctgtttgtacaattcgcacccagcaactttatgattctgcgattgaatattatattaaatcgacagaagttgaactggttaaatcggattatcctgtccatcgagcctggccgaagatcggttggaaaaaggatctgcaatatggcattgtaccggagaaagaacttttttggcgttccattcgttcaggtaataatgcctggtattctgtcgcatcagaaatgccaaaaggacagatagaagtccggcgaatagttaatgatgaggttttatttagcggtaaagttgtagttttaccagcagacttcgatattaatattatacctgagagtgctcagcaaggcattattatgctttctggtataacggatactagaattgataaatattcaaacaatgaaaaagtaacacttaagtccgattattcacaaaacgagtgtgctatttattataattcatcgctgatgctggaaaataccgttgatttacgggtctcctggaaagatggttctaatcttaaactattattacctaagccggttagcggtggccgatttgtaactaatgatggttctgttcattttgatggtgtggcatctatagcacatttgcatggaatagatgctgagttattaaccatatcatgtgctggaagaggatatcttaatatcgagttattggatgaaaatccagtagctgaaaaattccgctatttacatgccgaccttcctcttttatcaggacgcaatgacaaattacaacaaatttcactttatgagaactataatttgctaaatgctatgctggcatgtgcatggaacagcaatagtacattatgtgttgatttttactctgacagatttggaaaggataaagcaacactcaatattaaacgctacgatggtagttttattgaacacgatcaagggttactggttgatataaaaaattctgttgtttttcctgcaaatagaatagacgaactggttgttgatgctatttctcttaagaatcctggcttacacatatcattgttaaaaaaagatgagtttgcttatgatctttcagctctgaatgttcaggatagtccatggttaattgtgggaaaacttgatggtacagctcgcattgcaccagtaattaaatggatgctacctgtattgcagacaaatgatttattactaaatgctctatgcgaagcagacccagaacagcgcaaaaaaaattttaatgagctaatttttgaaatagataacaacccattgcaaaattattgctgtttattaacagagtatattaagaaatacaaaatgaataatggcttatccttgctggatctggacttgttcagaggtatttcgagtaattaccgcgtggttgttcaattgttaatatcatcatgtctttctggtgatagcgatacgatttatgatatacaggaagaattacccttttcatggggatggattcccgtttcaatctggaaagatgttttccaaaaatgttggacttatctggagaaacagattaacgataaaacattagcattacatatattgcaaccctttattgcttttatgaaccatcgtgcacatatcgatcgtcggctggctccgattgcgaatatgttacttacatatagtgagagcctaccaaccggttgtgatgtattgccaactgttagtcgtgagcagtttaatgaagctaaacagatgctattaaggaaccccgacagctttgggcgtatcagtatcttccctaaagaactttggtctagtgctattactccagagttaaaatctgtttttaataagctttggattgaagataaatatcactcacggcttgaaaaacgttttaatttgatgttagtcgcagcgctgttaacccaaaaagataataacctgatacatcaactgtctgcgctttttgaatttcactatcagcaagccccacagcaattaggggtaatctatcaatattattttgaacaagcaggagtatgtcattga

SEQ ID NO: 29222 - DNA, 6315 bp, Escherichia coli O157:H7; identical to SEQ ID NO: 28464

SEQ ID NO: 29223 - DNA, 2937 bp, Escherichia coli O157:H7; identical to SEQ ID NO: 28445

SEQ ID NO: 29224 - DNA, 6315 bp, Escherichia coli O157:H7; identical to SEQ ID NO: 28464

SEQ ID NO: 29225 - DNA, 2937 bp, Escherichia coli O157:H7; identical to SEQ ID NO: 28445

SEQ ID NO: 29226 - DNA, 6315 bp, Escherichia coli O157:H7 str. 06-3745; identical to SEQ ID NO: 28540

SEQ ID NO: 29227 - DNA, 2937 bp, Escherichia coli O157:H7 str. 06-3745; identical to SEQ ID NO: 28445

SEQ ID NO: 29228 - DNA, 6315 bp, Escherichia coli O157:H7 str. 06-4039; identical to SEQ ID NO: 28464

SEQ ID NO: 29229 - DNA, 2937 bp, Escherichia coli O157:H7 str. 06-4039; identical to SEQ ID NO: 28445

SEQ ID NO: 29230 - DNA, 6315 bp, Escherichia coli O157:H7 str. 07-3091; identical to SEQ ID NO: 28464

SEQ ID NO: 29231 - DNA, 2937 bp, Escherichia coli O157:H7 str. 07-3091; identical to SEQ ID NO: 28445

SEQ ID NO: 29232 - DNA, 6315 bp, Escherichia coli O157:H7 str. 07-3391; identical to SEQ ID NO: 28636

SEQ ID NO: 29233 - DNA, 2937 bp, Escherichia coli O157:H7 str. 07-3391; identical to SEQ ID NO: 28445

SEQ ID NO: 29234 - DNA, 6315 bp, Escherichia coli O157:H7 str. 08-3037; identical to SEQ ID NO: 28464

SEQ ID NO: 29235 - DNA, 2937 bp, Escherichia coli O157:H7 str. 08-3037; identical to SEQ ID NO: 28445

SEQ ID NO: 29236 - DNA, 6315 bp, Escherichia coli O157:H7 str. 08-3527; identical to SEQ ID NO: 28464

SEQ ID NO: 29237 - DNA, 2937 bp, Escherichia coli O157:H7 str. 08-3527; identical to SEQ ID NO: 28445

SEQ ID NO: 29238 - DNA, 6315 bp, Escherichia coli O157:H7 str. 08-4169; identical to SEQ ID NO: 28464

SEQ ID NO: 29239 - DNA, 2937 bp, Escherichia coli O157:H7 str. 08-4169; identical to SEQ ID NO: 28445

SEQ ID NO: 29240 - DNA, 6315 bp, Escherichia coli O157:H7 str. 08-4529; identical to SEQ ID NO: 28636

SEQ ID NO: 29241 - DNA, 2937 bp, Escherichia coli O157:H7 str. 08-4529; identical to SEQ ID NO: 28445

SEQ ID NO: 29242 - DNA, 6315 bp, Escherichia coli O157:H7 str. 2009EL1449; identical to SEQ ID NO: 28464

SEQ ID NO: 29243 - DNA, 2937 bp, Escherichia coli O157:H7 str. 2009EL1449; identical to SEQ ID NO: 28445

SEQ ID NO: 29244 - DNA, 6315 bp, Escherichia coli O157:H7 str. 2009EL1705; identical to SEQ ID NO: 28464

SEQ ID NO: 29245 - DNA, 2937 bp, Escherichia coli O157:H7 str. 2009EL1705; identical to SEQ ID NO: 28445

SEQ ID NO: 29246 - DNA, 6315 bp, Escherichia coli O157:H7 str. 2009EL1913; identical to SEQ ID NO: 28636

SEQ ID NO: 29247 - DNA, 2937 bp, Escherichia coli O157:H7 str. 2009EL1913; identical to SEQ ID NO: 28445

SEQ ID NO: 29248 - DNA, 6315 bp, Escherichia coli O157:H7 str. 2009EL2109; identical to SEQ ID NO: 28464

SEQ ID NO: 29249 - DNA, 2937 bp, Escherichia coli O157:H7 str. 2009EL2109; identical to SEQ ID NO: 28445

SEQ ID NO: 29250 - DNA, 6315 bp, Escherichia coli O157:H7 str. 2011EL-1107; identical to SEQ ID NO: 28636

SEQ ID NO: 29251 - DNA, 2937 bp, Escherichia coli O157:H7 str. 2011EL-1107; identical to SEQ ID NO: 28445

SEQ ID NO: 29252 - DNA, 6315 bp, Escherichia coli O157:H7 str. 2011EL-2090; identical to SEQ ID NO: 28464

SEQ ID NO: 29253 - DNA, 2937 bp, Escherichia coli O157:H7 str. 2011EL-2090; identical to SEQ ID NO: 28445

SEQ ID NO: 29254 - DNA, 6315 bp, Escherichia coli O157:H7 str. 2011EL-2091; identical to SEQ ID NO: 28464

SEQ ID NO: 29255 - DNA, 2937 bp, Escherichia coli O157:H7 str. 2011EL-2091; identical to SEQ ID NO: 28445

SEQ ID NO: 29256 - DNA, 6315 bp, Escherichia coli O157:H7 str. 2011EL-2092; identical to SEQ ID NO: 28464

SEQ ID NO: 29257 - DNA, 2937 bp, Escherichia coli O157:H7 str. 2011EL-2092; identical to SEQ ID NO: 28445

SEQ ID NO: 29258 - DNA, 6315 bp, Escherichia coli O157:H7 str. 2011EL-2093; identical to SEQ ID NO: 28464

SEQ ID NO: 29259 - DNA, 2937 bp, Escherichia coli O157:H7 str. 2011EL-2093; identical to SEQ ID NO: 28445

SEQ ID NO: 29260 - DNA, 6315 bp, Escherichia coli O157:H7 str. 2011EL-2094; identical to SEQ ID NO: 28464

SEQ ID NO: 29261 - DNA, 2937 bp, Escherichia coli O157:H7 str. 2011EL-2094; identical to SEQ ID NO: 28445

SEQ ID NO: 29262 - DNA, 6315 bp, Escherichia coli O157:H7 str. 2011EL-2096; identical to SEQ ID NO: 28464

SEQ ID NO: 29263 - DNA, 2937 bp, Escherichia coli O157:H7 str. 2011EL-2096; identical to SEQ ID NO: 28445

SEQ ID NO: 29264 - DNA, 6315 bp, Escherichia coli O157:H7 str. 2011EL-2097; identical to SEQ ID NO: 28464

SEQ ID NO: 29265 - DNA, 2937 bp, Escherichia coli O157:H7 str. 2011EL-2097; identical to SEQ ID NO: 28445

SEQ ID NO: 29266 - DNA, 6315 bp, Escherichia coli O157:H7 str. 2011EL-2098; identical to SEQ ID NO: 28464

SEQ ID NO: 29267 - DNA, 2937 bp, Escherichia coli O157:H7 str. 2011EL-2098; identical to SEQ ID NO: 28445

SEQ ID NO: 29268 - DNA, 6315 bp, Escherichia coli O157:H7 str. 2011EL-2099; identical to SEQ ID NO: 28464

SEQ ID NO: 29269 - DNA, 2937 bp, Escherichia coli O157:H7 str. 2011EL-2099; identical to SEQ ID NO: 28445

SEQ ID NO: 29270 - DNA, 6315 bp, Escherichia coli O157:H7 str. 2011EL-2101; identical to SEQ ID NO: 28464

SEQ ID NO: 29271 - DNA, 2937 bp, Escherichia coli O157:H7 str. 2011EL-2101; identical to SEQ ID NO: 28445

SEQ ID NO: 29272 - DNA, 6315 bp, Escherichia coli O157:H7 str. 2011EL-2103; identical to SEQ ID NO: 28464

SEQ ID NO: 29273 - DNA, 2937 bp, Escherichia coli O157:H7 str. 2011EL-2103; identical to SEQ ID NO: 28445

SEQ ID NO: 29274 - DNA, 6315 bp, Escherichia coli O157:H7 str. 2011EL-2104; identical to SEQ ID NO: 28464

SEQ ID NO: 29275 - DNA, 2937 bp, Escherichia coli O157:H7 str. 2011EL-2104; identical to SEQ ID NO: 28445

SEQ ID NO: 29276 - DNA, 6315 bp, Escherichia coli O157:H7 str. 2011EL-2105; identical to SEQ ID NO: 28464

SEQ ID NO: 29277 - DNA, 2937 bp, Escherichia coli O157:H7 str. 2011EL-2105; identical to SEQ ID NO: 28445

SEQ ID NO: 29278 - DNA, 6315 bp, Escherichia coli O157:H7 str. 2011EL-2106; identical to SEQ ID NO: 28464

SEQ ID NO: 29279 - DNA, 2937 bp, Escherichia coli O157:H7 str. 2011EL-2106; identical to SEQ ID NO: 28445

SEQ ID NO: 29280 - DNA, 6315 bp, Escherichia coli O157:H7 str. 2011EL-2107; identical to SEQ ID NO: 28464

SEQ ID NO: 29281 - DNA, 2937 bp, Escherichia coli O157:H7 str. 2011EL-2107; identical to SEQ ID NO: 28445

SEQ ID NO: 29282 - DNA, 6315 bp, Escherichia coli O157:H7 str. 2011EL-2108; identical to SEQ ID NO: 28464

SEQ ID NO: 29283 - DNA, 2937 bp, Escherichia coli O157:H7 str. 2011EL-2108; identical to SEQ ID NO: 28445

SEQ ID NO: 29284 - DNA, 6315 bp, Escherichia coli O157:H7 str. 2011EL-2109; identical to SEQ ID NO: 28464

SEQ ID NO: 29285 - DNA, 2937 bp, Escherichia coli O157:H7 str. 2011EL-2109; identical to SEQ ID NO: 28445

SEQ ID NO: 29286 - DNA, 6315 bp, Escherichia coli O157:H7 str. 2011EL-2111; identical to SEQ ID NO: 28464

SEQ ID NO: 29287 - DNA, 2937 bp, Escherichia coli O157:H7 str. 2011EL-2111; identical to SEQ ID NO: 28445

SEQ ID NO: 29288 - DNA, 6315 bp, Escherichia coli O157:H7 str. 2011EL-2112; identical to SEQ ID NO: 28464

SEQ ID NO: 29289 - DNA, 2937 bp, Escherichia coli O157:H7 str. 2011EL-2112; identical to SEQ ID NO: 28445

SEQ ID NO: 29290 - DNA, 6315 bp, Escherichia coli O157:H7 str. 2011EL-2113; identical to SEQ ID NO: 28464

SEQ ID NO: 29291 - DNA, 2937 bp, Escherichia coli O157:H7 str. 2011EL-2113; identical to SEQ ID NO: 28445

SEQ ID NO: 29292 - DNA, 6315 bp, Escherichia coli O157:H7 str. 2011EL-2114; identical to SEQ ID NO: 28464

SEQ ID NO: 29293 - DNA, 2937 bp, Escherichia coli O157:H7 str. 2011EL-2114; identical to SEQ ID NO: 28445

SEQ ID NO: 29294 - DNA, 6315 bp, Escherichia coli O157:H7 str. 2011EL-2286; identical to SEQ ID NO: 28636

SEQ ID NO: 29295 - DNA, 2937 bp, Escherichia coli O157:H7 str. 2011EL-2286
atgattgaaaatgagagcggttatttgattacctatttcagaaggatatatcaggcgcttcgtgggcaatcatctcaatatcctgccgctaaaattgcacaagaattaggcgatacgattcctgtcacaatgcaaaacgaactggtctatgaaatagccggtgaattctgcgagactctctgccgattacttagtgagcatcctcctcatagcagtgatcccgtttctgcattacgtaagctctctccagactggcatcttcaacttccactcgttctccccgaagcgaatgctgcagagattgtaaggcgattactttctcaatcttctgaaatacgcagtgcaagtagtcttcaggttgaaagaatctgggtcgatgttgatgacagttggtattgcgatgcccggttccgattcccggccacaatgcgtacagaacagttaacctctttgtttgaatgccatattcagccggagcagacccgactcatcatttcaggaaaatggaaaaatggcggggcaaggttggcaatgctaagccgttatgagcagcaagattggcgggtcgagttattacctattgcgatgcaaaaactctctggtgcagatgcaatggccgaaatctcattgtcgcttcatgaaggtccaattctgttaggtcacacaattccaaaaggcggttatgaacttactgaagaacttccctgggtttttgaagcgatgaatgagagtgaatcgcagctaaaacttgttggtatggggtctgtgagttccaggctaaatgctctgtttatttcgctaccgaaaaatagccatttagatattagtggagaaggtgagtttgatatcccaaggttgctgaaaaacagtgaacgcagcttaactaaaataagtggagtatttagcgttgttttacatgatggtgctgtttgtacaattcgcacccagcaactttatgattctgcgattgaatattatattaaatcgacagaagttgaactggttaaatcggattatcctgtccatcgagcctggccgaagatcggttggaaaaaggatctgcaatatggcattgtaccggagaaagaacttttttggcgttccattcgttcaggtaataatgcctggtattctgtcgcatcagaaatgccaaaaggacagatagaagtccggcgaatagttaatgatgaggttttatttagcggtaaagttgtagttttaccagcagacttcgatattaatattatacctgagagtgctcagcaaggcattattatgctttctggtataacggatactagaattgataaatattcaaacaatgaaaaagtaacacttaagtccgattattcacaaaacgagtgtgctatttattataattcatcgctgatgctggaaaataccgttgatttacgggtctcctggaaagatggttctaatcttaaactattattacctaagccggttagcggtggccgatttgtaactaatgatggttctgttcattttgatggtgtggcatctatagcacatttgcatggaatagatgctgagttattaaccatatcatgtgctggaagaggatatcttaatatcgagttattggatgaaaatccagtagctgaaaaattccgctatttacatgccgaccttcctcttttatcaggacgcaatgacaaattacaacaaatttcactttatgagaactataatttgctaaatgctatgctggcatgtgcatggaacagcaatagtacattatgtgttgatttttactctgacagatttggaaaggataaagcaacactcaatattaaacgctacgatggtagttttattgaacacgatcaagggttactggttgatatgaaaaattctgttgtttttcctgcaaatagaatagacgaactggttgttgatgctatttctcttaagaatcctggcttacacatatcattgttaaaaaaagatgagtttgcttatgatctttcagctctgaatgttcaggatagtccatggttaattgtgggaaaacttgatggtacagctcgcattgcaccagtaattaaatggatgctacctgtattgcagacaaatgatttattactaaatgctctatgcgaagcagacccagaacagcgcaaaaaaaattttaatgagctaatttttgaaatagataacaacccattgcaaaattattgctgtttattaacagagtatattaagaaatacaaaatgaataatggcttatccttgctggatctggacttgttcagaggtatttcgagtaattaccgcgtggttgttcaattgttaatatcatcatgtctttctggtgatagcgatacgatttatgatatacaggaagaattacccttttcatggggatggattcccgtttcaatctggaaagatgttttccaaaaatgttggacttatctggagaaacagattaacgataaaacattagcattacatatattgcaaccctttattgcttttatgaaccatcgtgcacatatcgatcgtcggctggctccgattgcgaatatgttacttacatatagtgagagcctaccaaccggttgtgatgtattgccaactgttagtcgtgagcagtttaatgaagctaaacagatgctattaaggaaccccgacagctttgggcgtatcagtatcttccctaaagaactttggtctagtgctattactccagagttaaaatctgtttttaataagctttggattgaagataaatatcactcacggcttgaaaaacgttttaatttgatgttagtcgcagcgctgttaacccaaaaagataataacctgatacatcaactgtctgcgctttttgaatttcactatcagcaagccccacagcaattaggggtaatctatcaatattattttgaacaagcaggagtatgtcattga

SEQ ID NO: 29296 - DNA, 6315 bp, Escherichia coli O157:H7 str. 2011EL-2287; identical to SEQ ID NO: 28636

SEQ ID NO: 29297 - DNA, 2937 bp, Escherichia coli O157:H7 str. 2011EL-2287; identical to SEQ ID NO: 28445

SEQ ID NO: 29298 - DNA, 6315 bp, Escherichia coli O157:H7 str. 2011EL-2288; identical to SEQ ID NO: 28636

SEQ ID NO: 29299 - DNA, 2937 bp, Escherichia coli O157:H7 str. 2011EL-2288; identical to SEQ ID NO: 28445

SEQ ID NO: 29300 - DNA, 6315 bp, Escherichia coli O157:H7 str. 2011EL-2289
atggacgttcagcaactgcattatgcgccacttctaaatcagcttcatcagcgtgcggtgaggtcggtggtaagtcagttggcattgcggagcaagtcgttgactcattatctggaatcacaatattttcagcctcccggtcaggaggggtcactgcttgcagacccggtattcgaaagtacattcggctggatgcctgcggatgaaacaatggaggatttgcgggacaagctgatctccagcccgctggttgatgcattgagcaaagcgccagtgccatttcgtcatcaacttactgcgtggcgaacgattctggaagacaaaaaatccttgttagtgagcagcggtacgggatccgggaaaacagaatgctttatggtaccggttctggaagatcttattcgtcagcaaaaatcgacccgccagtcactaacagggacacaagctattttcttgtatccgttaaatgcattaattaacagccaacaggagcggcttcgcgaatggacgcgcggatttaaggggaaaatacgcttcgcgctatataatggcgaaacccggcataccaaatacgaaattcaggaagatcagttgaaagtacctgaacaagctttgagtcgggaagccatttatgaagaaccaccttccatcatggtgacgaataccaccatgctggaatatatgctgattcgtcgtaaagatgccccaatcatcgaaaagtctcaggggatgttaaagtatatcgtcctggatgaagcccatagttatattggttctcaggctgctgagttagcgctgcttttacgtcgtgttatgcaggctttcaatgttggacccggcacagataaacctgtgcagattatcgcgacctctgccactattggtgaagactctcctgaaggtaataaggagcttgctaaatttgtcgctgatctcgcgggcgttacagaacgtgatgtcaaagtggttcgcggttatcgacaaataccgcgggtatcggagtcgctgattcgtcatgaataccccacatctttaacttctcttaaatccctgagccctcaggatctttaccaacagctttgtcattaccgtgtggcccagcaattgcgtcaggcgttaactcatcccggacggcaggcagtacgtttgagtgagttgctcaatgttgtcagaagaacctggccagatattaatcaccgtgagctactgcaactcctcgatctaatggcaagatcgcgagaaggtgaactggcttttacgccattacgtatgcatgggtttatcagaacactggcgggtctatgggcatgttcaaacaaacaatgctcacataaagcacatgaattaaatcagagtgactggccatttggtcaggtatggtttgagcagcgccaatattgtgactgtggagcgccggtatttgaagttttacgttgctccgggtgtggttcagcttatttgtctgccaaagaggagatgcgcggtgatggaacgaactggttggtagcgcaaccagccactgccgaagtggatgagtttgctcttgatgtagatgtttattctgaagatgaagacaacgacgaattagacaataactctcaatttgatcgtctgattgcgagcgatggtgaaaaatatatcatttcactggaagaaacgacggcggggaaaattgatagtgaagcgcaaaagcactatgaaataaacctgttaagaccggaatctcgaggtgagggacgcaataactcctttgcttgtgtttgctgtggtgacactcaacggaaaaataatcctttattccgtccgcttcggctcggcgcgcccttttttttaaatgaaattattcctactctgctggagttttctccattaccgcaaacaagagaagagcagttaggaccgtttaatggtcgacgcttgctcacctttacggattcgcgtcagggtaccgctcgcatttcagcccgcttacagcaggatgccgataaagcgacgttgcgagctctttgttaccaggagctggcaaatattacagagccttcagcaaaactcagcccggcacactgtgcactgttagagaaagttattagccagttttctgtcctccctttaaaaaattccatcgacgcgctgaaaaaagcgatggctgcgaatgaggagcttagcccgacggacattcaggcacttaaaattattgagccgatggtgagttccttaagcacggagcatgctgaagcgatgcaaatacttcaggctaactctggcaatcagcagaagaaaaccatgtcatggcaaacgctgtctgaacagctggttggcagtgtggaccttgccgatagaatgagaggcagttttaaagaattgtctgggcttgatcttactaaacaacagtttgcagatttttgtttatacagcgagtttggtcgccgccctaaaaatgcctggaccctcgaaagtctgggtctggtagccattcactatccattcattgataaagttacaacctgcccgcaggactggaagacattattacccgatcccgataagcaattagcggaatggcgtaatttattgaagattactcttgatttctttatccgtgaaaacagtgccgttttttacgaaaacgagcaataccctcgctggatgggggcacgtttcccggtaaaaatgctccaggggccagataaaaaaaacaaagggcagaaacgtgatcaactttggccacaaatacgcgatcgccattataaccgggtcattaagctattaatcgcagtctttccggcaatacaacctgagcaggctcactggaaatcgttagttaaccacttaatgattgaggtctgggatgcaattcgaccctgcttacgtcagtttgagtcgggttatcagctggatattaaacaacaagctgaattttacagtccaaagcaagtgtggcgttgcccctatactcgacgtgcgttagacgtcacgttgctgggatactctccgtatttgccgggtagcaaagaaattgcacctgaaaaagcagtgttgattgaaatgcctgagcttcctgtacgtcactggcgtttgtctggtggtggagaaatcgcccgagaagaacgtctggagtggctggaaagtaatgcgctgattcaacatgcccgcgaggaaggattatggtctactcgcagcgaccgactggccctgaaagatagctggtatcgtctggaggaacactctgcgcagagaacgcctgagcagaaccagtttaatgaaaaacaatttaagtcaggcaaagttaatgtgctgaactgttccacgaccatggagatgggggtggatattggtggtatgagtttggtggcaatgaacaacgttcctccagcgccggcaaattatttgcaacgtgcaggtcgcgcggggcgtcgtggagagagtgcatctgctgccattacgttatgtaaaaacacggcgcatggaatggaggtattcaaagaccccctctgggcgttcaacactactgccagtgcgccacgggttcgttttgggagcagtagtattgttcaacgacatgttaatgccctggttttaggtctgtttttacgagctgaagttcctgatgcgacaaaactgagttgcaaatggttctttgaaggtgatgagagccagtgtcttcgttttctccattggttaaatcaccaggccgatcagctggcggataaacttaaacgccttactcagggaaccgtactgatgtcattgacggcaacccagctcttgacccgcacacaagcaatgatgcagcaggttgatatccgctggagaagccaacttgcgatactgttggaaaatatcgaagcgttgaaggcggataacagcgcgtgggaagaaacaccagcaggtaaagccatcgcttatcagcttcgtgattatcgcggtgcatatctgttttctaaactcattagtgaagcgttcctgccggggcatggtttcccggttggcgtagtcaatttcaattatctgacggcagatgagctggaaaaacgtcgcgcaataaaagccactcaggctgaccctaatgaagggggagaaagcttttctcgtcgtattgaaaaattgcccagccgtgatttgcctacagcattacgcgagtatgcgcctggtgcagatgtggtattgggcggaaaagtatatcgttcctcgggcattatgcttggcaaggtgcttgccagcgggcaggagctgtcaggcgatcatcatattccgtggttctggcattgccgtaaatgtggtgcgggggcaaccagtactacccatcctgtcgaatgtagtcactgcaaagcggatatacagcaacttgatgtgaagcgttatttacagcctgttggttttgcgacagatattcgttatcaggcacataatgatgtatccatgcctgcacaacttccctggaaagatccacgtgttcttgtaccgtcttcggtgtgggtttctttacccgatgctgggctaggacgttaccgttttagccatagtggggaattgttccacttcagtgaaggggaatttgggcacggctacgcaatttgcctctcatgtggtcgggcagaatctcaaactcaaccccagcgtacccctgaaaatctaaagaacccagagagggaaaatacgcattacctgttgcgagggggcagtaacgatcgtcaggggagcaataaattgtgccacggtcatgtgcataaagatctgtggttgggatatagcagtcgtacagatatggttgagctgcaactcaatgatgataatggcctgttgatccgtgatgaggttgccgcgcgttcccttgcggtcgctttgcgtgaagggttagcgcataaattgggtatcgaaaatactgagctgggcgtgacgacgcagcaagcgcgcgatatcaatggctataccggatattccatcttcatttacgacaataatgcgggtggtgcaggttatgcagtgcaattgatcgaccattgggctgatgtctttaattacgccagaaaattgctcgattgcagttgcgataaattctgtcaccactgcttgctcagctacgacagtcagcattatgtcaacagattagatcgtcaccatgcattaaccctgcttaccaatgtacggttgcagcgacttaacctcgcgccagaatatcagtacttcggcgatggtagccgggttgaaactaaccctctgagtttacgtattgcgcaatgcctgaacagcgagatttatgactcctgctcgctggttcttgcggggccgcaggaacagtgggactttgcccaatggccattatttaaagagttgctccagtttgcctcctccggtgggaatgttgagttgctggtggccacgccgctggcaaacttaactgatagctccagacatcagctttccgcgttggcggcgatgccgggaggtcgcttacaagtgaaatccattgccactgcgcagctcatgcaaggaaaggggcgctggcttgcgcaggtgactcgcgaagggcaaagccaacagtgggccgcagacgacagcgctaccgttgcacctggtgaattatggggacaaagtgcgtcttcaccagtagtgacacttaaaggaacgtccggaaaaaccttctcgggtcagaccttaagtgcagaagatttactgcccgccttacccaccggggcggtgcgcatcaatctctgtgaacaactggacgggccgctggaaggttttggttcgcgtttctggtcgttagtcacgcaacagcacgctggctggaagcaggcatttacccgccacaaagagataacgcatgttgagtacagcgatcgttatcttaatagcccattcacggcgcgtttgttaggtgaaatcttaaccgagctggttgaacagggaatggcggaacgcgccagcctcactgtttgcgtcaaaaaattggattacaactctcgccaacacgacgctctctataacgcgtggcttaatgaggaagatcgtcagcaggttgtgaccactttacttgaagaaggatatctggggcctgcgtggccgggagcaattagctggttaacgggggataaccagagtacggagcatggacgagaactgacagtcaccttcagcgatggcagtcagcattatgtcctgctcgacatggggcttagctactggcgctgtattgaagataccttctttgattttgccctgcgagtaccgcagcaagttgaacggctggcaaacacgcgagcgcgagctgttgccccgggtaatgaccttaggagttatattatcgctggataa

SEQ ID NO: 29301 - DNA, 2937 bp, Escherichia coli O157:H7 str. 2011EL-2289; identical to SEQ ID NO: 28445

SEQ ID NO: 29302 - DNA, 6315 bp, Escherichia coli O157:H7 str. 2011EL-2290; identical to SEQ ID NO: 28636

SEQ ID NO: 29303 - DNA, 2937 bp, Escherichia coli O157:H7 str. 2011EL-2290; identical to SEQ ID NO: 28445

SEQ ID NO: 29304 - DNA, 6315 bp, Escherichia coli O157:H7 str. 2011EL-2312; identical to SEQ ID NO: 28540

SEQ ID NO: 29305 - DNA, 2937 bp, Escherichia coli O157:H7 str. 2011EL-2312; identical to SEQ ID NO: 28957

SEQ ID NO: 29306 - DNA, 6315 bp, Escherichia coli O157:H7 str. 2011EL-2313; identical to SEQ ID NO: 28540

SEQ ID NO: 29307 - DNA, 2937 bp, Escherichia coli O157:H7 str. 2011EL-2313; identical to SEQ ID NO: 28957

SEQ ID NO: 29308 - DNA, 6315 bp, Escherichia coli O157:H7 str. EC4042; identical to SEQ ID NO: 28636

SEQ ID NO: 29309 - DNA, 2937 bp, Escherichia coli O157:H7 str. EC4042; identical to SEQ ID NO: 28445

SEQ ID NO: 29310 - DNA, 6315 bp, Escherichia coli O157:H7 str. EC4045; identical to SEQ ID NO: 28636

SEQ ID NO: 29311 - DNA, 2937 bp, Escherichia coli O157:H7 str. EC4045; identical to SEQ ID NO: 28445

SEQ ID NO: 29312 - DNA, 6315 bp, Escherichia coli O157:H7 str. EC4076; identical to SEQ ID NO: 28636

SEQ ID NO: 29313 - DNA, 2937 bp, Escherichia coli O157:H7 str. EC4076; identical to SEQ ID NO: 28445

SEQ ID NO: 29314 - DNA, 6315 bp, Escherichia coli O157:H7 str. EC4113; identical to SEQ ID NO: 28636

SEQ ID NO: 29315 - DNA, 2937 bp, Escherichia coli O157:H7 str. EC4113; identical to SEQ ID NO: 28445

SEQ ID NO: 29316 - DNA, 6315 bp, Escherichia coli O157:H7 str. EC4115; identical to SEQ ID NO: 28636

SEQ ID NO: 29317 - DNA, 2937 bp, Escherichia coli O157:H7 str. EC4115; identical to SEQ ID NO: 28445

SEQ ID NO: 29318 - DNA, 6315 bp, Escherichia coli O157:H7 str. EC4196; identical to SEQ ID NO: 28636

SEQ ID NO: 29319 - DNA, 2937 bp, Escherichia coli O157:H7 str. EC4196; identical to SEQ ID NO: 28445

SEQ ID NO: 29320 - DNA, 6315 bp, Escherichia coli O157:H7 str. EC4206; identical to SEQ ID NO: 28636

SEQ ID NO: 29321 - DNA, 2937 bp, Escherichia coli O157:H7 str. EC4206; identical to SEQ ID NO: 28445

SEQ ID NO: 29322 - DNA, 6315 bp, Escherichia coli O157:H7 str. EC4401; identical to SEQ ID NO: 28636

SEQ ID NO: 29323 - DNA, 2937 bp, Escherichia coli O157:H7 str. EC4401; identical to SEQ ID NO: 28445

SEQ ID NO: 29324 - DNA, 6315 bp, Escherichia coli O157:H7 str. EC4486; identical to SEQ ID NO: 28636

SEQ ID NO: 29325 - DNA, 2937 bp, Escherichia coli O157:H7 str. EC4486; identical to SEQ ID NO: 28445

SEQ ID NO: 29326 - DNA, 6315 bp, Escherichia coli O157:H7 str. EC4501; identical to SEQ ID NO: 28464

SEQ ID NO: 29327 - DNA, 2937 bp, Escherichia coli O157:H7 str. EC4501; identical to SEQ ID NO: 28445

SEQ ID NO: 29328 - DNA, 6315 bp, Escherichia coli O157:H7 str. EC508; identical to SEQ ID NO: 28540

SEQ ID NO: 29329 - DNA, 2937 bp, Escherichia coli O157:H7 str. EC508; identical to SEQ ID NO: 28445

SEQ ID NO: 29330 - DNA, 6315 bp, Escherichia coli O157:H7 str. EDL933; identical to SEQ ID NO: 28464

SEQ ID NO: 29331 - DNA, 3354 bp, Escherichia coli O157:H7 str. EDL933; identical to SEQ ID NO: 28793

SEQ ID NO: 29332 - DNA, 6315 bp, Escherichia coli O157:H7 str. EDL933; identical to SEQ ID NO: 28464

SEQ ID NO: 29333 - DNA, 2937 bp, Escherichia coli O157:H7 str. EDL933; identical to SEQ ID NO: 28445

SEQ ID NO: 29334 - DNA, 6315 bp, Escherichia coli O157:H7 str. F6142; identical to SEQ ID NO: 28540

SEQ ID NO: 29335 - DNA, 2937 bp, Escherichia coli O157:H7 str. F6142; identical to SEQ ID NO: 28445

SEQ ID NO: 29336 - DNA, 6315 bp, Escherichia coli O157:H7 str. F6749; identical to SEQ ID NO: 28464

SEQ ID NO: 29337 - DNA, 2937 bp, Escherichia coli O157:H7 str. F6749; identical to SEQ ID NO: 28445

SEQ ID NO: 29338 - DNA, 6315 bp, Escherichia coli O157:H7 str. F6750; identical to SEQ ID NO: 28464

SEQ ID NO: 29339 - DNA, 2937 bp, Escherichia coli O157:H7 str. F6750; identical to SEQ ID NO: 28445

SEQ ID NO: 29340 - DNA, 6315 bp, Escherichia coli O157:H7 str. F6751; identical to SEQ ID NO: 28464

SEQ ID NO: 29341 - DNA, 2937 bp, Escherichia coli O157:H7 str. F6751; identical to SEQ ID NO: 28445

SEQ ID NO: 29342 - DNA, 6315 bp, Escherichia coli O157:H7 str. F7350; identical to SEQ ID NO: 28464

SEQ ID NO: 29343 - DNA, 2937 bp, Escherichia coli O157:H7 str. F7350; identical to SEQ ID NO: 28445

SEQ ID NO: 29344 - DNA, 6315 bp, Escherichia coli O157:H7 str. F7377; identical to SEQ ID NO: 28464

SEQ ID NO: 29345 - DNA, 2937 bp, Escherichia coli O157:H7 str. F7377; identical to SEQ ID NO: 28445

SEQ ID NO: 29346 - DNA, 6315 bp, Escherichia coli O157:H7 str. F7384; identical to SEQ ID NO: 28636

SEQ ID NO: 29347 - DNA, 2937 bp, Escherichia coli O157:H7 str. F7384; identical to SEQ ID NO: 28445

SEQ ID NO: 29348 - DNA, 6315 bp, Escherichia coli O157:H7 str. F7410; identical to SEQ ID NO: 28636

SEQ ID NO: 29349 - DNA, 2937 bp, Escherichia coli O157:H7 str. F7410; identical to SEQ ID NO: 28445

SEQ ID NO: 29350 - DNA, 6315 bp, Escherichia coli O157:H7 str. G5101; identical to SEQ ID NO: 28644

SEQ ID NO: 29351 - DNA, 2937 bp, Escherichia coli O157:H7 str. G5101; identical to SEQ ID NO: 28445

SEQ ID NO: 29352 - DNA, 6315 bp, Escherichia coli O157:H7 str. G5303; identical to SEQ ID NO: 28464

SEQ ID NO: 29353 - DNA, 2937 bp, Escherichia coli O157:H7 str. G5303; identical to SEQ ID NO: 28445

SEQ ID NO: 29354 - DNA, 6315 bp, Escherichia coli O157:H7 str. H2495; identical to SEQ ID NO: 28464

SEQ ID NO: 29355 - DNA, 2937 bp, Escherichia coli O157:H7 str. H2495; identical to SEQ ID NO: 28445

SEQ ID NO: 29356 - DNA, 6315 bp, Escherichia coli O157:H7 str. H2498; identical to SEQ ID NO: 28464

SEQ ID NO: 29357 - DNA, 2937 bp, Escherichia coli O157:H7 str. H2498; identical to SEQ ID NO: 28445

SEQ ID NO: 29358 - DNA, 6315 bp, Escherichia coli O157:H7 str. K1420; identical to SEQ ID NO: 28540

SEQ ID NO: 29359 - DNA, 2937 bp, Escherichia coli O157:H7 str. K1420; identical to SEQ ID NO: 28445

SEQ ID NO: 29360 - DNA, 6315 bp, Escherichia coli O157:H7 str. K1792; identical to SEQ ID NO: 28464

SEQ ID NO: 29361 - DNA, 1468 bp, Escherichia coli O157:H7 str. K1792
cggtggccgatttgtaactaatgatggttctgttcattttgatggtgtggcatctatagcacatttgcatggaatagatgctgagttattaaccatatcatgtgctggaagaggatatcttaatatcgagttattggatgaaaatccagtagctgaaaaattccgctatttacatgccgaccttcctcttttatcaggacgcaatgacaaattacaacaaatttcactttatgagaactataatttgctaaatgctatgctggcatgtgcatggaacagcaatagtacattatgtgttgatttttactctgacagatttggaaaggataaagcaacactcaatattaaacgctacgatggtagttttattgaacacgatcaagggttactggttgatataaaaaattctgttgtttttcctgcaaatagaatagacgaactggttgttgatgctatttctcttaagaatcctggcttacacatatcattgttaaaaaaagatgagtttgcttatgatctttcagctctgaatgttcaggatagtccatggttaattgtgggaaaacttgatggtacagctcgcattgcaccagtaattaaatggatgctacctgtattgcagacaaatgatttattactaaatgctctatgcgaagcagacccagaacagcgcaaaaaaaattttaatgagctaatttttgaaatagataacaacccattgcaaaattattgctgtttattaacagagtatattaagaaatacaaaatgaataatggcttatccttgctggatctggacttgttcagaggtatttcgagtaattaccgcgtggttgttcaattgttaatatcatcatgtctttctggtgatagcgatacgatttatgatatacaggaagaattacccttttcatggggatggattcccgtttcaatctggaaagatgttttccaaaaatgttggacttatctggagaaacagattaacgataaaacattagcattacatatattgcaaccctttattgcttttatgaaccatcgtgcacatatcgatcgtcggctggctccgattgcgaatatgttacttacatatagtgagagcctaccaaccggttgtgatgtattgccaactgttagtcgtgagcagtttaatgaagctaaacagatgctattaaggaaccccgacagctttgggcgtatcagtatcttccctaaagaactttggtctagtgctattactccagagttaaaatctgtttttaataagctttggattgaagataaatatcactcacggcttgaaaaacgttttaatttgatgttagtcgcagcgctgttaacccaaaaagataataacctgatacatcaactgtctgcgctttttgaatttcactatcagcaagccccacagcaattaggggtaatctatcaatattattttgaacaagcaggagtatgtcattga

SEQ ID NO: 29362 - DNA, 6315 bp, Escherichia coli O157:H7 str. K1793; identical to SEQ ID NO: 28464

SEQ ID NO: 29363 - DNA, 2146 bp, Escherichia coli O157:H7 str. K1793
tatttcgctaccgaaaaatagccatttagatattagtggagaaggtgagtttgatatcccaaggttgctgaaaaacagtgaacgcagcttaactaaaataagtggagtatttagcgttgttttacatgatggtgctgtttgtacaattcgcacccagcaactttatgattctgcgattgaatattatattaaatcgacagaagttgaactggttaaatcggattatcctgtccatcgagcctggccgaagatcggttggaaaaaggatctgcaatatggcattgtaccggagaaagaacttttttggcgttccattcgttcaggtaataatgcctggtattctgtcgcatcagaaatgccaaaaggacagatagaagtccggcgaatagttaatgatgaggttttatttagcggtaaagttgtagttttaccagcagacttcgatattaatattatacctgagagtgctcagcaaggcattattatgctttctggtataacggatactagaattgataaatattcaaacaatgaaaaagtaacacttaagtccgattattcacaaaacgagtgtgctatttattataattcatcgctgatgctggaaaataccgttgatttacgggtctcctggaaagatggttctaatcttaaactattattacctaagccggttagcggtggccgatttgtaactaatgatggttctgttcattttgatggtgtggcatctatagcacatttgcatggaatagatgctgagttattaaccatatcatgtgctggaagaggatatcttaatatcgagttattggatgaaaatccagtagctgaaaaattccgctatttacatgccgaccttcctcttttatcaggacgcaatgacaaattacaacaaatttcactttatgagaactataatttgctaaatgctatgctggcatgtgcatggaacagcaatagtacattatgtgttgatttttactctgacagatttggaaaggataaagcaacactcaatattaaacgctacgatggtagttttattgaacacgatcaagggttactggttgatataaaaaattctgttgtttttcctgcaaatagaatagacgaactggttgttgatgctatttctcttaagaatcctggcttacacatatcattgttaaaaaaagatgagtttgcttatgatctttcagctctgaatgttcaggatagtccatggttaattgtgggaaaacttgatggtacagctcgcattgcaccagtaattaaatggatgctacctgtattgcagacaaatgatttattactaaatgctctatgcgaagcagacccagaacagcgcaaaaaaaattttaatgagctaatttttgaaatagataacaacccattgcaaaattattgctgtttattaacagagtatattaagaaatacaaaatgaataatggcttatccttgctggatctggacttgttcagaggtatttcgagtaattaccgcgtggttgttcaattgttaatatcatcatgtctttctggtgatagcgatacgatttatgatatacaggaagaattacccttttcatggggatggattcccgtttcaatctggaaagatgttttccaaaaatgttggacttatctggagaaacagattaacgataaaacattagcattacatatattgcaaccctttattgcttttatgaaccatcgtgcacatatcgatcgtcggctggctccgattgcgaatatgttacttacatatagtgagagcctaccaaccggttgtgatgtattgccaactgttagtcgtgagcagtttaatgaagctaaacagatgctattaaggaaccccgacagctttgggcgtatcagtatcttccctaaagaactttggtctagtgctattactccagagttaaaatctgtttttaataagctttggattgaagataaatatcactcacggcttgaaaaacgttttaatttgatgttagtcgcagcgctgttaacccaaaaagataataacctgatacatcaactgtctgcgctttttgaatttcactatcagcaagccccacagcaattaggggtaatctatcaatattattttgaacaagcaggagtatgtcattga

SEQ ID NO: 29364 - DNA, 6315 bp, Escherichia coli O157:H7 str. K1796; identical to SEQ ID NO: 28464

SEQ ID NO: 29365 - DNA, 2937 bp, Escherichia coli O157:H7 str. K1796; identical to SEQ ID NO: 28445

SEQ ID NO: 29366 - DNA, 6315 bp, Escherichia coli O157:H7 str. K1845; identical to SEQ ID NO: 28464

SEQ ID NO: 29367 - DNA, 2937 bp, Escherichia coli O157:H7 str. K1845; identical to SEQ ID NO: 28445

SEQ ID NO: 29368 - DNA, 6315 bp, Escherichia coli O157:H7 str. K1921; identical to SEQ ID NO: 28540

SEQ ID NO: 29369 - DNA, 2937 bp, Escherichia coli O157:H7 str. K1921; identical to SEQ ID NO: 28957

SEQ ID NO: 29370 - DNA, 6315 bp, Escherichia coli O157:H7 str. K1927; identical to SEQ ID NO: 28540

SEQ ID NO: 29371 - DNA, 2937 bp, Escherichia coli O157:H7 str. K1927; identical to SEQ ID NO: 28957

SEQ ID NO: 29372 - DNA, 6315 bp, Escherichia coli O157:H7 str. K2188; identical to SEQ ID NO: 28464

SEQ ID NO: 29373 - DNA, 2937 bp, Escherichia coli O157:H7 str. K2188; identical to SEQ ID NO: 28445

SEQ ID NO: 29374 - DNA, 6315 bp, Escherichia coli O157:H7 str. K2324; identical to SEQ ID NO: 28464

SEQ ID NO: 29375 - DNA, 2937 bp, Escherichia coli O157:H7 str. K2324; identical to SEQ ID NO: 28445

SEQ ID NO: 29376 - DNA, 6315 bp, Escherichia coli O157:H7 str. K2581; identical to SEQ ID NO: 28464

SEQ ID NO: 29377 - DNA, 1791 bp, Escherichia coli O157:H7 str. K2581
atgccaaaaggacagatagaagtccggcgaatagttaatgatgaggttttatttagcggtaaagttgtagttttaccagcagacttcgatattaatattatacctgagagtgctcagcaaggcattattatgctttctggtataacggatactagaattgataaatattcaaacaatgaaaaagtaacacttaagtccgattattcacaaaacgagtgtgctatttattataattcatcgctgatgctggaaaataccgttgatttacgggtctcctggaaagatggttctaatcttaaactattattacctaagccggttagcggtggccgatttgtaactaatgatggttctgttcattttgatggtgtggcatctatagcacatttgcatggaatagatgctgagttattaaccatatcatgtgctggaagaggatatcttaatatcgagttattggatgaaaatccagtagctgaaaaattccgctatttacatgccgaccttcctcttttatcaggacgcaatgacaaattacaacaaatttcactttatgagaactataatttgctaaatgctatgctggcatgtgcatggaacagcaatagtacattatgtgttgatttttactctgacagatttggaaaggataaagcaacactcaatattaaacgctacgatggtagttttattgaacacgatcaagggttactggttgatataaaaaattctgttgtttttcctgcaaatagaatagacgaactggttgttgatgctatttctcttaagaatcctggcttacacatatcattgttaaaaaaagatgagtttgcttatgatctttcagctctgaatgttcaggatagtccatggttaattgtgggaaaacttgatggtacagctcgcattgcaccagtaattaaatggatgctacctgtattgcagacaaatgatttattactaaatgctctatgcgaagcagacccagaacagcgcaaaaaaaattttaatgagctaatttttgaaatagataacaacccattgcaaaattattgctgtttattaacagagtatattaagaaatacaaaatgaataatggcttatccttgctggatctggacttgttcagaggtatttcgagtaattaccgcgtggttgttcaattgttaatatcatcatgtctttctggtgatagcgatacgatttatgatatacaggaagaattacccttttcatggggatggattcccgtttcaatctggaaagatgttttccaaaaatgttggacttatctggagaaacagattaacgataaaacattagcattacatatattgcaaccctttattgcttttatgaaccatcgtgcacatatcgatcgtcggctggctccgattgcgaatatgttacttacatatagtgagagcctaccaaccggttgtgatgtattgccaactgttagtcgtgagcagtttaatgaagctaaacagatgctattaaggaaccccgacagctttgggcgtatcagtatcttccctaaagaactttggtctagtgctattactccagagttaaaatctgtttttaataagctttggattgaagataaatatcactcacggcttgaaaaacgttttaatttgatgttagtcgcagcgctgttaacccaaaaagataataacctgatacatcaactgtctgcgctttttgaatttcactatcagcaagccccacagcaattaggggtaatctatcaatattattttgaacaagcaggagtatgtcattga

SEQ ID NO: 29378 - DNA, 6315 bp, Escherichia coli O157:H7 str. K4396; identical to SEQ ID NO: 28464

SEQ ID NO: 29379 - DNA, 2937 bp, Escherichia coli O157:H7 str. K4396; identical to SEQ ID NO: 28445

SEQ ID NO: 29380 - DNA, 6315 bp, Escherichia coli O157:H7 str. K4405; identical to SEQ ID NO: 28636

SEQ ID NO: 29381 - DNA, 2937 bp, Escherichia coli O157:H7 str. K4405; identical to SEQ ID NO: 28445

SEQ ID NO: 29382 - DNA, 6315 bp, Escherichia coli O157:H7 str. K4406; identical to SEQ ID NO: 28636

SEQ ID NO: 29383 - DNA, 2937 bp, Escherichia coli O157:H7 str. K4406; identical to SEQ ID NO: 28445

SEQ ID NO: 29384 - DNA, 6315 bp, Escherichia coli O157:H7 str. K4527; identical to SEQ ID NO: 28636

SEQ ID NO: 29385 - DNA, 2937 bp, Escherichia coli O157:H7 str. K4527; identical to SEQ ID NO: 28445

SEQ ID NO: 29386 - DNA, 6315 bp, Escherichia coli O157:H7 str. K5418; identical to SEQ ID NO: 28636

SEQ ID NO: 29387 - DNA, 2937 bp, Escherichia coli O157:H7 str. K5418; identical to SEQ ID NO: 28445

SEQ ID NO: 29388 - DNA, 6315 bp, Escherichia coli O157:H7 str. K5448; identical to SEQ ID NO: 28464

SEQ ID NO: 29389 - DNA, 2937 bp, Escherichia coli O157:H7 str. K5448; identical to SEQ ID NO: 28445

SEQ ID NO: 29390 - DNA, 6315 bp, Escherichia coli O157:H7 str. K5449; identical to SEQ ID NO: 28464

SEQ ID NO: 29391 - DNA, 2937 bp, Escherichia coli O157:H7 str. K5449; identical to SEQ ID NO: 28445

SEQ ID NO: 29392 - DNA, 6315 bp, Escherichia coli O157:H7 str. K5453; identical to SEQ ID NO: 28464

SEQ ID NO: 29393 - DNA, 2937 bp, Escherichia coli O157:H7 str. K5453; identical to SEQ ID NO: 28445

SEQ ID NO: 29394 - DNA, 6315 bp, Escherichia coli O157:H7 str. K5460; identical to SEQ ID NO: 28464

SEQ ID NO: 29395 - DNA, 2937 bp, Escherichia coli O157:H7 str. K5460; identical to SEQ ID NO: 28445

SEQ ID NO: 29396 - DNA, 6315 bp, Escherichia coli O157:H7 str. K5467; identical to SEQ ID NO: 28464

SEQ ID NO: 29397 - DNA, 2937 bp, Escherichia coli O157:H7 str. K5467; identical to SEQ ID NO: 28445

SEQ ID NO: 29398 - DNA, 6315 bp, Escherichia coli O157:H7 str. K5602; identical to SEQ ID NO: 28464

SEQ ID NO: 29399 - DNA, 2937 bp, Escherichia coli O157:H7 str. K5602; identical to SEQ ID NO: 28445

SEQ ID NO: 29400 - DNA, 6315 bp, Escherichia coli O157:H7 str. K5607; identical to SEQ ID NO: 28464

SEQ ID NO: 29401 - DNA, 2937 bp, Escherichia coli O157:H7 str. K5607; identical to SEQ ID NO: 28445

SEQ ID NO: 29402 - DNA, 6315 bp, Escherichia coli O157:H7 str. K5609; identical to SEQ ID NO: 28464

SEQ ID NO: 29403 - DNA, 2937 bp, Escherichia coli O157:H7 str. K5609; identical to SEQ ID NO: 28445

SEQ ID NO: 29404 - DNA, 6315 bp, Escherichia coli O157:H7 str. K5806; identical to SEQ ID NO: 28464

SEQ ID NO: 29405 - DNA, 2937 bp, Escherichia coli O157:H7 str. K5806; identical to SEQ ID NO: 28445

SEQ ID NO: 29406 - DNA, 6315 bp, Escherichia coli O157:H7 str. K5852; identical to SEQ ID NO: 28464

SEQ ID NO: 29407 - DNA, 2937 bp, Escherichia coli O157:H7 str. K5852; identical to SEQ ID NO: 28445

SEQ ID NO: 29408 - DNA, 6315 bp, Escherichia coli O157:H7 str. K6590; identical to SEQ ID NO: 28464

SEQ ID NO: 29409 - DNA, 2937 bp, Escherichia coli O157:H7 str. K6590; identical to SEQ ID NO: 28445

SEQ ID NO: 29410 - DNA, 6315 bp, Escherichia coli O157:H7 str. K6676; identical to SEQ ID NO: 28636

SEQ ID NO: 29411 - DNA, 2937 bp, Escherichia coli O157:H7 str. K6676; identical to SEQ ID NO: 28445

SEQ ID NO: 29412 - DNA, 6315 bp, Escherichia coli O157:H7 str. K6687; identical to SEQ ID NO: 28636

SEQ ID NO: 29413 - DNA, 2937 bp, Escherichia coli O157:H7 str. K6687; identical to SEQ ID NO: 28445

SEQ ID NO: 29414 - DNA, 6315 bp, Escherichia coli O157:H7 str. K7140
atggacgttcagcaactgcattatgcgccacttctaaatcagcttcatcagcgtgcggtgaggtcggtggtaagtcagttggcattgcggagcaagtcgttgactcattatctggaatcacaatattttcagcctcccggtcaggaggggtcactgcttgcagacccggtattcgaaagtacattcggctggatgcctgcggatgaaacaatggaggatttgcgggacaagctgatctccagcccgctggttgatgcattgagcaaagcgccagtgccatttcgtcatcaacttactgcgtggcgaacgattctggaagacaaaaaatccttgttagtgagcagcggtacgggatccgggaaaacagaatgctttatggtaccggttctggaagatcttattcgtcagcaaaaatcgacccgccagtcactaacagggacacaagctattttcttgtatccgttaaatgcattaattaacagccaacaggagcggcttcgcgaatggacgcgcggatttaaggggaaaatacgcttcgcgctatataatggcgaaacccggcataccaaatacgaaattcaggaagatcagttgaaagtacctgaacaagctttgagtcgggaagccatttatgaagcaccaccttccatcatggtgacgaataccaccatgctggaatatatgctgattcgtcgtaaagatgccccaatcatcgaaaagtctcaggggatgttaaagtatatcgtcctggatgaagcccatagttatattggttctcaggctgctgagttagcgctgcttttacgtcgtgttatgcaggctttcaatgttggacccggcacagataaacctgtgcagattatcgcgacctctgccactattggtgaagactctcctgaaggtaataaggagcttgctaaatttgtcgctgatctcgcgggcgttacagaacgtgatgtcaaagtggttcgcggttatcgacaaataccgcgggtatcggagtcgctgattcgtcatgaataccccacatctttaacttctcttaaatccctgagccctcaggatctttaccaacagctttgtcattaccgtgtggcccagcaattgcgtcaggcgttaactcatcccggacggcaggcagtacgtttgagtgagttgctcaatgttgccagaagaacctggccagatattaatcaccgtgagctactgcaactcctcgatctaatggcaagatcgcgagaaggtgaactggcttttacgccattacgtatgcatgggtttatcagaacactggcgggtctatgggcatgttcaaacaaacaatgctcacataaagcacatgaattaaatcagagtgactggccatttggtcaggtatggtttgagcagcgccaatattgtgactgtggagcgccggtatttgaagttttacgttgctccgggtgtggttcagcttatttgtctgccaaagaggagatgcgcggtgatggaacgaactggttggtagcgcaaccagccgctgccgaagtggatgagtttgctcttgatgtagatgtttattctgaagatgaagacaacgacgaattagacaataactctcaatttgatcgtctgattgcgagcgatggtgaaaaatatatcatttcactggaagaaacgacggcggggaaaattgatagtgaagcgcaaaagcactatgaaataaacctgttaagaccggaatctcgaggtgagggacgcaataactcctttgcttgtgtttgctgtggtgacactcaacggaaaaataatcctttattccgtccgcttcggctcggcgcgcccttttttttaaatgaaattattcctactctgctggagttttctccattaccgcaaacaagagaagagcagttaggaccgtttaatggtcgacgcttgctcacctttacggattcgcgtcagggtaccgctcgcatttcagcccgcttacagcaggatgccgataaagcgacgttgcgagctctttgttaccaggagctggcaaatattacagagccttcagcaaaactcagcccggcacactgtgcactgttagagaaagttattagccagttttctgtcctccctttaaaaaattccatcgacgcgctgaaaaaagcgatggctgcgaatgaggagcttagcccgacggacattcaggcacttaaaattattgagccgatggtgagttccttaagcacggagcatgctgaagcgatgcaaatacttcaggctaactctggcaatcagcagaagaaaaccatgtcatggcaaacgctgtctgaacagctggttggcagtgtggaccttgccgatagaatgagaggcagttttaaagaattgtctgggcttgatcttactaaacaacagtttgcagatttttgtttatacagcgagtttggtcgccgccctaaaaatgcctggaccctcgaaagtctgggtctggtagccattcactatccattcattgataaagttacaacctgcccgcaggactggaagacattattacccgatcccgataagcaattagcggaatggcgtaatttattgaagattactcttgatttctttatccgtgaaaacagtgccgttttttacgaaaacgagcaataccctcgctggatgggggcacgtttcccggtaaaaatgctccaggggccagataaaaaaaacaaagggcagaaacgtgatcaactttggccacaaatacgcgatcgccattataaccgggtcattaagctattaatcgcagtctttccggcaatacaacctgagcaggctcactggaaatcgttagttaaccacttaatgattgaggtctgggatgcaattcgaccctgcttacgtcagtttgagtcgggttatcagctggatattaaacaacaagctgaattttacagtccaaagcaagtgtggcgttgcccctatactcgacgtgcgttagacgtcacgttgctgggatactctccgtatttgccgggtagcaaagaaattgcacctgaaaaagcagtgttgattgaaatgcctgagcttcctgtacgtcactggcgtttgtctggtggtggagaaatcgcccgagaagaacgtctggagtggctggaaagtaatgcgctgattcaacatgcccgcgaggaaggattatggtctactcgcagcgaccgactggccctgaaagatagctggtatcgtctggaggaacactctgcgcagagaacgcctgagcagaaccagtttaatgaaaaacaatttaagtcaggcaaagttaatgtgctgaactgttccacgaccatggagatgggggtggatattggtggtatgagtttggtggcaatgaacaacgttcctccagcgccggcaaattatttgcaacgtgcaggtcgcgcggggcgtcgtggagagagtgcatctgctgccattacgttatgtaaaaacacggcgcatggaatggaggtattcaaagaccccctctgggcgttcaacactactgccagtgcgccacgggttcgttttgggagcagtagtattgttcaacgacatgttaatgccctggttttaggtctgtttttacgagctgaagttcctgatgcgacaaaactgagttgcaaatggttctttgaaggtgatgagagccagtgtcttcgttttctccattggttaaatcaccaggccgatcagctggcggataaacttaaacgccttactcagggaaccgtactgatgtcattgacggcaacccagctcttgacccgcacacaagcaatgatgcagcaggttgatatccgctggagaagccaacttgcgatactgttggaaaatatcgaagcgttgaaggcggataacagcgcgtgggaagaaacaccagcaggtaaagccatcgcttatcagcttcgtgattatcgcggtgcatatctgttttctaaactcattagtgaagcgttcctgccggggcatggtttcccggttggcgtagtcaatttcaattatctgacggcagatgagctggaaaaacgtcgcgcaataaaagccactcaggctgaccctaatgaagggggagaaagcttttctcgtcgtattgaaaaattgcccagccgtgatttgcctacagcattacgcgagtatgcgcctggtgcagatgtggtattgggcggaaaagtatatcgttcctcgggcattatgcttggcaaggtgcttgccagcgggcaggagctgtcaggcgatcatcatattccgtggttctggcattgccgtaaatgtggtgcgggggcaaccagtactacccatcctgtcgaatgtagtcactgcaaagcggatatacagcaacttgatgtgaagcgttatttacagcctgttggttttgcgacagatattcgttatcaggcacataatgatgtatccatgcctgcacaacttccctggaaagatccacgtgttcttgtaccgtcttcggtgtgggtttctttacccgatgctgggctaggacgttaccgttttagccatagtggggaattgttccacttcagtgaaggggaatttgggcacggctacgcaatttgcctctcatgtggtcgggcagaatctcaaactcaaccccagcgtacccctgaaaatctaaagaacccagagagggaaaatacgcattacctgttgcgagggggcagtaacgatcgtcaggggagcaataaattgtgccacggtcatgtgcataaagatctgtggttgggatatagcagtcgtacagatatggttgagctgcaactcaatgatgataatggcctgttgatccgtgatgaggttgccgcgcgttcccttgcggtcgctttgcgtgaagggttagcgcataaattgggtatcgaaaatactgagctgggcgtgacgacgcagcaagcgcgcgatatcaatggctataccggatattccatcttcatttacgacaataatgcgggtggtgcaggttatgcagtgcaattgatcgaccattgggctgatgtctttaattacgccagaaaattgctcgattgcagttgcgataaattctgtcaccactgcttgctcagctacgacagtcagcattatgtcaacagattagatcgtcaccatgcattaaccctgcttaccaatgtacggttgcagcgacttaacctcgcgccagaatatcagtacttcggcgatggtagccgggttgaaactaaccctctgagtttacgtattgcgcaatgcctgaacagcgagatttatgactcctgctcgctggttcttgcggggccgcaggaacagtgggactttgcccaatggccattatttaaagagttgctccagtttgcctcctccggtgggaatgttgagttgctggtggccacgccgctggcaaacttaactgatagctccagacatcagctttccgcgttggcggcgatgccgggaggtcgcttacaagtgaaatccattgccactgcgcagctcatgcaaggaaaggggcgctggcttgcgcaggtgactcgcgaagggcaaagccaacagtgggccgcagacgacagcgctaccgttgcacctggtgaattatggggacaaagtgcgtcttcaccagtagtgacacttaaaggaacgtccggaaaaaccttctcgggtcagaccttaagtgcagaagatttactgcccgccttacccaccggggcggtgcgcatcaatctctgtgaacaactggacgggccgctggaaggttttggttcgcgtttctggtcgttagtcacgcaacagcacgctggctggaagcaggcatttacccgccacaaagagataacgcatgttgagtacagcgatcgttatcttaatagcccattcacggcgcgtttgttaggtgaaatcttaaccgagctggttgaacagggaatggcggaacgcgccagcctcactgtttgcgtcaaaaaattggattacaactctcgccaatacgacgctctctataacgcgtggcttaatgaggaagatcgtcagcaggttgtgaccactttacttgaagaaggatatctggggcctgcgtggccgggagcaattagctggttaacgggggataaccagagtacggagcatggacgagaactgacagtcaccttcagcgatggcagtcagcattatgtcctgctcgacatggggcttagctactggcgctgtattgaagataccttctttgattttgccctgcgagtaccgcagcaagttgaacggctggcaaacacgcgagcgcgagctgttgccccgggtaatgaccttaggagttatattatcgctggataa

SEQ ID NO: 29415 - DNA, 2937 bp, Escherichia coli O157:H7 str. K7140; identical to SEQ ID NO: 28445

SEQ ID NO: 29416 - DNA, 6315 bp, Escherichia coli O157:H7 str. Sakai; identical to SEQ ID NO: 28464

SEQ ID NO: 29417 - DNA, 3354 bp, Escherichia coli O157:H7 str. Sakai; identical to SEQ ID NO: 28793

SEQ ID NO: 29418 - DNA, 6315 bp, Escherichia coli O157:H7 str. SS17; identical to SEQ ID NO: 28636

SEQ ID NO: 29419 - DNA, 3354 bp, Escherichia coli O157:H7 str. SS17; identical to SEQ ID NO: 28793

SEQ ID NO: 29420 - DNA, 6315 bp, Escherichia coli O157:H7 str. SS52; identical to SEQ ID NO: 28636

SEQ ID NO: 29421 - DNA, 3354 bp, Escherichia coli O157:H7 str. SS52; identical to SEQ ID NO: 28793

SEQ ID NO: 29422 - DNA, 6315 bp, Escherichia coli O157:H7 str. TW14359; identical to SEQ ID NO: 28636

SEQ ID NO: 29423 - DNA, 3354 bp, Escherichia coli O157:H7 str. TW14359; identical to SEQ ID NO: 28793

SEQ ID NO: 29424 - DNA, 6315 bp, Escherichia coli O157:H7 str. TW14588; identical to SEQ ID NO: 28464

SEQ ID NO: 29425 - DNA, 2937 bp, Escherichia coli O157:H7 str. TW14588; identical to SEQ ID NO: 28445

SEQ ID NO: 29426 - DNA, 6315 bp, Escherichia coli O55:H7 str. 06-3555; identical to SEQ ID NO: 28928

SEQ ID NO: 29427 - DNA, 2937 bp, Escherichia coli O55:H7 str. 06-3555; identical to SEQ ID NO: 28445

SEQ ID NO: 29428 - DNA, 6315 bp, Escherichia coli O55:H7 str. 3256-97; identical to SEQ ID NO: 28464

SEQ ID NO: 29429 - DNA, 845 bp, Escherichia coli O55:H7 str. 3256-97
caaatgatttattactaaatgctctatgcgaagcagacccagaacagcgcaaaaaaaattttaatgagctaatttttgaaatagataacaacccattgcaaaattattgctgtttattaacagagtatattaagaaatacaaaatgaataatggcttatccttgctggatctggacttgttcagaggtatttcgagtaattaccgcgtggttgttcaattgttaatatcatcatgtctttctggtgatagcgatacgatttatgatatacaggaagaattacccttttcatggggatggattcccgtttcaatctggaaagatgttttccaaaaatgttggacttatctggagaaacagattaacgataaaacattagcattacatatattgcaaccctttattgcttttatgaaccatcgtgcacatatcgatcgtcggctggctccgattgcgaatatgttacttacatatagtgagagcctaccaaccggttgtgatgtattgccaactgttagtcgtgagcagtttaatgaagctaaacagatgctattaaggaaccccgacagctttgggcgtatcagtatcttccctaaagaactttggtctagtgctattactccagagttaaaatctgtttttaataagctttggattgaagataaatatcactcacggcttgaaaaacgttttaatttgatgttagtcgcagcgctgttaacccaaaaagataataacctgatacatcaactgtctgcgctttttgaatttcactatcagcaagccccacagcaattaggggtaatctatcaatattattttgaacaagcaggagtatgtcattga

SEQ ID NO: 29430 - DNA, 6315 bp, Escherichia coli O55:H7 str. CB9615; identical to SEQ ID NO: 28928

SEQ ID NO: 29431 - DNA, 3360 bp, Escherichia coli O55:H7 str. CB9615; identical to SEQ ID NO: 28813

SEQ ID NO: 29432 - DNA, 6345 bp, Escherichia coli P02997067.6; identical to SEQ ID NO: 28446

SEQ ID NO: 29433 - DNA, 3291 bp, Escherichia coli P02997067.6
ttgggtcaatcagaatacatttcatgggtaaaatgtacttcctggctaagtaactttgtgaatcttagagggttgagacaaccggatggacgtcctctttatgaatatcatgcaaccaatgctgaatataaccaattaacgcagctactctgtgctgttggtcaatcacaatctaatatatgtaatagagactttgctgcctgttttgttcttttttgctctgagtggtaccgcagggattatgaacggcaatgcggatggacgtgggaccctatatataaaaaaatagggatttcattcaccgccacagagcttggtactatcgtaccgaaagggatggaagattactggctgcgcccaattcgattttatgaatctgaacgacgtaattttctcggaacattattcagtgaaggtggtttacctttccggctactcaaagaatcagacagtcgctttctggctgttttctccaggatccttggacaatatgagcaagcaaagcagtcaggtttttctgccctttcgctggcaagagctgtcatagaaaaatcagcgctgccaactgtttttagcgaagatacctctgtagaacttatcagtcatatggctgataacctcaattccttagtacttactcacaacctaacaaatcacaaagaaccagtacaacagcttgataaggttcaccctacctggcgaagcgagtttccaataccgttagatgatgaaacaggaacgcattttttgaatggactgctatgcgcagcctctgtagaggctaagcctcgactacaaaaaaataagagtacgcgttgccaattctattggtcagaaaagcatccagatgagcttagggtgatagtatctcttcctgacgaagtttcctttcctgtaactagcgagccgtcaactacgcgctttgaacttgccatttatgaagatggtgaggaagtctctggccttgggccagcctatgcttccctggaaaacagacaggcaacagttcgattacgtaaaagcgaagtgagatttgtcaggcaaaatccatctgcaggtttgtcgttagtggctcctgctggggggaggattgttgggggcattaaacttgatgacagtgaaattgccattggtgaggtgccgttaaccttcatcgttgatgcagatcaatggctgttacagggacaggcctcctgcagtgtgcgaagcagcgatgttctgattgtgctccctcgggacaatagcactgttgctggttttgatggccaatcgagtgcagtaaacgtattaggacttaaagcgctacctgttaagggatgtcaggacgttacagttacagcaaatgaaacttatcggattcgcaccggaagagaacaaatcagcatcggaaggtttgctctaaatggaaagcgtgcaagctgggtttgtcatccagatgagacatttattggtgtaccaaaagtcatttctacactaccagatattcaaagcattgatgtaacgcgttacctgagcggaatttcaattgagcaatgtcatatacaagagatgctaggggctcaatatctttctatccgtaatagtaataatgaaacgctcttgcgtcgcaaaatcggtatcttgcctgctgatttcagtattgagataaaaggtggaatgcacgcaaatgaaggcactatcgtaatcaccacacagcatccttgtgtagcaacacttaaagataaaacattggaggctacacgtaagcgtactgaggggcgaacagagatacaactcaaagcggaagggggacctccggcatttattacattacaagttctgcctaatttggcggctgataccatcgacattgagttacctttcccagctaaaggctgccttgctcttgatgtaaacggacgtcctctggataaaaacattacgctgcatgatctgctgggttccagagcattcctgttctccagaaatggtgagccgacaaaatatacattgcagttgcatttgcgctccattagtggattacaggcatggcacgaatggagttatacggcattgagcgagcgtcctgttgaattgaatctctatagtctacgtgaacacattgaaaatctgatttcacttgaggcaggtattgatcaggttgttgagatgcgtattacgggggcgggtgtggtcatggcctggcaaattcgtcgctataaatacagcctgcgctatgattatgaaaaagaactattactcagccagtcagtgaaccatcgtgctggacagattccttcccccgttatcatgctgttaagtgaacccgagaggaaatccattcccttagcatcaagaatgagcgagggagtgcctgtcggtgaatatgagttgagctcaatcgttaacaaaaacggaccatggttggttgttcctaaaccgggtgaagagatggcttttcgcccctgcttcattcgtggcgaatcttcgttaccggtagaagaaagcaacatccgctcattgcagaaagcgacccagctttttaatccacaggcagaagttaataccatcacacgggttctcggacagatggctaacgatcctgcccattccggctggcaatttatgcgtagcctgtacgatcaatttggttatttaccgctggcaacctttgaagtatggcgtgcactagtgcagcatccgcaggcattggcgatgtcgctcttcaaattcgaaatgtcagcagagtatctgagtcgtattgagaatgagttccctattttatgggagtttttccccatctttgagatcaaagctgcatctgagcgtttcaaattgttcctgagccaaaaaggtgcaccggaggaaacccagaaattactggttaccaatatgtttcaacggctggggctcgtgttcccgacatatgccgatgaaattgagaaatggttaagtaatggatatctccccccgtctattcctgaatcttgtgtccacgggtggtatcaggagctcttacgtgagcacagtgaagctcgctggcctgaatacggctgcaagcgtctgtataaatggatgatgtcacaaaaaaatccagtgattggtattaatcctgacgcaaatcaccgctattccgtggcctggttacccgtcttcgccgcagcggtggcaagcggaaatgcttcttttgaatctgtatttgaccgtaaacccggtgccgtatttttcctgaggcaagtcagggatttcgattcccgctggtttaaggccatcttccagttcagcctgttgcgttatgttgctaaaaaataa

SEQ ID NO: 29434 - DNA, 6345 bp, Escherichia coli P0299917.1; identical to SEQ ID NO: 28446

SEQ ID NO: 29435 - DNA, 3291 bp, Escherichia coli P0299917.1; identical to SEQ ID NO: 28447

SEQ ID NO: 29436 - DNA, 6345 bp, Escherichia coli p0305293.1; identical to SEQ ID NO: 28682

SEQ ID NO: 29437 - DNA, 1893 bp, Escherichia coli p0305293.1
atgatactgtccggtttatcactttgggagaaaggcagtccgctgcataaatctacgcaacaggttagaacccaaggcccgatacggcatgcggactgcaggcagagaaaactggccgattttctctgcactggagggataatacaagagatgctgggggctcaatatctttctatccgtaatagtaataatgaaacgctcttgcgtcgcaaaatcggtatcttgcctgctgatttcagtattgagataaaaggtggaatgcacgcaaatgaaggcactatcgtaatcaccacacagcatccttgtgtagcaaaacttaaagataaaacattggaggctacacgtaagcgtactgaggggcgaacagagatacaacttaaagcggaaggggtacctccggcatttattacattacaagttctgcctaatttggcggctgaccccatcgacattgagttaccttttcccgctaaaggctgtctcgctcttgatgtaaacggacgtcctctggataaaaacattacgctgcatgatctgctgggttccagagcgtttctgttctccagaaatggtgagccgacaaaatatacattgcagttgtatttgcgctccgttagtggattacaggcatggcatgaatggtgttatacggcgttgagcgatcgtcctgttgaattgaatctctatagtctgcgcgaacatattgagaacctgatttcacttgaggcaggtattgatcaggttgttgagatgcgtattacgggggcaggtgtggtcatggcctggcaaattcgtcgctataaatacagcctgcgctatgattatgaaaaagaactattactcagccagtcagtgaaccatcgtgctgggcagattccttcccccgttatcatgctgttaagtgaacccgagaggaaatccattcccttagcatctagaatgagcgagggagtgcctgtcggtgaatatgagttgagctcaatcgttaacaaaaatggaccgtggttggttgtccctaaaccgggtgaagagatggcttttcgtccctgcttcattcgtggcgaatcttcgttaccggtagaagaaagcaacatccgctcattgcagaaagcgacccagctttttaatccacaggcagaagttaataccatcacacgggttctcggacagatggctaacgatcctgcccattccggctggcaatttatgcgtagcctgtacgatcaattcgggtatttaccactggcaacctttgaagtatggcgtgcactggtgcagcatccgcaggcattggcaatgtcgctcttcaaatttgaaatgtcagcagagtacctgagtcgtattgagaatgagttccctattttatgggagtttttccccatctttgagatcaaagctgcatctgagcgtttcaaattgttcctgagccaaaaaggtgcaccggaggaaacccaaaaattactggttactaatatgtttcaacggctggggctcgtgttcccgacatatgccgatgaaattgagaaatggttaagtaacggatatctccctccgtctattcctgaatcttgtgtccacgggtggtatcaggagctcttacgtgagcacagtgaggctcgctggcctgaatatggctgtaagcgtctgtatgaatggatgatgtcacaaaaaaatccagtgattggtattaatcctgatgcagattaccgctattccgtggcctggttacccgtcttcgccgcagcggtggcaagcggaaatgcttcttttgaatctgtatttgaccgtaaacccggtgccgtatttttcctgaggcaagtcagggatttcgattcccgctggtttaaggccatcttccagtgcagcctgttgcgttatgttgctaaaaaataa

SEQ ID NO: 29438 - DNA, 6345 bp, Escherichia coli p0305293.10
atgactacacgctatttttcgtcacttattgaacaatcgttgtctcgttcaactgaagcaacgctcagtatcatgggcgttacaaacccgcagttgcgtgaacatctcgcgcaacaaatgggggctgattgtgggaaaccgggctcattccttgcttctccggtattccagcaaatgtttggatggaaggagtcaaatcacacgatgcgcagcctgacggaaggcaacgcattgttgagcaaagcagtggttgattcactggataatcagagtaatggccggtaccgatttggtgctgactggaagccttttacacaccagttagccagttggaaagctttgctggaaaagaaacattcagtggtggtaaccagtggtacgggttcaggtaaaacggaatgttttatggttccggtgctggaagatctttaccgggaactgcatgaaaatggcaacaatccgttggtcggtgtccgagccctttttctctatccattgaacgccttgattaattcacagcgcgagcgtctggatgcctggacgcgtggttttggtactggaatccgctactgcttgtataacggaaatacagaagagctccacgcaaaaatgaaaacagtgcaggataatagaccaaatgaagtcttatcccgtgaaaagatgcgtctggagccagccccgattctggtgaccaacggcacgatgctggaatatatgatggttcgccaggtcgacgccccgattatccagcaatccaaagcacaaaaatcactacgctggattgtactggatgaagcgcatacctatgtcgggtcgcaggccgctgaactggcactccagctgcgtcgtgtgatgacagcgtttggcgtgacgccagatgatgtgcgctttgtagcgacctctgcgaccattgccggcagcgacgccgaaaagcagctgaaaaaatttctctctgaattatccggtatcccgcaggagcgcatcgatgttctggacggaagtcgggtgattcctgaactggaaccatccaaaaacgtttctgttccgttagacgaaatagagcaaatacctgatctggatctaaaagataaaaatgataataaaattaaagggataagtcctgagcgcttttatgcgctcacgcactcccccgaagcacgttacatacgcgagatgttggtcaaacatcccaatccaatgaagctggatgagatgacagagcggttaaacatactgacaaaacagcatcacagccagcatgaagtactgcgttggatcgacgtctgttcagggacccaacctaatgcaaaggatcccgcatttcttaaagtcagggcgcatatcttccagcgtaatacccagggaatatgggcttgtgtggataaagattgcaggttaaagcacggtacaccgctcgaaaaaggctggccctttggctatgtatatgtgaaccagcgacaaaattgcgattgtggaagccctgtttacgaagtggcgttctgtaatgattgtaatgaacctcatcttctggcgcgggacaaaaagggcaaactagtccagtgggaaaataaaggtggcgatgaattctctttgcaggatgaagtacctgttgaacatgacgctacagcggaaaaagtcgaaaaagagaacagtttccagcctccgttgattattgccgcaggagagaccagcgaggccggttataccctacaacgcctcgaccgccagacgcgccgtattggcgttattaacaatgacagcattccgctgattattaatgatgttgaacaggtttgtagtgccagtggctgtggctacagaggcatgagtgggaaacagcccttccggcgtgcactattaggtgggccattttacgttactaatatcgtgcccaccgttctagagtattgtcaggactttaccagtgatgaaggcaaagagggcgtcggaccagattcgttgccaggacgaggtcgtcgactcatcacctttacagacagtcgacaagggacagcccgaatggcggtgcgtatgcagcaagaagcagaacgcagtcgcttacgcggaagcgtagtcgaaattctcagctggcatcaaaggacgcaaacgtctacagcgccgaatgccaatgccgatctggaaaaattagcgaccagggcgaagcaagcccgtgagcaggcagaagaatatcgaagctggggaatgccagaccaggcgaaattgtcacaagcgcaggctgaacagcttgaacaggcttatcagtttgcaatcggcggaaaagcagcaaccaccctagtatcccgcacctggactgaaatggttaacgagcttaaagataaagccgatatccgtggcccggttctgaaatataactactatttgaagcctgaagtgtttaatgaaaacggcgggcctctaaagctttctgaaatgttgttgttccgggaattcatgcgtcgccctaaacggactaacagcctggaaacacaggggctggttcaggttggttacctgggactggagaaaatacataagctccctatgcactggcaggaaagggaattaacgctggatgactggcgcgattttctcaaggttacgttggatcattacgttcgcgagagcaacttcacacagctggatgatgagctgaaaaactggattggtagccgtttttcatcaaaattcgtccgtaacccggaatcaaaagatcctgaagataatcagaatagacgctggcctcaaattcgtaatggcaacgtatcccatcgtttagcgaagttactgatgctgggggctggattcaaaaccgtcaatacggcgactattgatattatcaatacatggctgaaagaagcatgggcccaacttaccggaccgcttgcagtactgaaacccgatggcaaccgtttttatttaccgaaagagcatatgactttttctttaatcacggatgcctggatttgcccggtaaccaataaaatcctggatacggcttttaaaggcttaaccccttatctgcctacccatatttcgttcgagcatcttacccaggcgcaatatgacacttttgtcgcgcagaaagtcaccatgccggaaatctggaagctggatcgttcacaggaagactacgcagagggtctggcaaaagcacgcgactgggtcagcaatgatccgctgatcgcacaattgcggtcagaaaacgtctggacagacatcaacgatcgtgtcgtggaaggcggtttctactatcgcactgccgagcactctgcccagcagtcgtcagaacgcctgcaaagctatgaaaagatgttcaagaacgggcaactaaatgttctcaactgttccaccaccatggaaatgggggttgatatcgggggcattacagcggtggtaatgaacaatgtaccgccacatcctgccaactatttacagcgcgccgggcgagccgggcgtagtaaagagtcgcgtgcgatctcttacaccctatgcaaaggtaacccacacgaccaacaggtttttgccaacccgctctggccgtttgaaaccatgatcccggcacccatggtcgcgatgaactccgcccgactggtacaacgtcacgtcaatgcattattactgtccgactttttatgtaacgttattggcgaaaccgataaagagaaaaccagcctcgatagcctctggtttttcggtgaagatgacgggcagtcaaaatgcgaacgctttaaaatctggctggaacgcccggttcttgatatcgacacggcgctggaacggctggtgaaaggtacggcgttgcatggtgcaagagctgaacatctgcgggataaaacaatcagcgcgatcaccttcctgcaacagcggtggctctccgtttatcgcgatctcgtgacccaggagcgtgagtcgcagccacaaacgccttatcgtaagcgcatagagctggagaagaaacgacactgtggagagtatctgctgcgcgatctggctgccagaactttcctgccgggatacggcttcccgacagatgtagtgacgtttgataacttcacaatggaagattatatccgcgaaaaattgcaaaaaagtcgtgataaaaaggaccgtgaagataacgtctcccgttataaaggattaccttcccgtaacctcggtgttgccattcgtgaatatgcaccgggagcagagatcattcttgatggccgtgtcttccgctctgccggtgtctcactgcactggcacaatattaatgctgataccaatgaagcccagcgtctggattgtgcctggcgctgtcacaaatgcgggaccattggctatgaagaggggatgagcagttccgggatgctcttttgctccaatagcgcctgcggcgaaaaaataatcatggataatcgccgtcaggtgttgcagcctgccgggtttgtcaccgatgcacacgctccggtaacgaacaatattgaaaccatgaaattcgtcccggttgtccccgcctgggtctttgttaaagcagagcccgtaccgttgcctaacccgctaatgggttatatggcttctggggctgatgggcatgttttccagcaaagtctgggggaaggtggacacggttatgcattgtgtctgagctgtggccgtgcggagtcgatgctgaatgaaaatgatgctccgaaaagtatggaagctcactatccaccgcgtccgggtaaagcggaccgcgacagccagaatcatcgtctgatttgcccaggttcgacggcactcatgaagaacgtccccctgggcgcactggcgcgcaccgatgtctttgaaatggttctgcgcaaaccgcaaaaaggcgagtatctgccagataacacagaagaggggcggattgtcgctatgactctggcggttgctctgcgtcaggcgctagcgggcgttctgggtatctccggcgcagaactcggctattctgtacgcccggtcagactggaggatgggcaatcggtattagccgttcagctttatgatgtgatcagcggtggtgcaggttttgcctccagcgcaccggtacacattgaagctattttgcagggaatggtgaaacagttaggttgccgccattgtgatactgcatgtagtgaatgcctgcttgattcccagactcgccacgatcacgatttgctggatcgcaaagcggcgctggcctggcttggcgatgacttcacgtattacatcggtttaccggatgaagagacattctcgctgccggatgcccgctactgccctggcgctattggcgatacgattcgccgggcgattaacgaaggcgctgaaaagctcaccctgtggatgaccggcgcgcccaatgagtgggatttatacgcccgtcagttccgcgcggcggttcagagctatcggctaaaagacaacgtcgaggtcgatcttgttatacctgcgggagtggatgacccggatctgttgtatgaactatcgcaatttactgcgctgggtgtgcggctgtgccatgttgaacaggatctgcaattgccgatcgttgcccaggttacctttgccgatcgcgtgatgacgctggcttctcgcagccagcaggcaacgattccggggccggaggggcacctgaatgacgaactggtggtgcgtagtctcggttataaaacggtagaactgaacgagtttattctgccggctaaagccgccaacgctgtcgagcgggtcaaagacattcagatccacaaacagttgaatggaccactttcgcagtttggacaacgcttctgggacgtgctgtttaacgaccatgaagaagcacagtcactgatgaataacacgcgaattaccggcgttcactataccgatcgctatctgcaaaacccggttgcgctggcgttgttgggatcaattctgagaccgctaaaaacaaagctgaccgatgtcgctgaagtggcgctggatacgctgtttaaagataaagatcgccccggtaaccggcctttccatgactggatgagcatagcggattttcaggatttcgctgatcagtggtttgctgctgcgctgggcaggccgatagaactaacggtgttcgactcgccgcgcgatatccctcaccatcgtaaactgacggtgacttttgaggatggtcaggttttgaagatccgcttcgatcaggggatgggctactggcgtatcaactttgcatcgcaatggcattactttgacttccgcgatgacgtttctttccagttagtcaaaatggctcaggcctgcaatgaaggaaatgtggccaacagcgaagagagctgggcaacggatgtgctggtggaggtgagcgcctcctga

SEQ ID NO: 29439 - DNA, 1743 bp, Escherichia coli p0305293.10; identical to SEQ ID NO: 28683

SEQ ID NO: 29440 - DNA, 6345 bp, Escherichia coli p0305293.11; identical to SEQ ID NO: 28682

SEQ ID NO: 29441 - DNA, 1743 bp, Escherichia coli p0305293.11; identical to SEQ ID NO: 28683

SEQ ID NO: 29442 - DNA, 6273 bp, Escherichia coli p0305293.12
atgggcgttacaaacccgcagttgcgtgaacatctcgcgcaacaaatgggggctgattgtgggaaaccgggctcattccttgcttctccggtattccagcaaatgtttggatggaaggagtcaaatcacacgatgcgcagcctgacggaaggcaacgcattgttgagcaaagcagtggttgattcactggataatcagagtaatggccggtaccgatttggtgctgactggaagccttttacacaccagttagccagttggaaagctttgctggaaaagaaacattcagtggtggtaaccagtggtacgggttcaggtaaaacggaatgttttatggttccggtgctggaagatctttaccgggaactgcatgaaaatggcaacaatccgttggtcggtgtccgagccctttttctctatccattgaacgccttgattaattcacagcgcgagcgtctggatgcctggacgcgtggttttggtactggaatccgctactgcttgtataacggaaatacagaagagctccacgcaaaaatgaaaacagtgcaggataatagaccaaatgaagtcttatcccgtgaaaagatgcgtctggagccagccccgattctggtgaccaacggcacgatgctggaatatatgatggttcgccaggtcgacgccccgattatccagcaatccaaagcacaaaaatcactacgctggattgtactggatgaagcgcatacctatgtcgggtcgcaggccgctgaactggcactccagctgcgtcgtgtgatgacagcgtttggcgtgacgccagatgatgtgcgctttgtagcgacctctgcgaccattgccggcagcgacgccgaaaagcagctgaaaaaatttctctctgaattatccggtatcccgcaggagcgcatcgatgttctggacggaagtcgggtgattcctgaactggaaccatccaaaaacgtttctgttccgttagacgaaatagagcaaatacctgatctggatctaaaagataaaaatgataataaaattaaagggataagtcctgagcgcttttatgcgctcacgcactcccccgaagcacgttacatacgcgagatgttggtcaaacatcccaatccaatgaagctggatgagatgacagagcggttaaacatactgacaaaacagcatcacagccagcatgaagtactgcgttggatcgacgtctgttcagggacccaacctaatgcaaaggatcccgcatttcttaaagtcagggcgcatatcttccagcgtaatacccagggaatatgggcttgtgtggataaagattgcaggttaaagcacggtacaccgctcgaaaaaggctggccctttggctatgtatatgtgaaccagcgacaaaattgcgattgtggaagccctgtttacgaagtggcgttctgtaatgattgtaatgaacctcatcttctggcgcgggacaaaaagggcaaactagtccagtgggaaaataaaggtggcgatgaattctctttgcaggatgaagtacctgttgaacatgacgctacagcggaaaaagtcgaaaaagagaacagtttccagcctccgttgattattgccgcaggagagaccagcgaggccggttataccctacaacgcctcgaccgccagacgcgccgtattggcgttattaacaatgacagcattccgctgattattaatgatgttgaacaggtttgtagtgccagtggctgtggctacagaggcatgagtgggaaacagcccttccggcgtgcactattaggtgggccattttacgttactaatatcgtgcccaccgttctagagtattgtcaggactttaccagtgatgaaggcaaagagggcgtcggaccagattcgttgccaggacgaggtcgtcgactcatcacctttacagacagtcgacaagggacagcccgaatggcggtgcgtatgcagcaagaagcagaacgcagtcgcttacgcggaagcgtagtcgaaattctcagctggcatcaaaggacgcaaacgtctacagcgccgaatgccaatgccgatctggaaaaattagcgaccagggcgaagcaagcccgtgagcaggcagaagaatatcgaagctggggaatgccagaccaggcgaaattgtcacaagcgcaggctgaacagcttgaacaggcttatcagtttgcaatcggcggaaaagcagcaaccaccctagtatcccgcacctggactgaaatggttaacgagcttaaagataaagccgatatccgtggcccggttctgaaatataactactatttgaagcctgaagtgtttaatgaaaacggcgggcctctaaagctttctgaaatgttgttgttccgggaattcatgcgtcgccctaaacggactaacagcctggaaacacaggggctggttcaggttggttacctgggactggagaaaatacataagctccctatgcactggcagggaagggaattaacgctggatgactggcgcgattttctcaaggttacgttggatcattacgttcgcgagagcaacttcacacagctggatgatgagctgaaaaactggattggtagccgtttttcatcaaaattcgtccgtaacccggaatcaaaagatcctgaagataatcagaatagacgctggcctcaaattcgtaatggcaacgtatcccatcgtttagcgaagttactgatgctgggggctggattcaaaaccgtcaatacggcgactattgatattatcaatacatggctgaaagaagcatgggcccaacttaccggaccgcttgcagtactgaaacccgatggcaaccgtttttatttaccgaaagagcatatgactttttctttaatcacggatgcctggatttgcccggtaaccaataaaatcctggatacggcttttaaaggcttaaccccttatctgcctacccatatttcgttcgagcatcttccccaggcgcaatatgacacttttgtcgcgcagaaagtcaccatgccggaaatctggaagctggatcgttcacaggaagactacgcagagggtctggcaaaagcacgcgactgggtcagcaatgatccgctgatcgcacaattgcggtcagaaaacgtctggacagacatcaacgatcgtgtcgtggaaggcggtttctactatcgcactgccgagcactctgcccagcagtcgtcagaacgcctgcaaagctatgaaaagatgttcaagaacgggcaactaaatgttctcaactgttccaccaccatggaaatgggggttgatatcgggggcattacagcggtggtaatgaacaatgtaccgccacatcctgccaactatttacagcgcgccgggcgagccgggcgtagtaaagagtcgcgtgcgatctcttacaccctatgcaaaggtaacccacacgaccaacaggtttttgccaacccgctctggccgtttgaaaccatgatcccggcacccatggtcgcgatgaactccgcccgactggtacaacgtcacgtcaatgcattattactgtccgactttttatgtaacgttattggcgaaaccgataaagagaaaaccagcctcgatagcctctggtttttcggtgaagatgacgggcagtcaaaatgcgaacgctttaaaatctggctggaacgcccggttcttgatatcgacacggcgctggaacggctggtgaaaggtacggcgttgcatggtgcaagagctgaacatctgcgggataaaacaatcagcgcgatcaccttcctgcaacagcggtggctctccgtttatcgcgatctcgtgacccaggagcgtgagtcgcagccacaaacgccttatcgtaagcgcatagagctggagaagaaacgacactgtggagagtatctgctgcgcgatctggctgccagaactttcctgccgggatacggcttcccgacagatgtagtgacgtttgataacttcacaatggaagattatatccgcgaaaaattgcaaaaaagtcgtgataaaaaggaccgtgaagataacgtctcccgttataaaggattaccttcccgtaacctcggtgttgccattcgtgaatatgcaccgggagcagagatcattcttgatggccgtgtcttccgctctgccggtgtctcactgcactggcacaatattaatgctgataccaatgaagcccagcgtctggattgtgcctggcgctgtcacaaatgcgggaccattggctatgaagaggggatgagcagttccgggatgctcttttgctccaatagcgcctgcggcgaaaaaataatcatggataatcgccgtcaggtgttgcagcctgccgggtttgtcaccgatgcacacgctccggtaacgaacaatattgaaaccatgaaattcgtcccggttgtccccgcctgggtctttgttaaagcagagcccgtaccgttgcctaacccgctaatgggttatatggcttctggggctgatgggcatgttttccagcaaagtctgggggaaggtggacacggttatgcattgtgtctgagctgtggccgtgcggagtcgatgctgaatgaaaatgatgctccgaaaagtatggaagctcactatccaccgcgtccgggtaaagcggaccgcgacagccagaatcatcgtctgatttgcccaggttcgacggcactcatgaagaacgtccccctgggcgcactggcgcgcaccgatgtctttgaaatggttctgcgcaaaccgcaaaaaggcgagtatctgccagataacacagaagaggggcggattgtcgctatgactctggcggttgctctgcgtcaggcgctagcgggcgttctgggtatctccggcgcagaactcggctattctgtacgcccggtcagactggaggatgggcaatcggtattagccgttcagctttatgatgtgatcagcggtggtgcaggttttgcctccagcgcaccggtacacattgaagctattttgcagggaatggtgaaacagttaggttgccgccattgtgatactgcatgtagtgaatgcctgcttgattcccagactcgccacgatcacgatttgctggatcgcaaagcggcgctggcctggcttggcgatgacttcacgtattacatcggtttaccggatgaagagacattctcgctgccggatgcccgctactgccctggcgctattggcgatacgattcgccgggcgattaacgaaggcgctgaaaagctcaccctgtggatgaccggcgcgcccaatgagtgggatttatacgcccgtcagttccgcgcggcggttcagagctatcggctaaaagacaacgtcgaggtcgatcttgttatacctgcgggagtggatgacccggatctgttgtatgaactatcgcaatttactgcgctgggtgtgcggctgtgccatgttgaacaggatctgcaattgccgatcgttgcccaggttacctttgccgatcgcgtgatgacgctggcttctcgcagccagcaggcaacgattccggggccggagtggcacctgaatgacgaactggtggtgcgtagtctcggttataaaacggtagaactgaacgagtttattctgccggctaaagccgccaacgctgtcgagcgggtcaaagacattcagatccacaaacagttgaatggaccactttcgcagtttggacaacgcttctgggacgtgctgtttaacgaccatgaagaagcacagtcactgatgaataacacgcgaattaccggcgttcactataccgatcgctatctgcaaaacccggttgcgctggcgttgttgggatcaattctgagaccgctaaaaacaaagctgaccgatgtcgctgaagtggcgctggatacgctgtttaaagataaagatcgccccggtaaccggcctttccatgactggatgagcatagcggattttcaggatttcgctgatcagtggtttgctgctgcgctgggcaggccgatagaactaacggtgttcgactcgccgcgcgatatccctcaccatcgtaaactgacggtgacttttgaggatggtcaggttttgaagatccgcttcgatcaggggatgggctactggcgtatcaactttgcatcgcaatggcattactttgacttccgcgatgacgtttctttccagttagtcaaaatggctcaggcctgcaatgaaggaaatgtggccaacagcgaagagagctgggcaacggatgtgctggtggaggtgagcgcctcctga

SEQ ID NO: 29443 - DNA, 1743 bp, Escherichia coli p0305293.12; identical to SEQ ID NO: 28683

SEQ ID NO: 29444 - DNA, 6273 bp, Escherichia coli p0305293.13
atgggcgttacaaacccgcagttgcgtgaacatctcgcgcaacaaatgggggctgattgtgggaaaccgggctcattccttgcttctccggtattccagcaaatgtttggatggaaggagtcaaatcacacgatgcgcagcctgacggaaggcaacgcattgttgagcaaagcagtggttgattcactggataatcagagtaatggccggtaccgatttggtgctgactggaagccttttacacaccagttagccagttggaaagctttgctggaaaagaaacattcagtggtggtaaccagtggtacgggttcaggtaaaacggaatgttttatggttccggtgctggaagatctttaccgggaactgcatgaaaatggcaacaatccgttggtcggtgtccgagccctttttctctatccattgaacgccttgattaattcacagcgcgagcgtctggatgcctggacgcgtggttttggtactggaatccgctactgcttgtataacggaaatacagaagagctccacgcaaaaatgaaaacagtgcaggataatagaccaaatgaagtcttatcccgtgaaaagatgcgtctggagccagccccgattctggtgaccaacggcacgatgctggaatatatgatggttcgccaggtcgacgccccgattatccagcaatccaaagcacaaaaatcactacgctggattgtactggatgaagcgcatacctatgtcgggtcgcaggccgctgaactggcactccagctgcgtcgtgtgatgacagcgtttggcgtgacgccagatgatgtgcgctttgtagcgacctctgcgaccattgccggcagcgacgccgaaaagcagctgaaaaaatttctctctgaattatccggtatcccgcaggagcgcatcgatgttctggacggaagtcgggtgattcctgaactggaaccatccaaaaacgtttctgttccgttagacgaaatagagcaaatacctgatctggatctaaaagataaaaatgataataaaattaaagggataagtcctgagcgcttttatgcgctcacgcactcccccgaagcacgttacatacgcgagatgttggtcaaacatcccaatccaatgaagctggatgagatgacagagcggttaaacatactgacaaaacagcatcacagccagcatgaagtactgcgttggatcgacgtctgttcagggacccaacctaatgcaaaggatcccgcatttcttaaagtcagggcgcatatcttccagcgtaatacccagggaatatgggcttgtgtggataaagattgcaggttaaagcacggtacaccgctcgaaaaaggctggccctttggctatgtatatgtgaaccagcgacaaaattgcgattgtggaagccctgtttacgaagtggcgttctgtaatgattgtaatgaacctcatcttctggcgcgggacaaaaagggcaaactagtccagtgggaaaataaaggtggcgatgaattctctttgcaggatgaagtacctgttgaacatgacgctacagcggaaaaagtcgaaaaagagaacagtttccagcctccgttgattattgccgcaggagagaccagcgaggccggttataccctacaacgcctcgaccgccagacgcgccgtattggcgttattaacaatgacagcattccgctgattattaatgatgttgaacaggtttgtagtgccagtggctgtggctacagaggcatgagtgggaaacagcccttccggcgtgcactattaggggggccattttacgttactaatatcgtgcccaccgttctagagtattgtcaggactttaccagtgatgaaggcaaagagggcgtcggaccagattcgttgccaggacgaggtcgtcgactcatcacctttacagacagtcgacaagggacagcccgaatggcggtgcgtatgcagcaagaagcagaacgcagtcgcttacgcggaagcgtagtcgaaattctcagctggcatcaaaggacgcaaacgtctacagcgccgaatgccaatgccgatctggaaaaattagcgaccagggcgaagcaagcccgtgagcaggcagaagaatatcgaagctggggaatgccagaccaggcgaaattgtcacaagcgcaggctgaacagcttgaacaggcttatcagtttgcaatcggcggaaaagcagcaaccaccctagtatcccgcacctggactgaaatggttaacgagcttaaagataaagccgatatccgtggcccggttctgaaatataactactatttgaagcctgaagtgtttaatgaaaacggcgggcctctaaagctttctgaaatgttgttgttccgggaattcatgcgtcgccctaaacggactaacagcctggaaacacaggggctggttcaggttggttacctgggactggagaaaatacataagctccctatgcactggcaggaaagggaattaacgctggatgactggcgcgattttctcaaggttacgttggatcattacgttcgcgagagcaacttcacacagctggatgatgagctgaaaaactggattggtagccgtttttcatcaaaattcgtccgtaacccggaatcaaaagatcctgaagataatcagaatagacgctggcctcaaattcgtaatggcaacgtatcccatcgtttagcgaagttactgatgctgggggctggattcaaaaccgtcaatacggcgactattgatattatcaatacatggctgaaagaagcatgggcccaacttaccggaccgcttgcagtactgaaacccgatggcaaccgtttttatttaccgaaagagcatatgactttttctttaatcacggatgcctggatttgcccggtaaccaataaaatcctggatacggcttttaaaggcttaaccccttatctgcctacccatatttcgttcgagcatcttacccaggcgcaatatgacacttttgtcgcgcagaaagtcaccatgccggaaatctggaagctggatcgttcacaggaagactacgcagagggtctggcaaaagcacgcgactgggtcagcaatgatccgctgatcgcacaattgcggtcagaaaacgtctggacagacatcaacgatcgtgtcgtggaaggcggtttctactatcgcactgccgagcactctgcccagcagtcgtcagaacgcctgcaaagctatgaaaagatgttcaagaacgggcaactaaatgttctcaactgttccaccaccatggaaatgggggttgatatcgggggcattacagcggtggtaatgaacaatgtaccgccacatcctgccaactatttacagcgcgccgggcgagccgggcgtagtaaagagtcgcgtgcgatctcttacaccctatgcaaaggtaacccacacgaccaacaggtttttgccaacccgctctggccgtttgaaaccatgatcccggcacccatggtcgcgatgaactccgcccgactggtacaacgtcacgtcaatgcattattactgtccgactttttatgtaacgttattggcgaaaccgataaagagaaaaccagcctcgatagcctctggtttttcggtgaagatgacgggcagtcaaaatgcgaacgctttaaaatctggctggaacgcccggttcttgatatcgacacggcgctggaacggctggtgaaaggtacggcgttgcatggtgcaagagctgaacatctgcgggataaaacaatcagcgcgatcaccttcctgcaacagcggtggctctccgtttatcgcgatctcgtgacccaggagcgtgagtcgcagccacaaacgccttatcgtaagcgcatagagctggagaagaaacgacactgtggagagtatctgctgcgcgatctggctgccagaactttcctgccgggatacggcttcccgacagatgtagtgacgtttgataacttcacaatggaagattatatccgcgaaaaattgcaaaaaagtcgtgataaaaaggaccgtgaagataacgtctcccgttataaaggattaccttcccgtaacctcggtgttgccattcgtgaatatgcaccgggagcagagatcattcttgatggccgtgtcttccgctctgccggtgtctcactgcactggcacaatattaatgctgataccaatgaagcccagcgtctggattgtgcctggcgctgtcacaaatgcgggaccattggctatgaagaggggatgagcagttccgggatgctcttttgctccaatagcgcctgcggcgaaaaaataatcatggataatcgccgtcaggtgttgcagcctgccgggtttgtcaccgatgcacacgctccggtaacgaacaatattgaaaccatgaaattcgtcccggttgtccccgcctgggtctttgttaaagcagagcccgtaccgttgcctaacccgctaatgggttatatggcttctggggctgatgggcatgttttccagcaaagtctgggggaaggtggacacggttatgcattgtgtctgagctgtggccgtgcggagtcgatgctgaatgaaaatgatgctccgaaaagtatggaagctcactatccaccgcgtccgggtaaagcggaccgcgacagccagaatcatcgtctgatttgcccaggttcgacggcactcatgaagaacgtcaccctgggcgcactggcgcgcaccgatgtctttgaaatggttctgcgcaaaccgcaaaaaggcgagtatctgccagataacacagaagaggggcggattgtcgctatgactctggcggttgctctgcgtcaggcgctagcgggcgttctgggtatctccggcgcagaactcggctattctgtacgcccggtcagactggaggatgggcaatcggtattagccgttcagctttatgatgtgatcagcggtggtgcaggttttgcctccagcgcaccggtacacattgaagctattttgcagggaatggtgaaacagttaggttgccgccattgtgatactgcatgtagtgaatgcctgcttgattcccagactcgccacgatcacgatttgctggatcgcaaagcggcgctggcctggcttggcgatgacttcacgtattacatcggtttaccggatgaagagacattctcgctgccggatgcccgctactgccctggcgctattggcgatacgattcgccgggcgattaacgaaggcgctgaaaagctcaccctgtggatgaccggcgcgcccaatgagtgggatttatacgcccgtcagttccgcgcggcggttcagagctatcggctaaaagacaacgtcgaggtcgatcttgttatacctgcgggagtggatgacccggatctgttgtatgaactatcgcaatttactgcgctgggtgtgcggctgtgccatgttgaacaggatctgcaattgccgatcgttgcccaggttacctttgccgatcgcgtgatgacgctggcttctcgcagccagcaggcaacgattccggggccggagtggcacctgaatgacgaactggtggtgcgtagtctcggttataaaacggtagaactgaacgagtttattctgccggctaaagccgccaacgctgtcgagcgggtcaaagacattcagatccacaaacagttgaatggaccactttcgcagtttggacaacgcttctgggacgtgctgtttaacgaccatgaagaagcacagtcactgatgaataacacgcgaattaccggcgttcactataccgatcgctatctgcaaaacccggttgcgctggcgttgttgggatcaattctgagaccgctaaaaacaaagctgaccgatgtcgctgaaggggcgctggatacgctgtttaaagataaagatcgccccggtaaccggcctttccatgactggatgagcatagcggattttcaggatttcgctgatcagtggtttgctgctgcgctgggcaggccgatagaactaacggtgttcgactcgccgcgcgatatccctcaccatcgtaaactgacggtgacttttgaggatggtcaggttttgaagatccgcttcgatcaggggatgggctactggcgtatcaactttgcatcgcaatggcattactttgacttccgcgatgacgtttctttccagttagtcaaaatggctcaggcctgcaatgaaggaaatgtggccaacagcgaagagagctgggcaacggatgtgctggtggaggtgagcgcctcctga

SEQ ID NO: 29445 - DNA, 1743 bp, Escherichia coli p0305293.13; identical to SEQ ID NO: 28683

SEQ ID NO: 29446 - DNA, 6345 bp, Escherichia coli p0305293.14
atgactacacgctatttttcgtcacttattgaacaatcgttgtctcgttcaactgaagcaacgctcagtatcatgggcgttacaaacccgcagttgcgtgaacatctcgcgcaacaaatgggggctgattgtgggaaaccgggctcattccttgcttctccggtattccagcaaatgtttggatggaaggagtcaaatcacacgatgcgcagcctgacggaaggcaacgcattgttgagcaaagcagtggttgattcactggataatcagagtaatggccggtaccgatttggtgctgactggaagccttttacacaccagttagccagttggaaagctttgctggaaaagaaacattcagtggtggtaaccagtggtacgggttcaggtaaaacggaatgttttatggttccggtgctggaagatctttaccgggaactgcatgaaaatggcaacaatccgttggtcggtgtccgagccctttttctctatccattgaacgccttgattaattcacagcgcgagcgtctggatgcctggacgcgtggttttggtactggaatccgctactgcttgtataacggaaatacagaagagctccacgcaaaaatgaaaacagtgcaggataatagaccaaatgaagtcttatcccgtgaaaagatgcgtctggagccagccccgattctggtgaccaacggcacgatgctggaatatatgatggttcgccaggtcgacgccccgattatccagcaatccaaagcacaaaaatcactacgctggattgtactggatgaagcgcatacctatgtcgggtcgcaggccgctgaactggcactccagctgcgtcgtgtgatgacagcgtttggcgtgacgccagatgatgtgcgctttgtagcgacctctgcgaccattgccggcagcgacgccgaaaagcagctgaaaaaatttctctctgaattatccggtatcccgcaggagcgcatcgatgttctggacggaagtcgggtgattcctgaactggaaccatccaaaaacgtttctgttccgttagacgaaatagagcaaatacctgatctggatctaaaagataaaaatgataataaaattaaagggataagtcctgagcgcttttatgcgctcacgcactcccccgaagcacgttacatacgcgagatgttggtcaaacatcccaatccaatgaagctggatgagatgacagagcggttaaacatactgacaaaacagcatcacagccagcatgaagtactgcgttggatcgacgtctgttcagggacccaacctaatgcaaaggatcccgcatttcttaaagtcagggcgcatatcttccagcgtaatacccagggaatatgggcttgtgtggataaagattgcaggttaaagcacggtacaccgctcgaaaaaggctggccctttggctatgtatatgtgaaccagcgacaaaattgcgattgtggaagccctgtttacgaagtggcgttctgtaatgattgtaatgaacctcatcttctggcgcgggacaaaaagggcaaactagtccagtgggaaaataaaggtggcgatgaattctctttgcaggatgaagtacctgttgaacatgacgctacagcggaaaaagtcgaaaaagagaacagtttccagcctccgttgattattgccgcaggagagaccagcgaggccggttataccctacaacgcctcgaccgccagacgcgccgtattggcgttattaacaatgacagcattccgctgattattaatgatgttgaacaggtttgtagtgccagtggctgtggctacagaggcatgagtgggaaacagcccttccggcgtgcactattaggtgggccattttacgttactaatatcgtgcccaccgttctagagtattgtcaggactttaccagtgatgaaggcaaagagggcgtcggaccagattcgttgccaggacgaggtcgtcgactcatcacctttacagacagtcgacaagggacagcccgaatggcggtgcgtatgcagcaagaagcagaacgcagtcgcttacgcggaagcgtagtcgaaattctcagctggcatcaaaggacgcaaacgtctacagcgccgaatgccaatgccgatctggaaaaattagcgaccagggcgaagcaagcccgtgagcaggcagaagaatatcgaagctggggaatgccagaccaggcgaaattgtcacaagcgcaggctgaacagcttgaacaggcttatcagtttgcaatcggcggaaaagcagcaaccaccctagtatcccgcacctggactgaaatggttaacgagcttaaagataaagccgatatccgtggcccggttctgaaatataactactatttgaagcctgaagtgtttaatgaaaacggcgggcctctaaagctttctgaaatgttgttgttccgggaattcatgcgtcgccctaaacggactaacagcctggaaacacaggggctggttcaggttggttacctgggactggagaaaatacataagctccctatgcactggcaggaaagggaattaacgctggatgactggcgcgattttctcaaggttacgttggatcattacgttcgcgagagcaacttcacacagctggatgatgagctgaaaaactggattggtagccgtttttcatcaaaattcgtccgtaacccggaatcaaaagatcctgaagataatcagaatagacgctggcctcaaattcgtaatggcaacgtatcccatcgtttagcgaagttactgatgctgggggctggattcaaaaccgtcaatacggcgactattgatattatcaatacatggctgaaagaagcatgggcccaacttaccggaccgcttgcagtactgaaacccgatggcaaccgtttttatttaccgaaagagcatatgactttttctttaatcacggatgcctggatttgcccggtaaccaataaaatcctggatacggcttttaaaggcttaaccccttatctgcctacccatatttcgttcgagcatcttacccaggcgcaatatgacacttttgtcgcgcagaaagtcaccatgccggaaatctggaagctggatcgttcacaggaagactacgcagagggtctggcaaaagcacgcgactgggtcagcaatgatccgctgatcgcacaattgcggtcagaaaacgtctggacagacatcaacgatcgtgtcgtggaaggcggtttctactatcgcactgccgagcactctgcccagcagtcgtcagaacgcctgcaaagctatgaaaagatgttcaagaacgggcaactaaatgttctcaactgttccaccaccatggaaatgggggttgatatcgggggcattacagcggtggtaatgaacaatgtaccgccacatcctgccaactatttacagcgcgccgggcgagccgggcgtagtaaagagtcgcgtgcgatctcttacaccctatgcaaaggtaacccacacgaccaacaggtttttgccaacccgctctggccgtttgaaaccatgatcccggcacccatggtcgcgatgaactccgcccgactggtacaacgtcacgtcaatgcattattactgtccgactttttatgtaacgttattggcgaaaccgataaagagaaaaccagcctcgatagcctctggtttttcggtgaagatgacgggcagtcaaaatgcgaacgctttaaaatctggctggaacgcccggttcttgatatcgacacggcgctggaacggctggggaaaggtacggcgttgcatggtgcaagagctgaacatctgcgggataaaacaatcagcgcgatcaccttcctgcaacagcggtggctctccgtttatcgcgatctcgtgacccaggagcgtgagtcgcagccacaaacgccttatcgtaagcgcatagagctggagaagaaacgacactgtggagagtatctgctgcgcgatctggctgccagaactttcctgccgggatacggcttcccgacagatgtagtgacgtttgataacttcacaatggaagattatatccgcgaaaaattgcaaaaaagtcgtgataaaaaggaccgtgaagataacgtctcccgttataaaggattaccttcccgtaacctcggtgttgccattcgtgaatatgcaccgggagcagagatcattcttgatggccgtgtcttccgctctgccggtgtctcactgcactggcacaatattaatgctgataccaatgaagcccagcgtctggattgtgcctggcgctgtcacaaatgcgggaccattggctatgaagaggggatgagcagttccgggatgctcttttgctccaatagcgcctgcggcgaaaaaataatcatggataatcgccgtcaggtgttgcagcctgccgggtttgtcaccgatgcacacgctccggtaacgaacaatattgaaaccatgaaattcgtcccggttgtccccgcctgggtctttgttaaagcagagcccgtaccgttgcctaacccgctaatgggttatatggcttctggggctgatgggcatgttttccagcaaagtctgggggaaggtggacacggttatgcattgtgtctgagctgtggccgtgcggagtcgatgctgaatgaaaatgatgctccgaaaagtatggaagctcactatccaccgcgtccgggtaaagcggaccgcgacagccagaatcatcgtctgatttgcccaggttcgacggcactcatgaagaacgtcaccctgggcgcactggcgcgcaccgatgtctttgaaatggttctgcgcaaaccgcaaaaaggcgagtatctgccagataacacagaagaggggcggattgtcgctatgactctggcggttgctctgcgtcaggcgctagcgggcgttctgggtatctccggcgcagaactcggctattctgtacgcccggtcagactggaggatgggcaatcggtattagccgttcagctttatgatgtgatcagcggtggtgcaggttttgcctccagcgcaccggtacacattgaagctattttgcagggaatggtgaaacagttaggttgccgccattgtgatactgcatgtagtgaatgcctgcttgattcccagactcgccacgatcacgatttgctggatcgcaaagcggcgctggcctggcttggcgatgacttcacgtattacatcggtttaccggatgaagagacattctcgctgccggatgcccgctactgccctggcgctattggcgatacgattcgccgggcgattaacgaaggcgctgaaaagctcaccctgtggatgaccggcgcgcccaatgagtgggatttatacgcccgtcagttccgcgcggcggttcagagctatcggctaaaagacaacgtcgaggtcgatcttgttatacctgcgggagtggatgacccggatctgttgtatgaactatcgcaatttactgcgctgggtgtgcggctgtgccatgttgaacaggatctgcaattgccgatcgttgcccaggttacctttgccgatcgcgtgatgacgctggcttctcgcagccagcaggcaacgattccggggccggagtggcacctgaatgacgaactggtggtgcgtagtctcggttataaaacggtagaactgaacgagtttattctgccggctaaagccgccaacgctgtcgagcgggtcaaagacattcagatccacaaacagttgaatggaccactttcgcagtttggacaacgcttctgggacgtgctgtttaacgaccatgaagaagcacagtcactgatgaataacacgcgaattaccggcgttcactataccgatcgctatctgcaaaacccggttgcgctggcgttgttgggatcaattctgagaccgctaaaaacaaagctgaccgatgtcgctgaagtggcgctggatacgctgtttaaagataaagatcgccccggtaaccggcctttccatgactggatgagcatagcggattttcaggatttcgctgatcagtggtttgctgctgcgctgggcaggccgatagaactaacggtgttcgactcgccgcgcgatatccctcaccatcgtaaactgacggtgacttttgaggatggtcaggttttgaagatccgcttcgatcaggggatgggctactggcgtatcaactttgcatcgcaatggcattactttgacttccgcgatgacgtttctttccagttagtcaaaatggctcaggcctgcaatgaaggaaatgtggccaacagcgaagagagctgggcaacggatgtgctggtggaggtgagcgcctcctga

SEQ ID NO: 29447 - DNA, 1743 bp, Escherichia coli p0305293.14; identical to SEQ ID NO: 28683

SEQ ID NO: 29448 - DNA, 6273 bp, Escherichia coli p0305293.15
atgggcgttacaaacccgcagttgcgtgaacatctcgcgcaacaaatgggggctgattgtgggaaaccgggctcattccttgcttctccggtattccagcaaatgtttggatggaaggagtcaaatcacacgatgcgcagcctgacggaaggcaacgcattgttgagcaaagcagtggttgattcactggataatcagagtaatggccggtaccgatttggtgctgactggaagccttttacacaccagttagccagttggaaagctttgctggaaaagaaacattcagtggtggtaaccagtggtacgggttcaggtaaaacggaatgttttatggttccggtgctggaagatctttaccgggaactgcatgaaaatggcaacaatccgttggtcggtgtccgagccctttttctctatccattgaacgccttgattaattcacagcgcgagcgtctggatgcctggacgcgtggttttggtactggaatccgctactgcttgtataacggaaatacagaagagctccacgcaaaaatgaaaacagtgcaggataatagaccaaatgaagtcttatcccgtgaaaagatgcgtctggagccagccccgattctggtgaccaacggcacgatgctggaatatatgatggttcgccaggtcgacgccccgattatccagcaatccaaagcacaaaaatcactacgctggattgtactggatgaagcgcatacctatgtcgggtcgcaggccgctgaactggcactccagctgcgtcgtgtgatgacagcgtttggcgtgacgccagatgatgtgcgctttgtagcgacctctgcgaccattgccggcagcgacgccgaaaagcagctgaaaaaatttctctctgaattatccggtatcccgcaggagcgcatcgatgttctggacggaagtcgggtgattcctgaactggaaccatccaaaaacgtttctgttccgttagacgaaatagagcaaatacctgatctggatctaaaagataaaaatgataataaaattaaagggataagtcctgagcgcttttatgcgctcacgcactcccccgaagcacgttacatacgcgagatgttggtcaaacatcccaatccaatgaagctggatgagatgacagagcggttaaacatactgacaaaacagcatcacagccagcatgaagtactgcgttggatcgacgtctgttcagggacccaacctaatgcaaaggatcccgcatttcttaaagtcagggcgcatatcttccagcgtaatacccagggaatatgggcttgtgtggataaagattgcaggttaaagcacggtacaccgctcgaaaaaggctggccctttggctatgtatatgtgaaccagcgacaaaattgcgattgtggaagccctgtttacgaagtggcgttctgtaatgattgtaatgaacctcatcttctggcgcgggacaaaaagggcaaactagtccagtgggaaaataaaggtggcgatgaattctctttgcaggatgaagtacctgttgaacatgacgctacagcggaaaaagtcgaaaaagagaacagtttccagcctccgttgattattgccgcaggagagaccagcgaggccggttataccctacaacgcctcgaccgccagacgcgccgtattggcgttattaacaatgacagcattccgctgattattaatgatgttgaacaggtttgtagtgccagtggctgtggctacagaggcatgagtgggaaacagcccttccggcgtgcactattaggtgggccattttacgttactaatatcgtgcccaccgttctagagtattgtcaggactttaccagtgatgaaggcaaagagggcgtcggaccagattcgttgccaggacgaggtcgtcgactcatcacctttacagacagtcgacaagggacagcccgaatggcggtgcgtatgcagcaagaagcagaacgcagtcgcttacgcggaagcgtagtcgaaattctcagctggcatcaaaggacgcaaacgtctacagcgccgaatgccaatgccgatctggaaaaattagcgaccagggcgaagcaagcccgtgagcaggcagaagaatatcgaagctggggaatgccagaccaggcgaaattgtcacaagcgcaggctgaacagcttgaacaggcttatcagtttgcaatcggcggaaaagcagcaaccaccctagtatcccgcacctggactgaaatggttaacgagcttaaagataaagccgatatccgtggcccggttctgaaatataactactatttgaagcctgaagtgtttaatgaaaacggcgggcctctaaagctttctgaaatgttgttgttccgggaattcatgcgtcgccctaaacggactaacagcctggaaacacaggggctggttcaggttggttacctgggactggagaaaatacataagctccctatgcactggcaggaaagggaattaacgctggatgactggcgcgattttctcaaggttacgttggatcattacgttcgcgagagcaacttcacacagctggatgatgagctgaaaaactggattggtagccgtttttcatcaaaattcgtccgtaacccggaatcaaaagatcctgaagataatcagaatagacgctggcctcaaattcgtaatggcaacgtatcccatcgtttagcgaagttactgatgctgggggctggattcaaaaccgtcaatacggcgactattgatattatcaatacatggctgaaagaagcatgggcccaacttaccggaccgcttgcagtactgaaacccgatggcaaccgtttttatttaccgaaagagcatatgactttttctttaatcacggatgcctggatttgcccggtaaccaataaaatcctggatacggcttttaaaggcttaaccccttatctgcctacccatatttcgttcgagcatcttacccaggcgcaatatgacacttttgtcgcgcagaaagtcaccatgccggaaatctggaagctggatcgttcacaggaagactacgcagaggggctggcaaaagcacgcgactgggtcagcaatgatccgctgatcgcacaattgcggtcagaaaacgtctggacagacatcaacgatcgtgtcgtggaaggcggtttctactatcgcactgccgagcactctgcccagcagtcgtcagaacgcctgcaaagctatgaaaagatgttcaagaacgggcaactaaatgttctcaactgttccaccaccatggaaatgggggttgatatcgggggcattacagcggtggtaatgaacaatgtaccgccacatcctgccaactatttacagcgcgccgggcgagccgggcgtagtaaagagtcgcgtgcgatctcttacaccctatgcaaaggtaacccacacgaccaacaggtttttgccaacccgctctggccgtttgaaaccatgatcccggcacccatggtcgcgatgaactccgcccgactggtacaacgtcacgtcaatgcattattactgtccgactttttatgtaacgttattggcgaaaccgataaagagaaaaccagcctcgatagcctctggtttttcggtgaagatgacgggcagtcaaaatgcgaacgctttaaaatctggctggaacgcccggttcttgatatcgacacggcgctggaacggctggtgaaaggtacggcgttgcatggtgcaagagctgaacatctgcgggataaaacaatcagcgcgatccccttcctgcaacagcggtggctctccgtttatcgcgatctcgtgacccaggagcgtgagtcgcagccacaaacgccttatcgtaagcgcatagagctggagaagaaacgacactgtggagagtatctgctgcgcgatctggctgccagaactttcctgccgggatacggcttcccgacagatgtagtgacgtttgataacttcacaatggaagattatatccgcgaaaaattgcaaaaaagtcgtgataaaaaggaccgtgaagataacgtctcccgttataaaggattaccttcccgtaacctcggtgttgccattcgtgaatatgcaccgggagcagagatcattcttgatggccgtgtcttccgctctgccggtgtctcactgcactggcacaatattaatgctgataccaatgaagcccagcgtctggattgtgcctggcgctgtcacaaatgcgggaccattggctatgaagaggggatgagcagttccgggatgctcttttgctccaatagcgcctgcggcgaaaaaataatcatggataatcgccgtcaggtgttgcagcctgccgggtttgtcaccgatgcacacgctccggtaacgaacaatattgaaaccatgaaattcgtcccggttgtccccgcctgggtctttgttaaagcagagcccgtaccgttgcctaacccgctaatgggttatatggcttctggggctgatgggcatgttttccagcaaagtctgggggaaggtggacacggttatgcattgtgtctgagctgtggccgtgcggagtcgatgctgaatgaaaatgatgctccgaaaagtatggaagctcactatccaccgcgtccgggtaaagcggaccgcgacagccagaatcatcgtctgatttgcccaggttcgacggcactcatgaagaacgtcaccctgggcgcactggcgcgcaccgatgtctttgaaatggttctgcgcaaaccgcaaaaaggcgagtatctgccagataacacagaagaggggcggattgtcgctatgactctggcggttgctctgcgtcaggcgctagcgggcgttctgggtatctccggcgcagaactcggctattctgtacgcccggtcagactggaggatgggcaatcggtattagccgttcagctttatgatgtgatcagcggtggtgcaggttttgcctccagcgcaccggtacacattgaagctattttgcagggaatggtgaaacagttaggttgccgccattgtgatactgcatgtagtgaatgcctgcttgattcccagactcgccacgatcacgatttgctggatcgcaaagcggcgctggcctggcttggcgatgacttcacgtattacatcggtttaccggatgaagagacattctcgctgccggatgcccgctactgccctggcgctattggcgatacgattcgccgggcgattaacgaaggcgctgaaaagctcaccctgtggatgaccggcgcgcccaatgagtgggatttatacgcccgtcagttccgcgcggcggttcagagctatcggctaaaagacaacgtcgaggtcgatcttgttatacctgcgggagtggatgacccggatctgttgtatgaactatcgcaatttactgcgctgggtgtgcggctgtgccatgttgaacaggatctgcaattgccgatcgttgcccaggttacctttgccgatcgcgtgatgacgctggcttctcgcagccagcaggcaacgattccggggccggagtggcacctgaatgacgaactggtggtgcgtagtctcggttataaaacggtagaactgaacgagtttattctgccggctaaagccgccaacgctgtcgagcgggtcaaagacattcagatccacaaacagttgaatggaccactttcgcagtttggacaacgcttctgggacgtgctgtttaacgaccatgaagaagcacagtcactgatgaataacacgcgaattaccggcgttcactataccgatcgctatctgcaaaacccggttgcgctggcgttgttgggatcaattctgagaccgctaaaaacaaagctgaccgatgtcgctgaagtggcgctggatacgctgtttaaagataaagatcgccccggtaaccggcctttccatgactggatgagcatagcggattttcaggatttcgctgatcagtggtttgctgctgcgctgggcaggccgatagaactaacggtgttcgactcgccgcgcgatatccctcaccatcgtaaactgacggtgacttttgaggatgggcaggttttgaagatccgcttcgatcaggggatgggctactggcgtatcaactttgcatcgcaatggcattactttgacttccgcgatgacgtttctttccagttagtcaaaatggctcaggcctgcaatgaaggaaatgtggccaacagcgaagagagctgggcaacggatgtgctggtggaggtgagcgcctcctga

SEQ ID NO: 29449 - DNA, 1947 bp, Escherichia coli p0305293.15
atgttccatagtgaaaccaaccttgcaaatacggattaccgggaaaaccggtccatgatactgtccggtttatcactttgggagaaaggcagtccgctgcataaatctacgcaacaggttagaacccaaggcccgatacggcatgcggactgcaggcagagaaaactggccgattttctctgcactggagggataatacaagagatgctgggggctcaatatctttctatccgtaatagtaataatgaaacgctcttgcgtcgcaaaatcggtatcttgcctgctgatttcagtattgagataaaaggtggaatgcacgcaaatgaaggcactatcgtaatcaccacacagcatccttgtgtagcaaaacttaaagataaaacattggaggctacacgtaagcgtactgaggggcgaacagagatacaacttaaagcggaaggggtacctccggcatttattacattacaagttctgcctaatttggcggctgaccccatcgacattgagttaccttttcccgctaaaggctgtctcgctcttgatgtaaacggacgtcctctggataaaaacattacgctgcatgatctgctgggttccagagcgtttctgttctccagaaatggtgagccgacaaaatatacattgcagttgtatttgcgctccgttagtggattacaggcatggcatgaatggtgttatacggcgttgagcgatcgtcctgttgaattgaatctctatagtctgcgcgaacatattgagaacctgatttcacttgaggcaggtattgatcaggttgttgagatgcgtattacgggggcaggggtggtcatggcctggcaaattcgtcgctataaatacagcctgcgctatgattatgaaaaagaactattactcagccagtcagtgaaccatcgtgctgggcagattccttcccccgttatcatgctgttaagtgaacccgagaggaaatccattcccttagcatctagaatgagcgagggagtgcctgtcggtgaatatgagttgagctcaatcgttaacaaaaatggaccgtggttggttgtccctaaaccgggtgaagagatggcttttcgtccctgcttcattcgtggcgaatcttcgttaccggtagaagaaagcaacatccgctcattgcagaaagcgacccagctttttaatccacaggcagaagttaataccatcacacgggttctcggacagatggctaacgatcctgcccattccggctggcaatttatgcgtagcctgtacgatcaattcgggtatttaccactggcaacctttgaagtatggcgtgcactggtgcagcatccgcaggcattggcaatgtcgctcttcaaatttgaaatgtcagcagagtacctgagtcgtattgagaatgagttccctattttatgggagtttttccccatctttgagatcaaagctgcatctgagcgtttcaaattgttcctgagccaaaaaggtgcaccggaggaaacccaaaaattactggttactaatatgtttcaacggctggggctcgtgttcccgacatatgccgatgaaattgagaaatggttaagtaacggatatctccctccgtctattcctgaatcttgtgtccacgggtggtatcaggagctcttacgtgagcacagtgaggctcgctggcctgaatatggctgtaagcgtctgtatgaatggatgatgtcacaaaaaaatccagtgattggtattaatcctgatgcagattaccgctattccgtggcctggttacccgtcttcgccgcagcggtggcaagcggaaatgcttcttttgaatctgtatttgaccgtaaacccggtgccgtatttttcctgaggcaagtcagggatttcgattcccgctggtttaaggccatcttccagtgcagcctgttgcgttatgttgctaaaaaataa

SEQ ID NO: 29450 - DNA, 6345 bp, Escherichia coli p0305293.2
atgactacacgctatttttcgtcacttattgaacaatcgttgtctcgttcaactgaagcaacgctcagtatcatgggcgttacaaacccgcagttgcgtgaacatctcgcgcaacaaatgggggctgattgtgggaaaccgggctcattccttgcttctccggtattccagcaaatgtttggatggaaggagtcaaatcacacgatgcgcagcctgacggaaggcaacgcattgttgagcaaagcagtggttgattcactggataatcagagtaatggccggtaccgatttggtgctgactggaagccttttacacaccagttagccagttggaaagctttgctggaaaagaaacattcagtggtggtaaccagtggtacgggttcaggtaaaacggaatgttttatggttccggtgctggaagatctttaccgggaactgcatgaaaatggcaacaatccgttggtcggtgtccgagccctttttctctatccattgaacgccttgattaattcacagcgcgagcgtctggatgcctggacgcgtggttttggtactggaatccgctactgcttgtataacggaaatacagaagagctccacgcaaaaatgaaaacagtgcaggataatagaccaaatgaagtcttatcccgtgaaaagatgcgtctggagccagccccgattctggtgaccaacggcacgatgctggaatatatgatggttcgccaggtcgacgccccgattatccagcaatccaaagcacaaaaatcactacgctggattgtactggatgaagcgcatacctatgtcgggtcgcaggccgctgaactggcactccagctgcgtcgtgtgatgacagcgtttggcgtgacgccagatgatgtgcgctttgtagcgacctctgcgaccattgccggcagcgacgccgaaaagcagctgaaaaaatttctctctgaattatccggtatcccgcaggagcgcatcgatgttctggacggaagtcgggtgattcctgaactggaaccatccaaaaacgtttctgttccgttagacgaaatagagcaaatacctgatctggatctaaaagataaaaatgataataaaattaaagggataagtcctgagcgcttttatgcgctcacgcactcccccgaagcacgttacatacgcgagatgttggtcaaacatcccaatccaatgaagctggatgagatgacagagcggttaaacatactgacaaaacagcatcacagccagcatgaagtactgcgttggatcgacgtctgttcagggacccaacctaatgcaaaggatcccgcatttcttaaagtcagggcgcatatcttccagcgtaatacccagggaatatgggcttgtgtggataaagattgcaggttaaagcacggtacaccgctcgaaaaaggctggccctttggctatgtatatgtgaaccagcgacaaaattgcgattgtggaagccctgtttacgaagtggcgttctgtaatgattgtaatgaacctcatcttctggcgcgggacaaaaagggcaaactagtccagtgggaaaataaaggtggcgatgaattctctttgcaggatgaagtacctgttgaacatgacgctacagcggaaaaagtcgaaaaagagaacagtttccagcctccgttgattattgccgcaggagagaccagcgaggccggttataccctacaacgcctcgaccgccagacgcgccgtattggcgttattaacaatgacagcattccgctgattattaatgatgttgaacaggtttgtagtgccagtggctgtggctacagaggcatgagtgggaaacagcccttccggcgtgcactattaggtgggccattttacgttactaatatcgtgcccaccgttctagagtattgtcaggactttaccagtgatgaaggcaaagagggcgtcggaccagattcgttgccaggacgaggtcgtcgactcatcacctttacagacagtcgacaagggacagcccgaatggcggtgcgtatgcagcaagaagcagaacgcagtcgcttacgcggaagcgtagtcgaaattctcagctggcatcaaaggacgcaaacgtctacagcgccgaatgccaatgccgatctggaaaaattagcgaccagggcgaagcaagcccgtgagcaggcagaagaatatcgaagctggggaatgccagaccaggcgaaattgtcacaagcgcaggctgaacagcttgaacaggcttatcagtttgcaatcggcggaaaagcagcaaccaccctagtatcccgcacctggactgaaatggttaacgagcttaaagataaagccgatatccgtggcccggttctgaaatataactactatttgaagcctgaagtgtttaatgaaaacggcgggcctctaaagctttctgaaatgttgttgttccgggaattcatgcgtcgccctaaacggactaacagcctggaaacacaggggctggttcaggttggttacctgggactggagaaaatacataagctccctatgcactggcaggaaagggaattaacgctggatgactggcgcgattttctcaaggttacgttggatcattacgttcgcgagagcaacttcacacagctggatgatgagctgaaaaactggattggtagccgtttttcatcaaaattcgtccgtaacccggaatcaaaagatcctgaagataatcagaatagacgctggcctcaaattcgtaatggcaacgtatcccatcgtttagcgaagttactgatgctgggggctggattcaaaaccgtcaatacggcgactattgatattatcaatacatggctgaaagaagcatgggcccaacttaccggaccgcttgcagtactgaaacccgatggcaaccgtttttatttaccgaaagagcatatgactttttctttaatcacggatgcctggatttgcccggtaaccaataaaatcctggatacggcttttaaaggcttaaccccttatctgcctacccatatttcgttcgagcatcttacccaggcgcaatatgacacttttgtcgcgcagaaagtcaccatgccggaaatctggaagctggatcgttcacaggaagactacgcagagggtctggcaaaagcacgcgactgggtcagcaatgatccgctgatcgcacaattgcggtcagaaaacgtctggacagacatcaacgatcgtgtcgtggaaggcggtttctactatcgcactgccgagcactctgcccagcagtcgtcagaacgcctgcaaagctatgaaaagatgttcaagaacgggcaactaaatgttctcaactgttccaccaccatggaaatgggggttgatatcgggggcattacagcggtggtaatgaacaatgtaccgccacatcctgccaactatttacagcgcgccgggcgagccgggcgtagtaaagagtcgcgtgcgatctcttacaccctatgcaaaggtaacccacacgaccaacaggtttttgccaacccgctctggccgtttgaaaccatgatcccggcacccatggtcgcgatgaactccgcccgactggtacaacgtcacgtcaatgcattattactgtccgactttttatgtaacgttattggcgaaaccgataaagagaaaaccagcctcgatagcctctggtttttcggtgaagatgacgggcagtcaaaatgcgaacgctttaaaatctggctggaacgcccggttcttgatatcgacacggcgctggaacggctggtgaaaggtacggcgttgcatggtgcaagagctgaacatctgcgggataaaacaatcagcgcgatcaccttcctgcaacagcggtggctctccgtttatcgcgatctcgtgacccaggagcgtgagtcgcagccacaaacgccttatcgtaagcgcatagagctggagaagaaacgacactgtggagagtatctgctgcgcgatctggctgccagaactttcctgccgggatacggcttcccgacagatgtagtgacgtttgataacttcacaatggaagattatatccgcgaaaaattgcaaaaaagtcgtgataaaaaggaccgtgaagataacgtctcccgttataaaggattaccttcccgtaacctcggtgttgccattcgtgaatatgcaccgggagcagagatcattcttgatggccgtgtcttccgctctgccggtgtctcactgcactggcacaatattaatgctgataccaatgaagcccagcgtctggattgtgcctggcgctgtcacaaatgcgggaccattggctatgaagaggggatgagcagttccgggatgctcttttgctccaatagcgcctgcggcgaaaaaataatcatggataatcgccgtcaggtgttgcagcctgccgggtttgtcaccgatgcacacgctccggtaacgaacaatattgaaaccatgaaattcgtcccggttgtccccgcctgggtctttgttaaagcagagcccgtaccgttgcctaacccgctaatgggttatatggcttctggggctgatgggcatgttttccagcaaagtctgggggaaggtggacacggttatgcattgtgtctgagctgtggccgtgcggagtcgatgctgaatgaaaatgatgctccgaaaagtatggaagctcactatccaccgcgtccgggtaaagcggaccgcgacagccagaatcatcgtctgatttgcccaggttcgacggcactcatgaagaacgtcaccctgggcgcactggcgcgcaccgatgtctttgaaatggttctgcgcaaaccgcaaaaaggcgagtatctgccagataacacagaagaggggcggattgtcgctatgactctggcggttgctctgcgtcaggcgctagcgggcgttctgggtatctccggcgcagaactcggctattctgtacgcccggtcagactggaggatgggcaatcggtattagccgttcagctttatgatgtgatcagcggtggtgcaggttttgcctccagcgcaccggtacacattgaagctattttgcagggaatggtgaaacagttaggttgccgccattgtgatactgcatgtagtgaatgcctgcttgattcccagactcgccacgatcacgatttgctggatcgcaaagcggcgctggcctggcttggcgatgacttcacgtattacatcggtttaccggatgaagagacattctcgctgccggatgcccgctactgccctggcgctattggcgatacgattcgccgggcgattaacgaaggcgctgaaaagctcaccctgtggatgaccggcgcgcccaatgagtgggatttatacgcccgtcagttccgcgcggcggttcagagctatcggctaaaagacaacgtcgaggtcgatcttgttatacctgcgggagtggatgacccggatctgttgtatgaactatcgcaatttactgcgctgggtgtgcggctgtgccatgttgaacaggatctgcaattgccgatcgttgcccaggttacctttgccgatcgcgtgatgacgctggcttctcgcagccagcaggcaacgattccggggccggaggggcacctgaatgacgaactggtggtgcgtagtctcggttataaaacggtagaactgaacgagtttattctgccggctaaagccgccaacgctgtcgagcgggtcaaagacattcagatccacaaacagttgaatggaccactttcgcagtttggacaacgcttctgggacgtgctgtttaacgaccatgaagaagcacagtcactgatgaataacacgcgaattaccggcgttcactataccgatcgctatctgcaaaacccggttgcgctggcgttgttgggatcaattctgagaccgctaaaaacaaagctgaccgatgtcgctgaagtggcgctggatacgctgtttaaagataaagatcgccccggtaaccggcctttccatgactggatgagcatagcggattttcaggatttcgctgatcagtggtttgctgctgcgctgggcaggccgatagaactaacggtgttcgactcgccgcgcgatatccctcaccatcgtaaactgacggtgacttttgaggatggtcaggttttgaagatccgcttcgatcaggggatgggctactggcgtatcaactttgcatcgcaatggcattactttgacttccgcgatgacgtttctttccagttagtcaaaatggctcaggcctgcaatgaaggaaatgtggccaacagcgaagagagctgggcaacggatgtgctggtggaggtgagcgcctcctga

SEQ ID NO: 29451 - DNA, 1743 bp, Escherichia coli p0305293.2
atgctgggggctcaatatctttctatccgtaatagtaataatgaaacgctcttgcgtcgcaaaatcggtatcttgcctgctgatttcagtattgagataaaaggtggaatgcacgcaaatgaaggcactatcgtaatcaccacacagcatccttgtgtagcaaaacttaaagataaaacattggaggctacacgtaagcgtactgaggggcgaacagagatacaacttaaagcggaaggggtacctccggcatttattacattacaagttctgcctaatttggcggctgcccccatcgacattgagttaccttttcccgctaaaggctgtctcgctcttgatgtaaacggacgtcctctggataaaaacattacgctgcatgatctgctgggttccagagcgtttctgttctccagaaatggtgagccgacaaaatatacattgcagttgtatttgcgctccgttagtggattacaggcatggcatgaatggtgttatacggcgttgagcgatcgtcctgttgaattgaatctctatagtctgcgcgaacatattgagaacctgatttcacttgaggcaggtattgatcaggttgttgagatgcgtattacgggggcaggtgtggtcatggcctggcaaattcgtcgctataaatacagcctgcgctatgattatgaaaaagaactattactcagccagtcagtgaaccatcgtgctgggcagattccttcccccgttatcatgctgttaagtgaacccgagaggaaatccattcccttagcatctagaatgagcgagggagtgcctgtcggtgaatatgagttgagctcaatcgttaacaaaaatggaccgtggttggttgtccctaaaccgggtgaagagatggcttttcgtccctgcttcattcgtggcgaatcttcgttaccggtagaagaaagcaacatccgctcattgcagaaagcgacccagctttttaatccacaggcagaagttaataccatcacacgggttctcggacagatggctaacgatcctgcccattccggctggcaatttatgcgtagcctgtacgatcaattcgggtatttaccactggcaacctttgaagtatggcgtgcactggtgcagcatccgcaggcattggcaatgtcgctcttcaaatttgaaatgtcagcagagtacctgagtcgtattgagaatgagttccctattttatgggagtttttccccatctttgagatcaaagctgcatctgagcgtttcaaattgttcctgagccaaaaaggtgcaccggaggaaacccaaaaattactggttactaatatgtttcaacggctggggctcgtgttcccgacatatgccgatgaaattgagaaatggttaagtaacggatatctccctccgtctattcctgaatcttgtgtccacgggtggtatcaggagctcttacgtgagcacagtgaggctcgctggcctgaatatggctgtaagcgtctgtatgaatggatgatgtcacaaaaaaatccagtgattggtattaatcctgatgcagattaccgctattccgtggcctggttacccgtcttcgccgcagcggtggcaagcggaaatgcttcttttgaatctgtatttgaccgtaaacccggtgccgtatttttcctgaggcaagtcagggatttcgattcccgctggtttaaggccatcttccagtgcagcctgttgcgttatgttgctaaaaaataa

SEQ ID NO: 29452 - DNA, 6345 bp, Escherichia coli p0305293.3
atgactacacgctatttttcgtcacttattgaacaatcgttgtctcgttcaactgaagcaacgctcagtatcatgggcgttacaaacccgcagttgcgtgaacatctcgcgcaacaaatgggggctgattgtgggaaaccgggctcattccttgcttctccggtattccagcaaatgtttggatggaaggagtcaaatcacacgatgcgcagcctgacggaaggcaacgcattgttgagcaaagcagtggttgattcactggataatcagagtaatggccggtaccgatttggtgctgactggaagccttttacacaccagttagccagttggaaagctttgctggaaaagaaacattcagtggtggtaaccagtggtacgggttcaggtaaaacggaatgttttatggttccggtgctggaagatctttaccgggaactgcatgaaaatggcaacaatccgttggtcggtgtccgagccctttttctctatccattgaacgccttgattaattcacagcgcgagcgtctggatgcctggacgcgtggttttggtactggaatccgctactgcttgtataacggaaatacagaagagctccacgcaaaaatgaaaacagtgcaggataatagaccaaatgaagtcttatcccgtgaaaagatgcgtctggagccagccccgattctggtgaccaacggcacgatgctggaatatatgatggttcgccaggtcgacgccccgattatccagcaatccaaagcacaaaaatcactacgctggattgtactggatgaagcgcatacctatgtcgggtcgcaggccgctgaactggcactccagctgcgtcgtgtgatgacagcgtttggcgtgacgccagatgatgtgcgctttgtagcgacctctgcgaccattgccggcagcgacgccgaaaagcagctgaaaaaatttctctctgaattatccggtatcccgcaggagcgcatcgatgttctggacggaagtcgggtgattcctgaactggaaccatccaaaaacgtttctgttccgttagacgaaatagagcaaatacctgatctggatctaaaagataaaaatgataataaaattaaagggataagtcctgagcgcttttatgcgctcacgcactcccccgaagcacgttacatacgcgagatgttggtcaaacatcccaatccaatgaagctggatgagatgacagagcggttaaacatactgacaaaacagcatcacagccagcatgaagtactgcgttggatcgacgtctgttcagggacccaacctaatgcaaaggatcccgcatttcttaaagtcagggcgcatatcttccagcgtaatacccagggaatatgggcttgtgtggataaagattgcaggttaaagcacggtacaccgctcgaaaaaggctggccctttggctatgtatatgtgaaccagcgacaaaattgcgattgtggaagccctgtttacgaagtggcgttctgtaatgattgtaatgaacctcatcttctggcgcgggacaaaaagggcaaactagtccagtgggaaaataaaggtggcgatgaattctctttgcaggatgaagtacctgttgaacatgacgctacagcggaaaaagtcgaaaaagagaacagtttccagcctccgttgattattgccgcaggagagaccagcgaggccggttataccctacaacgcctcgaccgccagacgcgccgtattggcgttattaacaatgacagcattccgctgattattaatgatgttgaacaggtttgtagtgccagtggctgtggctacagaggcatgagggggaaacagcccttccggcgtgcactattaggtgggccattttacgttactaatatcgtgcccaccgttctagagtattgtcaggactttaccagtgatgaaggcaaagagggcgtcggaccagattcgttgccaggacgaggtcgtcgactcatcacctttacagacagtcgacaagggacagcccgaatggcggtgcgtatgcagcaagaagcagaacgcagtcgcttacgcggaagcgtagtcgaaattctcagctggcatcaaaggacgcaaacgtctacagcgccgaatgccaatgccgatctggaaaaattagcgaccagggcgaagcaagcccgtgagcaggcagaagaatatcgaagctggggaatgccagaccaggcgaaattgtcacaagcgcaggctgaacagcttgaacaggcttatcagtttgcaatcggcggaaaagcagcaaccaccctagtatcccgcacctggactgaaatggttaacgagcttaaagataaagccgatatccgtggcccggttctgaaatataactactatttgaagcctgaagtgtttaatgaaaacggcgggcctctaaagctttctgaaatgttgttgttccgggaattcatgcgtcgccctaaacggactaacagcctggaaacacaggggctggttcaggttggttacctgggactggagaaaatacataagctccctatgcactggcaggaaagggaattaacgctggatgactggcgcgattttctcaaggttacgttggatcattacgttcgcgagagcaacttcacacagctggatgatgagctgaaaaactggattggtagccgtttttcatcaaaattcgtccgtaacccggaatcaaaagatcctgaagataatcagaatagacgctggcctcaaattcgtaatggcaacgtatcccatcgtttagcgaagttactgatgctgggggctggattcaaaaccgtcaatacggcgactattgatattatcaatacatggctgaaagaagcatgggcccaacttaccggaccgcttgcagtactgaaacccgatggcaaccgtttttatttaccgaaagagcatatgactttttctttaatcacggatgcctggatttgcccggtaaccaataaaatcctggatacggcttttaaaggcttaaccccttatctgcctacccatatttcgttcgagcatcttacccaggcgcaatatgacacttttgtcgcgcagaaagtcaccatgccggaaatctggaagctggatcgttcacaggaagactacgcagagggtctggcaaaagcacgcgactgggtcagcaatgatccgctgatcgcacaattgcggtcagaaaacgtctggacagacatcaacgatcgtgtcgtggaaggcggtttctactatcgcactgccgagcactctgcccagcagtcgtcagaacgcctgcaaagctatgaaaagatgttcaagaacgggcaactaaatgttctcaactgttccaccaccatggaaatgggggttgatatcgggggcattacagcggtggtaatgaacaatgtaccgccacatcctgccaactatttacagcgcgccgggcgagccgggcgtagtaaagagtcgcgtgcgatctcttacaccctatgcaaaggtaacccacacgaccaacaggtttttgccaacccgctctggccgtttgaaaccatgatcccggcacccatggtcgcgatgaactccgcccgactggtacaacgtcacgtcaatgcattattactgtccgactttttatgtaacgttattggcgaaaccgataaagagaaaaccagcctcgatagcctctggtttttcggtgaagatgacgggcagtcaaaatgcgaacgctttaaaatctggctggaacgcccggttcttgatatcgacacggcgctggaacggctggtgaaaggtacggcgttgcatggtgcaagagctgaacatctgcgggataaaacaatcagcgcgatcaccttcctgcaacagcggtggctctccgtttatcgcgatctcgtgacccaggagcgtgagtcgcagccacaaacgccttatcgtaagcgcatagagctggagaagaaacgacactgtggagagtatctgctgcgcgatctggctgccagaactttcctgccgggatacggcttcccgacagatgtagtgacgtttgataacttcacaatggaagattatatccgcgaaaaattgcaaaaaagtcgtgataaaaaggaccgtgaagataacgtctcccgttataaaggattaccttcccgtaacctcggtgttgccattcgtgaatatgcaccgggagcagagatcattcttgatggccgtgtcttccgctctgccggtgtctcactgcactggcacaatattaatgctgataccaatgaagcccagcgtctggattgtgcctggcgctgtcacaaatgcgggaccattggctatgaagaggggatgagcagttccgggatgctcttttgctccaatagcgcctgcggcgaaaaaataatcatggataatcgccgtcaggtgttgcagcctgccgggtttgtcaccgatgcacacgctccggtaacgaacaatattgaaaccatgaaattcgtcccggttgtccccgcctgggtctttgttaaagcagagcccgtaccgttgcctaacccgctaatgggttatatggcttctggggctgatgggcatgttttccagcaaagtctgggggaaggtggacacggttatgcattgtgtctgagctgtggccgtgcggagtcgatgctgaatgaaaatgatgctccgaaaagtatggaagctcactatccaccgcgtccgggtaaagcggaccgcgacagccagaatcatcgtctgatttgcccaggttcgacggcactcatgaagaacgtcaccctgggcgcactggcgcgcaccgatgtctttgaaatggttctgcgcaaaccgcaaaaaggcgagtatctgccagataacacagaagaggggcggattgtcgctatgactctggcggttgctctgcgtcaggcgctagcgggcgttctgggtatctccggcgcagaactcggctattctgtacgcccggtcagactggaggatgggcaatcggtattagccgttcagctttatgatgtgatcagcggtggtgcaggttttgcctccagcgcaccggtacacattgaagctattttgcagggaatggtgaaacagttaggttgccgccattgtgatactgcatgtagtgaatgcctgcttgattcccagactcgccacgatcacgatttgctggatcgcaaagcggcgctggcctggcttggcgatgacttcacgtattacatcggtttaccggatgaagagacattctcgctgccggatgcccgctactgccctggcgctattggcgatacgattcgccgggcgattaacgaaggcgctgaaaagctcaccctgtggatgaccggcgcgcccaatgagtgggatttatacgcccgtcagttccgcgcggcggttcagagctatcggctaaaagacaacgtcgaggtcgatcttgttatacctgcgggagtggatgacccggatctgttgtatgaactatcgcaatttactgcgctgggtgtgcggctgtgccatgttgaacaggatctgcaattgccgatcgttgcccaggttacctttgccgatcgcgtgatgacgctggcttctcgcagccagcaggcaacgattccggggccggagtggcacctgaatgacgaactggtggtgcgtagtctcggttataaaacggtagaactgaacgagtttattctgccggctaaagccgccaacgctgtcgagcgggtcaaagacattcagatccacaaacagttgaatggaccactttcgcagtttggacaacgcttctgggacgtgctgtttaacgaccatgaagaagcacagtcactgatgaataacacgcgaattaccggcgttcactataccgatcgctatctgcaaaacccggttgcgctggcgttgttgggatcaattctgagaccgctaaaaacaaagctgaccgatgtcgctgaagtggcgctggatacgctgtttaaagataaagatcgccccggtaaccggcctttccatgactggatgagcatagcggattttcaggatttcgctgatcagtggtttgctgctgcgctgggcaggccgatagaactaacggtgttcgactcgccgcgcgatatccctcaccatcgtaaactgacggtgacttttgaggatggtcaggttttgaagatccgcttcgatcaggggatgggctactggcgtatcaactttgcatcgcaatggcattactttgacttccgcgatgacgtttctttccagttagtcaaaatggctcaggcctgcaatgaaggaaatgtggccaacagcgaagagagctgggcaacggatgtgctggtggaggtgagcgcctcctga

SEQ ID NO: 29453 - DNA, 1743 bp, Escherichia coli p0305293.3; identical to SEQ ID NO: 28683

SEQ ID NO: 29454 - DNA, 6273 bp, Escherichia coli p0305293.4
atgggcgttacaaacccgcagttgcgtgaacatctcgcgcaacaaatgggggctgattgtgggaaaccgggctcattccttgcttctccggtattccagcaaatgtttggatggaaggagtcaaatcacacgatgcgcagcctgacggaaggcaacgcattgttgagcaaagcagtggttgattcactggataatcagagtaatggccggtaccgatttggtgctgactggaagccttttacacaccagttagccagttggaaagctttgctggaaaagaaacattcagtggtggtaaccagtggtacgggttcaggtaaaacggaatgttttatggttccggtgctggaagatctttaccgggaactgcatgaaaatggcaacaatccgttggtcggtgtccgagccctttttctctatccattgaacgccttgattaattcacagcgcgagcgtctggatgcctggacgcgtggttttggtactggaatccgctactgcttgtataacggaaatacagaagagctccacgcaaaaatgaaaacagtgcaggataatagaccaaatgaagtcttatcccgtgaaaagatgcgtctggagccagccccgattctggtgaccaacggcacgatgctggaatatatgatggttcgccaggtcgacgccccgattatccagcaatccaaagcacaaaaatcactacgctggattgtactggatgaagcgcatacctatgtcgggtcgcaggccgctgaactggcactccagctgcgtcgtgtgatgacagcgtttggcgtgacgccagatgatgtgcgctttgtagcgacctctgcgaccattgccggcagcgacgccgaaaagcagctgaaaaaatttctctctgaattatccggtatcccgcaggagcgcatcgatgttctggacggaagtcgggtgattcctgaactggaaccatccaaaaacgtttctgttccgttagacgaaatagagcaaatacctgatctggatctaaaagataaaaatgataataaaattaaagggataagtcctgagcgcttttatgcgctcacgcactcccccgaagcacgttacatacgcgagatgttggtcaaacatcccaatccaatgaagctggatgagatgacagagcggttaaacatactgacaaaacagcatcacagccagcatgaagtactgcgttggatcgacgtctgttcagggacccaacctaatgcaaaggatcccgcatttcttaaagtcagggcgcatatcttccagcgtaatacccagggaatatgggcttgtgtggataaagattgcaggttaaagcacggtacaccgctcgaaaaaggctggccctttggctatgtatatgtgaaccagcgacaaaattgcgattgtggaagccctgtttacgaagtggcgttctgtaatgattgtaatgaacctcatcttctggcgcgggacaaaaagggcaaactagtccagtgggaaaataaaggtggcgatgaattctctttgcaggatgaagtacctgttgaacatgacgctacagcggaaaaagtcgaaaaagagaacagtttccagcctccgttgattattgccgcaggagagaccagcgaggccggttataccctacaacgcctcgaccgccagacgcgccgtattggcgttattaacaatgacagcattccgctgattattaatgatgttgaacaggtttgtagtgccagtggctgtggctacagaggcatgagtgggaaacagcccttccggcgtgcactattaggtgggccattttacgttactaatatcgtgcccaccgttctagagtattgtcaggactttaccagtgatgaaggcaaagagggcgtcggaccagattcgttgccaggacgaggtcgtcgactcatcacctttacagacagtcgacaagggacagcccgaatggcggtgcgtatgcagcaagaagcagaacgcagtcgcttacgcggaagcgtagtcgaaattctcagctggcatcaaaggacgcaaacgtctacagcgccgaatgccaatgccgatctggaaaaattagcgaccagggcgaagcaagcccgtgagcaggcagaagaatatcgaagctggggaatgccagaccaggcgaaattgtcacaagcgcaggctgaacagcttgaacaggcttatcagtttgcaatcggcggaaaagcagcaaccaccctagtatcccgcacctggactgaaatggttaacgagcttaaagataaagccgatatccgtggcccggttctgaaatataactactatttgaagcctgaagtgtttaatgaaaacggcgggcctctaaagctttctgaaatgttgttgttccgggaattcatgcgtcgccctaaacggactaacagcctggaaacacaggggctggttcaggttggttacctgggactggagaaaatacataagctccctatgcactggcaggaaagggaattaacgctggatgactggcgcgattttctcaaggttacgttggatcattacgttcgcgagagcaacttcacacagctggatgatgagctgaaaaactggattggtagccgtttttcatcaaaattcgtccgtaacccggaatcaaaagatcctgaagataatcagaatagacgctggcctcaaattcgtaatggcaacgtatcccatcgtttagcgaagttactgatgctgggggctggattcaaaaccgtcaatacggcgactattgatattatcaatacatggctgaaagaagcatgggcccaacttaccggaccgcttgcagtactgaaacccgatggcaaccgtttttatttaccgaaagagcatatgactttttctttaatcacggatgcctggatttgcccggtaaccaataaaatcctggatacggcttttaaaggcttaaccccttatctgcctacccatatttcgttcgagcatcttacccaggcgcaatatgacacttttgtcgcgcagaaagtcaccatgccggaaatctggaagctggatcgttcacaggaagactacgcagaggggctggcaaaagcacgcgactgggtcagcaatgatccgctgatcgcacaattgcggtcagaaaacgtctggacagacatcaacgatcgtgtcgtggaaggcggtttctactatcgcactgccgagcactctgcccagcagtcgtcagaacgcctgcaaagctatgaaaagatgttcaagaacgggcaactaaatgttctcaactgttccaccaccatggaaatgggggttgatatcgggggcattacagcggtggtaatgaacaatgtaccgccacatcctgccaactatttacagcgcgccgggcgagccgggcgtagtaaagagtcgcgtgcgatctcttacaccctatgcaaaggtaacccacacgaccaacaggtttttgccaacccgctctggccgtttgaaaccatgatcccggcacccatggtcgcgatgaactccgcccgactggtacaacgtcacgtcaatgcattattactgtccgactttttatgtaacgttattggcgaaaccgataaagagaaacccagcctcgatagcctctggtttttcggtgaagatgacgggcagtcaaaatgcgaacgctttaaaatctggctggaacgcccggttcttgatatcgacacggcgctggaacggctggtgaaaggtacggcgttgcatggtgcaagagctgaacatctgcgggataaaacaatcagcgcgatcaccttcctgcaacagcggtggctctccgtttatcgcgatctcgtgacccaggagcgtgagtcgcagccacaaacgccttatcgtaagcgcatagagctggagaagaaacgacactgtggagagtatctgctgcgcgatctggctgccagaactttcctgccgggatacggcttcccgacagatgtagtgacgtttgataacttcacaatggaagattatatccgcgaaaaattgcaaaaaagtcgtgataaaaaggaccgtgaagataacgtctcccgttataaaggattaccttcccgtaacctcggtgttgccattcgtgaatatgcaccgggagcagagatcattcttgatggccgtgtcttccgctctgccggtgtctcactgcactggcacaatattaatgctgataccaatgaagcccagcgtctggattgtgcctggcgctgtcacaaatgcgggaccattggctatgaagaggggatgagcagttccgggatgctcttttgctccaatagcgcctgcggcgaaaaaataatcatggataatcgccgtcaggtgttgcagcctgccgggtttgtcaccgatgcacacgctccggtaacgaacaatattgaaaccatgaaattcgtcccggttgtccccgcctgggtctttgttaaagcagagcccgtaccgttgcctaacccgctaatgggttatatggcttctggggctgatgggcatgttttccagcaaagtctgggggaaggtggacacggttatgcattgtgtctgagctgtggccgtgcggagtcgatgctgaatgaaaatgatgctccgaaaagtatggaagctcactatccaccgcgtccgggtaaagcggaccgcgacagccagaatcatcgtctgatttgcccaggttcgacggcactcatgaagaacgtcaccctgggcgcactggcgcgcaccgatgtctttgaaatggttctgcgcaaaccgcaaaaaggcgagtatctgccagataacacagaagaggggcggattgtcgctatgactctggcggttgctctgcgtcaggcgctagcgggcgttctgggtatctccggcgcagaactcggctattctgtacgcccggtcagactggaggatgggcaatcggtattagccgttcagctttatgatgtgatcagcggtggtgcaggttttgcctccagcgcaccggtacacattgaagctattttgcagggaatggtgaaacagttaggttgccgccattgtgatactgcatgtagtgaatgcctgcttgattcccagactcgccacgatcacgatttgctggatcgcaaagcggcgctggcctggcttggcgatgacttcacgtattacatcggtttaccggatgaagagacattctcgctgccggatgcccgctactgccctggcgctattggcgatacgattcgccgggcgattaacgaaggcgctgaaaagctcaccctgtggatgaccggcgcgcccaatgagtgggatttatacgcccgtcagttccgcgcggcggttcagagctatcggctaaaagacaacgtcgaggtcgatcttgttatacctgcgggagtggatgacccggatctgttgtatgaactatcgcaatttactgcgctgggtgtgcggctgtgccatgttgaacaggatctgcaattgccgatcgttgcccaggttacctttgccgatcgcgtgatgacgctggcttctcgcagccagcaggcaacgattccggggccggagtggcacctgaatgacgaactggtggtgcgtagtctcggttataaaacggtagaactgaccgagtttattctgccggctaaagccgccaacgctgtcgagcgggtcaaagacattcagatccacaaacagttgaatggaccactttcgcagtttggacaacgcttctgggacgtgctgtttaacgaccatgaagaagcacagtcactgatgaataacacgcgaattaccggcgttcactataccgatcgctatctgcaaaacccggttgcgctggcgttgttgggatcaattctgagaccgctaaaaacaaagctgaccgatgtcgctgaagtggcgctggatacgctgtttaaagataaagatcgccccggtaaccggcctttccatgactggatgagcatagcggattttcaggatttcgctgatcagtggtttgctgctgcgctgggcaggccgatagaactaacggtgttcgactcgccgcgcgatatccctcaccatcgtaaactgacggtgacttttgaggatggtcaggttttgaagatccgcttcgatcaggggatgggctactggcgtatcaactttgcatcgcaatggcattactttgacttccgcgatgacgtttctttccagttagtcaaaatggctcaggcctgcaatgaaggaaatgtggccaacagcgaagagagctgggcaacggatgtgctggtggaggtgagcgcctcctga

SEQ ID NO: 29455 - DNA, 1743 bp, Escherichia coli p0305293.4; identical to SEQ ID NO: 28683

SEQ ID NO: 29456 - DNA, 6273 bp, Escherichia coli p0305293.5; identical to SEQ ID NO: 28692

SEQ ID NO: 29457 - DNA, 1743 bp, Escherichia coli p0305293.5; identical to SEQ ID NO: 28683

SEQ ID NO: 29458 - DNA, 6345 bp, Escherichia coli p0305293.8; identical to SEQ ID NO: 28682

SEQ ID NO: 29459 - DNA, 1743 bp, Escherichia coli p0305293.8
atgctgggggctcaatatctttctatccgtaatagtaataatgaaacgctcttgcgtcgcaaaatcggtatcttgcctgctgatttcagtattgagataaaaggtggaatgcacgcaaatgaaggcactatcgtaatcaccacacagcatccttgtgtagcaaaacttaaagataaaacattggaggctacacgtaagcgtactgaggggcgaacagagatacaacttaaagcggaaggggtacctccggcatttattacattacaagttctgcctaatttggcggctgaccccatcgacattgagttaccttttcccgctaaaggctgtctcgctcttgatgtaaacggacgtcctctggataaaaacattacgctgcatgatctgctgggttccagagcgtttctgttctccagaaatggtgagccgacaaaatatacattgcagttgtatttgcgctccgttagtggattacaggcatggcatgaatggtgttatacggcgttgagcgatcgtcctgttgaattgaatctctatagtctgcgcgaacatattgagaacctgatttcacttgaggcagggattgatcaggttgttgagatgcgtattacgggggcaggtgtggtcatggcctggcaaattcgtcgctataaatacagcctgcgctatgattatgaaaaagaactattactcagccagtcagtgaaccatcgtgctgggcagattccttcccccgttatcatgctgttaagtgaacccgagaggaaatccattcccttagcatctagaatgagcgagggagtgcctgtcggtgaatatgagttgagctcaatcgttaacaaaaatggaccgtggttggttgtccctaaaccgggtgaagagatggcttttcgtccctgcttcattcgtggcgaatcttcgttaccggtagaagaaagcaacatccgctcattgcagaaagcgacccagctttttaatccacaggcagaagttaataccatcacacgggttctcggacagatggctaacgatcctgcccattccggctggcaatttatgcgtagcctgtacgatcaattcgggtatttaccactggcaacctttgaagtatggcgtgcactggtgcagcatccgcaggcattggcaatgtcgctcttcaaatttgaaatgtcagcagagtacctgagtcgtattgagaatgagttccctattttatgggagtttttccccatctttgagatcaaagctgcatctgagcgtttcaaattgttcctgagccaaaaaggtgcaccggaggaaacccaaaaattactggttactaatatgtttcaacggctggggctcgtgttcccgacatatgccgatgaaattgagaaatggttaagtaacggatatctccctccgtctattcctgaatcttgtgtccacgggtggtatcaggagctcttacgtgagcacagtgaggctcgctggcctgaatatggctgtaagcgtctgtatgaatggatgatgtcacaaaaaaatccagtgattggtattaatcctgatgcagattaccgctattccgtggcctggttacccgtcttcgccgcagcggtggcaagcggaaatgcttcttttgaatctgtatttgaccgtaaacccggtgccgtatttttcctgaggcaagtcagggatttcgattcccgctggtttaaggccatcttccagtgcagcctgttgcgttatgttgctaaaaaataa

SEQ ID NO: 29460 - DNA, 6345 bp, Escherichia coli p0305293.9; identical to SEQ ID NO: 28682

SEQ ID NO: 29461 - DNA, 1947 bp, Escherichia coli p0305293.9; identical to SEQ ID NO: 28725

SEQ ID NO: 29462 - DNA, 6315 bp, Escherichia coli P4-96; identical to SEQ ID NO: 29166

SEQ ID NO: 29463 - DNA, 2937 bp, Escherichia coli P4-96; identical to SEQ ID NO: 29167

SEQ ID NO: 29464 - DNA, 6315 bp, Escherichia coli P4-NR; identical to SEQ ID NO: 29166

SEQ ID NO: 29465 - DNA, 2937 bp, Escherichia coli P4-NR; identical to SEQ ID NO: 29167

SEQ ID NO: 29466 - DNA, 6315 bp, Escherichia coli PA10; identical to SEQ ID NO: 28464

SEQ ID NO: 29467 - DNA, 1548 bp, Escherichia coli PA10
atgctggaaaataccgttgatttacgggtctcctggaaagatggttctaatcttaaactattattacctaagccggttagcggtggccgatttgtaactaatgatggttctgttcattttgatggtgtggcatctatagcacatttgcatggaatagatgctgagttattaaccatatcatgtgctggaagaggatatcttaatatcgagttattggatgaaaatccagtagctgaaaaattccgctatttacatgccgaccttcctcttttatcaggacgcaatgacaaattacaacaaatttcactttatgagaactataatttgctaaatgctatgctggcatgtgcatggaacagcaatagtacattatgtgttgatttttactctgacagatttggaaaggataaagcaacactcaatattaaacgctacgatggtagttttattgaacacgatcaagggttactggttgatataaaaaattctgttgtttttcctgcaaatagaatagacgaactggttgttgatgctatttctcttaagaatcctggcttacacatatcattgttaaaaaaagatgagtttgcttatgatctttcagctctgaatgttcaggatagtccatggttaattgtgggaaaacttgatggtacagctcgcattgcaccagtaattaaatggatgctacctgtattgcagacaaatgatttattactaaatgctctatgcgaagcagacccagaacagcgcaaaaaaaattttaatgagctaatttttgaaatagataacaacccattgcaaaattattgctgtttattaacagagtatattaagaaatacaaaatgaataatggcttatccttgctggatctggacttgttcagaggtatttcgagtaattaccgcgtggttgttcaattgttaatatcatcatgtctttctggtgatagcgatacgatttatgatatacaggaagaattacccttttcatggggatggattcccgtttcaatctggaaagatgttttccaaaaatgttggacttatctggagaaacagattaacgataaaacattagcattacatatattgcaaccctttattgcttttatgaaccatcgtgcacatatcgatcgtcggctggctccgattgcgaatatgttacttacatatagtgagagcctaccaaccggttgtgatgtattgccaactgttagtcgtgagcagtttaatgaagctaaacagatgctattaaggaaccccgacagctttgggcgtatcagtatcttccctaaagaactttggtctagtgctattactccagagttaaaatctgtttttaataagctttggattgaagataaatatcactcacggcttgaaaaacgttttaatttgatgttagtcgcagcgctgttaacccaaaaagataataacctgatacatcaactgtctgcgctttttgaatttcactatcagcaagccccacagcaattaggggtaatctatcaatattattttgaacaagcaggagtatgtcattga

SEQ ID NO: 29468 - DNA, 6315 bp, Escherichia coli PA11; identical to SEQ ID NO: 28464

SEQ ID NO: 29469 - DNA, 2937 bp, Escherichia coli PA11; identical to SEQ ID NO: 28445

SEQ ID NO: 29470 - DNA, 6315 bp, Escherichia coli PA13; identical to SEQ ID NO: 28540

SEQ ID NO: 29471 - DNA, 3360 bp, Escherichia coli PA13
ttgcttgtgaaaactccagttaacccacttttgcaatggcttaacatgttttttagtcgccgttcattatccggagctgatggacgggcgttatatgcttaccgttgtactgatacagagtacgaaagtttggcagaactactgcgtacatatgccccccgtagttatccaagaacgatattcatttcctatagcgatgttctatttagcatatatgccgcagagtttatccgccggactcatacggtcggacaccctaaatgggacacaattttagattctattaactggaaagttccgtatgttcatcgacagaagctggttaatgatggcattcgctactggaaaagaaagataagaaacctgggacaagcttcgggttatctgcatacactggcttgtgaaggtggtttgcctatccgcatgattgaaaatgagagcggttatttgattacctatttcagaaggatatatcaggcgcttcgtgggcaatcatctcaatatcctgccgctaaaattgcacaagaattaggcgatacgattcctgtcacaatgcaaaacgaactggtctatgaaatagccggtgaattctgcgagactctctgccgattacttagtgagcatcctcctcatagcagtgatcccgtttctgcattacgtaagctctctccagactggcatcttcaacttccactcgttctccccgaagcgaatgctgcagagattgtaaggcgattactttctcaatcttctgaaatacgcagtgcaagtagtcttcaggttgaaagaatctgggtcgatgttgatgacagttggtattgcgatgcccggttccgattcccggccacaatgcgtacagaacagttaacctctttgtttgaatgccatattcagccggagcagacccgactcatcatttcaggaaaatggaaaaatggcggggcaaggttggcaatgctaagccgttatgagcagcaagattggcgggtcgagttattacctattgcgatgcaaaaactctctggtgcagatgcaatggccgaaatctcattgtcgcttcatgaaggtccaattctgttaggtcacacaattccaaaaggcggttatgaacttactgaagaacttccctgggtttttgaagcgatgaatgagagtgaatcgcagctaaaacttgttggtatggggtctgtgagttccaggctaaatgctctgtttatttcgctaccgaaaaatagccatttagatattagtggagaaggtgagtttgatatcccaaggttgctgaaaaacagtgaacgcagcttaactaaaataagtggagtatttagcgttgttttacatgatggtgctgtttgtacaattcgcacccagcaactttatgattctgcgattgaatattatattaaatcgacagaagttgaactggttaaatcggattatcctgtccatcgagcctggccgaagatcggttggaaaaaggatctgcaatatggcattgtaccggagaaagaacttttttggcgttccattcgttcaggtaataatgcctggtattctgtcgcatcagaaatgccaaaaggacagatagaagtccggcgaatagttaatgatgaggttttatttagcggtaaagttgtagttttaccagcagacttcgatattaatattatacctgagagtgctcagcaaggcattattatgctttctggtataacggatactagaattgataaatattcaaacaatgaaaaagtaacacttaagtccgattattcacaaaacgagtgtgctatttattataattcatcgctgatgctggaaaataccgttgatttacgggtctcctggaaagatggttctaatcttaaactattattacctaagccggttagcggtggccgatttgtaactaatgatggttctgttcattttgatggtgtggcatctatagcacatttgcatggaatagatgctgagttattaaccatatcatgtgctggaagaggatatcttaatatcgagttattggatgaaaatccagtagctgaaaaattccgctatttacatgccgaccttcctcttttatcaggacgcaatgacaaattacaacaaatttcactttatgagaactataatttgctaaatgctatgctggcatgtgcatggaacagcaatagtacattatgtgttgatttttactctgacagatttggaaaggataaagcaacactcaatattaaacgctacgatggtagttttattgaacacgatcaagggttactggttgatataaaaaattctgttgtttttcctgcaaatagaatagacgaactggttgttgatgctatttctcttaagaatcctggcttacacatatcattgttaaaaaaagatgagtttgcttatgatctttcagctctgaatgttcaggatagtccatggttaattgtgggaaaacttgatggtacagctcgcattgcaccagtaattaaatggatgctacctgtattgcagacaaatgatttattattaaatgctctatgcgaagcagacccagaacagcgcaaaaaaaattttaatgagctaatttttgaaatagataacaacccattgcaaaattattgctgtttattaacagagtatattaagaaatacaaaatgaataatggcttatccttgctggatctggacttgttcagaggtatttcgagtaattaccgcgtggttgttcaattgttaatatcatcatgtctttctggtgatagcgatacgatttatgatatacaggaagaattacccttttcatggggatggattcccgtttcaatctggaaagatgttttccaaaaatgttggacttatctggagaaacagattaacgataaaacattagcattacatatattgcaaccctttattgcttttatgaaccatcgtgcacatatcgatcgtcggctggctccgattgcgaatatgttacttacatatagtgagagcctaccaaccggttgtgatgtattgccaactgttagtcgtgagcagtttaatgaagctaaacagatgctattaaggaaccccgacagctttgggcgtatcagtatcttccctaaagaactttggtctagtgctattactccagagttaaaatctgtttttaataagctttggattgaagataaatatcactcacggcttgaaaaacgttttaatttgatgttagtcgcagcgctgttaacccaaaaagataataacctgatacatcaactgtctgcgctttttgaatttcactatcagcaagccccacagcaattaggggtaatctatcaatattattttgaacaagcaggagtatgtcattga

SEQ ID NO: 29472 - DNA, 6315 bp, Escherichia coli PA14; identical to SEQ ID NO: 28464

SEQ ID NO: 29473 - DNA, 2937 bp, Escherichia coli PA14; identical to SEQ ID NO: 28445

SEQ ID NO: 29474 - DNA, 6315 bp, Escherichia coli PA15; identical to SEQ ID NO: 28464

SEQ ID NO: 29475 - DNA, 2937 bp, Escherichia coli PA15; identical to SEQ ID NO: 28445

SEQ ID NO: 29476 - DNA, 6315 bp, Escherichia coli PA19; identical to SEQ ID NO: 28636

SEQ ID NO: 29477 - DNA, 2937 bp, Escherichia coli PA19; identical to SEQ ID NO: 28445

SEQ ID NO: 29478 - DNA, 6315 bp, Escherichia coli PA2; identical to SEQ ID NO: 28540

SEQ ID NO: 29479 - DNA, 3360 bp, Escherichia coli PA2; identical to SEQ ID NO: 28813

SEQ ID NO: 29480 - DNA, 6315 bp, Escherichia coli PA22; identical to SEQ ID NO: 28494

SEQ ID NO: 29481 - DNA, 2949 bp, Escherichia coli PA22; identical to SEQ ID NO: 28645

SEQ ID NO: 29482 - DNA, 6315 bp, Escherichia coli PA23; identical to SEQ ID NO: 28464

SEQ ID NO: 29483 - DNA, 2937 bp, Escherichia coli PA23; identical to SEQ ID NO: 28445

SEQ ID NO: 29484 - DNA, 6315 bp, Escherichia coli PA24; identical to SEQ ID NO: 28636

SEQ ID NO: 29485 - DNA, 2937 bp, Escherichia coli PA24; identical to SEQ ID NO: 28445

SEQ ID NO: 29486 - DNA, 6315 bp, Escherichia coli PA25; identical to SEQ ID NO: 28636

SEQ ID NO: 29487 - DNA, 2937 bp, Escherichia coli PA25; identical to SEQ ID NO: 28445

SEQ ID NO: 29488 - DNA, 6315 bp, Escherichia coli PA28; identical to SEQ ID NO: 28540

SEQ ID NO: 29489 - DNA, 2937 bp, Escherichia coli PA28; identical to SEQ ID NO: 28957

SEQ ID NO: 29490 - DNA, 6315 bp, Escherichia coli PA3; identical to SEQ ID NO: 28636

SEQ ID NO: 29491 - DNA, 2937 bp, Escherichia coli PA3; identical to SEQ ID NO: 28445

SEQ ID NO: 29492 - DNA, 6315 bp, Escherichia coli PA31; identical to SEQ ID NO: 28464

SEQ ID NO: 29493 - DNA, 2937 bp, Escherichia coli PA31; identical to SEQ ID NO: 28445

SEQ ID NO: 29494 - DNA, 6315 bp, Escherichia coli PA32; identical to SEQ ID NO: 28464

SEQ ID NO: 29495 - DNA, 2937 bp, Escherichia coli PA32; identical to SEQ ID NO: 28445

SEQ ID NO: 29496 - DNA, 6315 bp, Escherichia coli PA33; identical to SEQ ID NO: 28464

SEQ ID NO: 29497 - DNA, 2937 bp, Escherichia coli PA33; identical to SEQ ID NO: 28445

SEQ ID NO: 29498 - DNA, 6315 bp, Escherichia coli PA34; identical to SEQ ID NO: 28540

SEQ ID NO: 29499 - DNA, 2937 bp, Escherichia coli PA34; identical to SEQ ID NO: 28445

SEQ ID NO: 29500 - DNA, 6315 bp, Escherichia coli PA35; identical to SEQ ID NO: 28636

SEQ ID NO: 29501 - DNA, 2937 bp, Escherichia coli PA35; identical to SEQ ID NO: 28445

SEQ ID NO: 29502 - DNA, 6315 bp, Escherichia coli PA38; identical to SEQ ID NO: 28464

SEQ ID NO: 29503 - DNA, 3360 bp, Escherichia coli PA38; identical to SEQ ID NO: 28813

SEQ ID NO: 29504 - DNA, 6315 bp, Escherichia coli PA39; identical to SEQ ID NO: 28540

SEQ ID NO: 29505 - DNA, 702 bp, Escherichia coli PA39; identical to SEQ ID NO: 28777

SEQ ID NO: 29506 - DNA, 6315 bp, Escherichia coli PA4; identical to SEQ ID NO: 28464

SEQ ID NO: 29507 - DNA, 2937 bp, Escherichia coli PA4; identical to SEQ ID NO: 28445

SEQ ID NO: 29508 - DNA, 6315 bp, Escherichia coli PA42; identical to SEQ ID NO: 28464

SEQ ID NO: 29509 - DNA, 2937 bp, Escherichia coli PA42; identical to SEQ ID NO: 28445

SEQ ID NO: 29510 - DNA, 6315 bp, Escherichia coli PA45; identical to SEQ ID NO: 28464

SEQ ID NO: 29511 - DNA, 2937 bp, Escherichia coli PA45; identical to SEQ ID NO: 28445

SEQ ID NO: 29512 - DNA, 6315 bp, Escherichia coli PA47; identical to SEQ ID NO: 28636

SEQ ID NO: 29513 - DNA, 2937 bp, Escherichia coli PA47; identical to SEQ ID NO: 28445

SEQ ID NO: 29514 - DNA, 6315 bp, Escherichia coli PA48; identical to SEQ ID NO: 28644

SEQ ID NO: 29515 - DNA, 2937 bp, Escherichia coli PA48; identical to SEQ ID NO: 28445

SEQ ID NO: 29516 - DNA, 6315 bp, Escherichia coli PA49; identical to SEQ ID NO: 28464

SEQ ID NO: 29517 - DNA, 2937 bp, Escherichia coli PA49; identical to SEQ ID NO: 28445

SEQ ID NO: 29518 - DNA, 6315 bp, Escherichia coli PA5; identical to SEQ ID NO: 28464

SEQ ID NO: 29519 - DNA, 2937 bp, Escherichia coli PA5; identical to SEQ ID NO: 28445

SEQ ID NO: 29520 - DNA, 6315 bp, Escherichia coli PA7; identical to SEQ ID NO: 28464

SEQ ID NO: 29521 - DNA, 2937 bp, Escherichia coli PA7; identical to SEQ ID NO: 28445

SEQ ID NO: 29522 - DNA, 6315 bp, Escherichia coli PA8; identical to SEQ ID NO: 28540

SEQ ID NO: 29523 - DNA, 2937 bp, Escherichia coli PA8; identical to SEQ ID NO: 28445

SEQ ID NO: 29524 - DNA, 6315 bp, Escherichia coli PA9; identical to SEQ ID NO: 28540

SEQ ID NO: 29525 - DNA, 2937 bp, Escherichia coli PA9; identical to SEQ ID NO: 28445

SEQ ID NO: 29526 - DNA, 6315 bp, Escherichia coli SMS-3-5; identical to SEQ ID NO: 28572

SEQ ID NO: 29527 - DNA, 3360 bp, Escherichia coli SMS-3-5
ttgcttgtgaaaactccagttaacccacttttgcaatggcttaacatgttttttagtcgccgttcattatccggagctgatggacgggcgttatatgcttaccgttgtactgatacagagtacgaaagtttggcagaactactgcgtacatatgccccccgtagttatccaagaacgatattcatttcctatagcgatgttctatttagcatatatgccgcagagtttatccgccggactcatacggtcggacaccctaaatgggacacaattttagattctattgactggaaagttccgtatgttcatcgacagaagctggttaatgatggcattcgctactggaaaagaaagataagaaacctggggcaagcttcgggttatctgcatacactggcttgtgaaggtggtttacctatccgcatgattgaaaatgagagcggttatttgattacctatttcagaaggatatatcaggcgcttcgtgggcaagcatctcaatatcctgccgctaaaattgcacaagaattaggcgatacgattcctgtcacaatgcaaaacgaactggtctatgaaatagccggtgaattctgcgagactctctgccgattacttagtgagcatccacctcaaagcagtgatcccgtttctgcattacgtaagctctctccagactggcaccttcaacttccactcgttctccccgaagcgaatgctgcagagattgtaaggcgattactttctcaatcttctgaaatacgcagtgcaagtagtcttcaggttgaaagaatctgggtcgatgttgatgacagttggtattgtgatgcccggttccgattcccggccacaatgcgtacagaacagttaacctctttgtttgaatgcaatattcagccggagcagacccgactcatcatttcaggaaaatggagaaatggcggggcaaggttggcaatgctaagccgttatgagcagcaagattggcgggtcgagttattacctattgcgatgcaaaagctctctggtgcagatgcaatggccgaaatctcgttgtcgcttcatgaaggtccaattctgttaggccacacaattccaaaaggcggttatgaacttactgaagaactcccctgggtttttgaagcgatgaatgagagtgaatcgcagctaaaacttgtcggtatggggtctgtgagttccaggctaaatgctctgtttatttcgctaccgaaaaatagccatttagatattagtggagaaggtgagtttgatatcccaaggttgctgaaaaacagtgaacgcagcttaactaaaataagtggagtatttagcgttgttttacatgatggtgcagtttgtacaattcgcacccagcaactttatgattctgcgattgaatattatattaaatcgacagaagttgaactggttaaatcggattatcctgtccatcgagcctggccgaagatcggttggaaaaaggatctgcaatatggcattgtaccggagaaagaacttttttggcgttccattcgttcaggtaacaatgcctggtattctgtcgcatcaaaaatgccaaaaggacagatagaagtcagacgaatagttaatgatgaggttttatttagcggtaaagttgtagttttaccagctgacttcgatattaatattatacctgagagtgctcagcaaggcatcataatgctttctggtataacggatactagaattgacaaatattcaaacaatgaaaaagtaacacttaagtccgattattcacaaaacgagtgtgctatttattataattcatcggagatgctggaaaataccgttgatttacgggtctcctggaaagatggttctaatcttaaactattattacctaagccggttagcggtggccgatttgtaactcatgatggttctgttcattttgatggtgtggcatctatagcgcatttgcatggaatagatgctgagttgttaaccatatcttgtgctggaagaggatatcttaatatcgagttgttggatgaaaatccagtagctgaaaaattccgttatttacatgccgaccttcctcttttatcaggatgcaatgacaaattaaaacaaatttcactttatgagaactataatttgctaaatgctatgctggcatgtgcatggagcagcaatagtacattatgtgttgatttttactctgacagatttggaaaggataaagcaacactcagtattaaacgctacgatggtagttttattgaacacgatcaagggttactggttgatataaaaaattctgttgtttttcctgcaaatagaatagacgagctggttgttgatgctatttctcttaaggatcctggcttacacatatcgttgctaaaaaaagatgaatttgcttatgatctttcagctctgaatgttcaggatagcccatggttaattgtggggaaacttgatggtacagctcgcattgcaccagtaattaaatgggggctacctgtattacagacaaatgatttattacttaatgctctatgcgaagcggattccgaacagcgaaaaaaatattttaatgagctaatttttgaaatagataacaatcctttgcaaaattattgctgtttattaacggagtatattaagaaatacaaaatgaataatggcttatccttgctggatctggatttgttcagaggtatttcgagtaattaccgcgtagttgttcagttgttaatatcatcatgtctttctggtgatagcgatacgatttatgatatacaggaagaattacccttttcatggggatggattcccgtttcaatctggaaagatgtttttcaaaagtgttgggcttatctggaaaaacagattaacgataaaacattagcattacatatattgcaaccctttattgcttttatgaaccatcgtgcacatatcgatcgtcgtctggctcccattgcgaatatgttacttacatatagcaaactcctaccagccggttgtaatgtcttgccaactgttagtcgtgagcagtttaatgaagctaaacagatgctattaaggaaccccgacagctttgggcgtatcagtatcttccctaaagaactttggtctagtgcgattactccagagttaaaatctgtttttaataagctttggattaaaaataaatatcactcacggcttgaaaaacgttttaatttgatgttagtcgcagcgctgttaacccaaaaagataataacttgatacatcaactgtctgcgctttttgaattccactatcagcaagccccgcagcaattaggggtaatctatcaatattattttgaacaagcaggagtatgtcattga

SEQ ID NO: 29528 - DNA, 6315 bp, Escherichia coli T1282_01
atggacgttcagcaactgcattatgcgccacttctaaatcagcttcatcagcgtgcggtgaggtcggtggtaagtcagttggcattgcggagcaagtcgttgactcattatctggaatcacaatattttcagcctcccggtcaggaggggtcactgcttgcagacccggtattcgaaagtacattcggctggatgcctgcggatgaaacaatggaggatttgcgggacaagctgatctccagcccgctggttgatgcattgagcaaagcgccagtgccatttcgtcatcaacttactgcgtggcgaacgattctggaagacaaaaaatccttgttagtgagcagcggtacgggatccgggaaaacagaatgctttatggtaccggttctggaagatcttattcgtcagcaaaaatcgacccgccagtcactaacagggacacaagctattttcttgtatccgttaaatgcattaattaacagccaacaggagcggcttcgcgaatggacgcgcggatttaaggggaaaatacgcttcgcgctatataatggcgaaacccggcataccaaatacgaaattcaggaagatcagttgaaagtacctgaacaagctttgagtcgggaagccatttatgaagcaccaccttccatcatggtgacgaataccaccatgctggaatatatgctgattcgtcgtaaagatgccccaatcatcgaaaagtctcaggggatgttaaagtatatcgtcctggatgaagcccatagttatattggttctcaggctgctgagttagcgctgcttttacgtcgtgttatgcaggctttcaatgttggacccggcacagataaacctgtgcagattatcgcgacctctgccactattggtgaagactctcctgaaggtaataaggagcttgctaaatttgtcgctgatctcgcgggcgttacagaacgtgatgtcaaagtggttcgcggttatcgacaaataccgcgggtatcggagtcgctgattcgtcatgaataccccacatctttaacttctcttaaatccctgagccctcaggatctttaccaacagctttgtcattaccgtgtggcccagcaattgcgtcaggcgttaactcatcccggacggcaggcagtacgtttgagtgagttgctcaatgttgccagaagaacctggccagatattaatcaccgtgagctactgcaactcctcgatctaatggcaagatcgcgagaaggtgaactggcttttacgccattacgtatgcatgggtttatcagaacactggcgggtctatgggcatgttcaaacaaacaatgctcacataaagcacatgaattaaatcagagtgactggccatttggtcaggtatggtttgagcagcgccaatattgtgactgtggagcgccggtatttgaagttttacgttgctccgggtgtggttcagcttatttgtctgccaaagaggagatgcgcggtgatggaacgaactggttggtagcgcaaccagccgctgccgaagtggatgagtttgctcttgatgtagatgtttattctgaagatgaagacaacgacgaattagacaataactctcaatttgatcgtctgattgcgagcgatggtgaaaaatatatcatttcactggaagaaacgacggcggggaaaattgatagtgaagcgcaaaagcactatgaaataaacctgttaagaccggaatctcgaggtgagggacgcaataactcctttgcttgtgtttgctgtggtgacactcaacggaaaaataatcctttattccgtccgcttcggctcggcgcgcccttttttttaaatgaaattattcctactctgctggagttttctccattaccgcaaacaagagaagagcagttaggaccgtttaatggtcgacgcttgctcacctttacggattcgcgtcagggtaccgctcgcatttcagcccgcttacagcaggatgccgataaagcgacgttgcgagctctttgttaccaggagctggcaaatattacagagccttcagcaaaactcagcccggcacactgtgcactgttagagaaagttattagccagttttctgtcctccctttaaaaaattccatcgacgcgctgaaaaaagcgatggctgcgaatgaggagcttagcccgacggacattcaggcacttaaaattattgagccgatggtgagttccttaagcacggagcatgctgaagcgatgcaaatacttcaggctaactctggcaatcagcagaagaaaaccatgtcatggcaaacgctgtctgaacagctggttggcagtgtggaccttgccgatagaatgagaggcagttttaaagaattgtctgggcttgatcttactaaacaacagtttgcagatttttgtttatacagcgagtttggtcgccgccctaaaaatgcctggaccctcgaaagtctgggtctggtagccattcactatccattcattgataaagttacaacctgcccgcaggactggaagacattattacccgatcccgataagcaattagcggaatggcgtaatttattgaagattactcttgatttctttatccgtgaaaacagtgccgttttttacgaaaacgagcaataccctcgctggatgggggcacgtttcccggtaaaaatgctccaggggccagataaaaaaaacaaagggcagaaacgtgatcaactttggccacaaatacgcgatcgccattataaccgggtcattaagctattaatcgcagtctttccggcaatacaacctgagcaggctcactggaaatcgttagttaaccacttaatgattgaggtctgggatgcaattcgaccctgcttacgtcagtttgagtcgggttatcagctggatattaaacaacaagctgaattttacagtccaaagcaagtgtggcgttgcccctatactcgacgtgcgttagacgtcacgttgctgggatactctccgtatttgccgggtagcaaagaaattgcacctgaaaaagcagtgttgattgaaatgcctgagcttcctgtacgtcactggcgtttgtctggtggtggagaaatcgcccgagaagaacgtctggagtggctggaaagtaatgcgctgattcaacatgcccgcgaggaaggattatggtctactcgcagcgaccgactggccctgaaagatagctggtatcgtctggaggaacactctgcgcagagaacgcctgagcagaaccagtttaatgaaaaacaatttaagtcaggcaaagttaatgtgctgaactgttccacgaccatggagatgggggtggatattggtggtatgagtttggtggcaatgaacaacgttcctccagcgccggcaaattatttgcaacgtgcaggtcgcgcggggcgtcgtggagagagtgcatctgctgccattacgttatgtaaaaacacggcgcatggaatggaggtattcaaagaccccctctgggcgttcaacactactgccagtgcgccacgggttcgttttgggagcagtagtattgttcaacgacatgttaatgccctggttttaggtctgtttttacgagctgaagttcctgatgcgacaaaactgagttgcaaatggttctttgaaggtgatgagagccagtgtcttcgttttctccattggttaaatcaccaggccgatcagctggcggataaacttaaacgccttactcagggaaccgtactgatgtcattgacggcaacccagctcttgacccgcacacaagcaatgatgcagcaggttgatatccgctggagaagccaacttgcgatactgttggaaaatatcgaagcgttgaaggcggataacagcgcgtgggaagaaacaccagcaggtaaagccatcgcttatcagcttcgtgattatcgcggtgcatatctgttttctaaactcattagtgaagcgttcctgccggggcatggtttcccggttggcgtagtcaatttcaattatctgacggcagatgagctggaaaaacgtcgcgcaataaaagccactcaggctgaccctaatgaagggggagaaagcttttctcgtcgtattgaaaaattgcccagccgtgatttgcctacagcattacgcgagtatgcgcctggtgcagatgtggtattgggcggaaaagtatatcgttcctcgggcattatgcttggcaaggtgcttgccagcgggcaggagctgtcaggcgatcatcatattccgtggttctggcattgccgtaaatgtggtgcgggggcaaccagtactacccatcctgtcgaatgtagtcactgcaaagcggatatacagcaacttgatgtgaagcgttatttacagcctgttggttttgcgacagatattcgttatcaggcacataatgatgtatccatgcctgcacaacttccctggaaagatccacgtgttcttgtaccgtcttcggtgtgggtttctttacccgatgctgggctaggacgttaccgttttagccatagtggggaattgttccacttcagtgaaggggaatttgggcacggctacgcaatttgcctctcatgtggtcgggcagaatctcaaactcaaccccagcgtacccctgaaaatctaaagaacccagagagggaaaatacgcattacctgttgcgagggggcagtaacgatcgtcaggggagcaataaattgtgccacggtcatgtgcataaagatctgtggttgggatatagcagtcgtacagatatggttgagctgcaactcaatgatgataatggcctgttgatccgtgatgaggttgccgcgcgttcccttgcggtcgctttgcgtgaagggttagcgcataaattgggtatcgaaaatactgagctgggcgtgacgacgcagcaagcgcgcgatatcaatggctataccggatattccatcttcatttacgacaataatgcgggtggtgcaggttatgcagtgcaattgatcgaccattgggctgatgtctttaattacgccagaaaattgctcgattgcagttgcgataaattctgtcaccactgcttgctcagctacgacagtcagcattatgtcaacagattagatcgtcaccatgcattaaccctgcttaccaatgtacggttgcagcgacttaacctcgcgccagaatatcagtacttcggcgatggtagccgggttgaaactaaccctctgagtttacgtattgcgcaatgcctgaacagcgatatttatgactcctgctcgctggttcttgcggggccgcaggaacagtgggactttgcccaatggccattatttaaagagttgctccagtttgcctcctccggtgggaatgttgagttgctggtggccacgccgctggcaaacttaactgatagctccagacatcagctttccgcgttggcggcgatgccgggaggtcgcttacaagtgaaatccattgccactgcgcagctcatgcaaggaaaggggcgctggcttgcgcaggtgactcgcgaagggcaaagccaacagtgggccgcagacgacagcgctaccgttgcacctggtgaattatggggacaaagtgcgtcttcaccagtagtgacacttaaaggaacgtccggaaaaaccttctcgggtcagaccttaagtgcagaagatttactgcccgccttacccaccggggcggtgcgcatcaatctctgtgaacaactggacgggccgctggaaggttttggttcgcgtttctggtcgttagtcacgcaacagcacgctggctggaagcaggcatttacccgccacaaagagataacgcatgttgagtacagcgatcgttatcttaatagcccattcacggcgcgtttgttaggtgaaatcttaaccgagctggttgaacagggaatggcggaacgcgccagcctcactgtttgcgtcaaaaaattggattacaactctcgccaacacgacgctctctataacgcgtggcttaatgaggaagatcgtcagcaggttgtgaccactttacttgaagaaggatatctggggcctgcgtggccgggagcaattagctggttaacgggggataaccagagtacggagcatggacgagaactgacagtcaccttcagcgatggcagtcagcattatgtcctgctcgacatggggcttagctactggcgctgtattgaagataccttctttgattttgccctgcgagtaccgcagcaagttgaacggctggcaaacacgcgagcgcgagctgttgccccgggtaatgaccttaggagttatattatcgctggataa

SEQ ID NO: 29529 - DNA, 2937 bp, Escherichia coli T1282_01; identical to SEQ ID NO: 28445

SEQ ID NO: 29530 - DNA, 6315 bp, Escherichia coli T1840_97; identical to SEQ ID NO: 28636

SEQ ID NO: 29531 - DNA, 2937 bp, Escherichia coli T1840_97; identical to SEQ ID NO: 28445

SEQ ID NO: 29532 - DNA, 6315 bp, Escherichia coli T234_00; identical to SEQ ID NO: 28464

SEQ ID NO: 29533 - DNA, 864 bp, Escherichia coli T234_00; identical to SEQ ID NO: 28823

SEQ ID NO: 29534 - DNA, 6315 bp, Escherichia coli T924_01; identical to SEQ ID NO: 28464

SEQ ID NO: 29535 - DNA, 2937 bp, Escherichia coli T924_01
atgattgaaaatgagagcggttatttgattacctatttcagaaggatatatcaggcgcttcgtgggcaatcatctcaatatcctgccgctaaaattgcacaagaattaggcgatacgattcctgtcacaatgcaaaacgaactggtctatgaaatagccggtgaattctgcgagactctctgccgattacttagtgagcatcctcctcatagcagtgatcccgtttctgcattacgtaagctctctccagactggcatcttcaacttccactcgttctccccgaagcgaatgctgcagagattgtaaggcgattactttctcaatcttctgaaatacgcagtgcaagtagtcttcaggttgaaagaatctgggtcgatgttgatgacagttggtattgcgatgcccggttccgattcccggccacaatgcgtacagaacagttaacctctttgtttgaatgccatattcagccggagcagacccgactcatcatttcaggaaaatggaaaaatggcggggcaaggttggcaatgctaagccgttatgagcagcaagattggcgggtcgagttattacctattgcgatgcaaaaactctctggtgcagatgcaatggccgaaatctcattgtcgcttcatgaaggtccaattctgttaggtcacacaattccaaaaggcggttatgaacttactgaagaacttccctgggtttttgaagcgatgaatgagagtgaatcgcagctaaaacttgttggtatggggtctgtgagttccaggctaaatgctctgtttatttcgctaccgaaaaatagccatttagatattagtggagaaggtgagtttgatatcccaaggttgctgaaaaacagtgaacgcagcttaactaaaataagtggagtatttagcgttgttttacatgatggtgctgtttgtacaattcgcacccagcaactttatgattctgcgattgaatattatattaaatcgacagaagttgaactggttaaatcggattatcctgtccatcgagcctggccgaagatcggttggaaaaaggatctgcaatatggcattgtaccggagaaagaacttttttggcgttccattcgttcaggtaataatgcttggtattctgtcgcatcagaaatgccaaaaggacagatagaagtccggcgaatagttaatgatgaggttttatttagcggtaaagttgtagttttaccagcagacttcgatattaatattatacctgagagtgctcagcaaggcattattatgctttctggtataacggatactagaattgataaatattcaaacaatgaaaaagtaacacttaagtccgattattcacaaaacgagtgtgctatttattataattcatcgctgatgctggaaaataccgttgatttacgggtctcctggaaagatggttctaatcttaaactattattacctaagccggttagcggtggccgatttgtaactaatgatggttctgttcattttgatggtgtggcatctatagcacatttgcatggaatagatgctgagttattaaccatatcatgtgctggaagaggatatcttaatatcgagttattggatgaaaatccagtagctgaaaaattccgctatttacatgccgaccttcctcttttatcaggacgcaatgacaaattacaacaaatttcactttatgagaactataatttgctaaatgctatgctggcatgtgcatggaacagcaatagtacattatgtgttgatttttactctgacagatttggaaaggataaagcaacactcaatattaaacgctacgatggtagttttattgaacacgatcaagggttactggttgatataaaaaattctgttgtttttcctgcaaatagaatagacgaactggttgttgatgctatttctcttaagaatcctggcttacacatatcattgttaaaaaaagatgagtttgcttatgatctttcagctctgaatgttcaggatagtccatggttaattgtgggaaaacttgatggtacagctcgcattgcaccagtaattaaatggatgctacctgtattgcagacaaatgatttattactaaatgctctatgcgaagcagacccagaacagcgcaaaaaaaattttaatgagctaatttttgaaatagataacaacccattgcaaaattattgctgtttattaacagagtatattaagaaatacaaaatgaataatggcttatccttgctggatctggacttgttcagaggtatttcgagtaattaccgcgtggttgttcaattgttaatatcatcatgtctttctggtgatagcgatacgatttatgatatacaggaagaattacccttttcatggggatggattcccgtttcaatctggaaagatgttttccaaaaatgttggacttatctggagaaacagattaacgataaaacattagcattacatatattgcaaccctttattgcttttatgaaccatcgtgcacatatcgatcgtcggctggctccgattgcgaatatgttacttacatatagtgagagcctaccaaccggttgtgatgtattgccaactgttagtcgtgagcagtttaatgaagctaaacagatgctattaaggaaccccgacagctttgggcgtatcagtatcttccctaaagaactttggtctagtgctattactccagagttaaaatctgtttttaataagctttggattgaagataaatatcactcacggcttgaaaaacgttttaatttgatgttagtcgcagcgctgttaacccaaaaagataataacctgatacatcaactgtctgcgctttttgaatttcactatcagcaagccccacagcaattaggggtaatctatcaatattattttgaacaagcaggagtatgtcattga

SEQ ID NO: 29536 - DNA, 6315 bp, Escherichia coli TA143; identical to SEQ ID NO: 28606

SEQ ID NO: 29537 - DNA, 3360 bp, Escherichia coli TA143
ttgcttgtgaaaactccagttaacccacttttgcaatggcttaacatgttttttagtcgccgttcattatccggagctgatggacgggcgttatatgcttaccgttgtactgatacagagtacgaaagtttggcagaactactgcgtacatatgccccccgtagttatccaagaacgatattcatttcctatagcgatgttctatttagcatatatgccgcagagtttatccgccggactcatacggtcggacaccctaaatgggacacaattttagattctattgactggaaagttccgtatgttcatcgacagaagctggttaatgatggcattcgctactggaaaagaaagataagaaacctggggcaagcttcgggttatctgcatacactggcttgtgaaggtggtttacctatccgcatgattgaaaatgagagcggttatttgattacctatttcagaaggatatatcaggcgcttcgtgggcaagcatctcaatatcctgccgctaaaattgcacaagaattaggcgatacgattcctgtcacaatgcaaaacgaactggtctatgaaatagccggtgaattctgcgagactctctgccgattacttagtgagcatccacctcaaagcagtgatcccgtttctgcattacgtaagctctctccagactggcatcttcaacttccactcgttctccccgaagcgaatgctgcagagattgtaaggcgattactttctcaatcttctgaaatacgcagtgcaagtagtcttcaggttgaaagaatctgggtcgatgttgatgacagttggtattgtgatgcccggttccgattcccggccacaatgcgtacagaacagttaacctctttgtttgaatgcaatattcagccggagcagacccgactcatcatttcaggaaaatggagaaatggcggggcaaggttggcaatgctaagccgttatgagcagcaagattggcgggtcgagttattacctattgcgatgcaaaagctctctggtgcagatgcaatggccgaaatctcgttgtcgcttcatgaaggtccaattctgttaggccacacaattccaaaaggcggttatgaacttactgaagaactcccctgggtttttgaagcgatgaatgagagtgaatcgcagctaaaacttgtcggtatggggtctgtgagttccaggctaaatgctctgtttatttcgctaccgaaaaatagccatttagatattagtggagaaggtgagtttgatatcccaaggttgctgaaaaacagtgaacgcagcttaactaaaataagtggagtatttagcgttgttttacatgatggtgcagtttgtacaattcgtacccagcaactttatgattctgcgattgaatattatattaaatcgacagaagttgaactggttaaatcggattatcctgtccatcgagcctggccgaagatcggttggaaaaaggatctgcaatatggcattgtaccggagaaagaacttttttggcgttccattcgttcaggtaacaatgcctggtattctgtctcatcagaaatgccaaaaggacagatagaagtcagacgaatagttaatgatgaggttttatttagcggtaaagttgtagttttaccagcagacttcgatattaatattatacctgagagtgctcagcaaggcatcataatgctttctggtataacggatactagaattgacaaatattcaaacaatgaaaaagtaacacttaagtccgattattcacaaaacgagtgtgctatttattataattcatcggagatgctggaaaataccgttgatttacgggtctcctggaaagatggttctaatcttaaactattattacctaagccggttagcggtggccgatttgtaactcatgatggttctgttcattttgatggtgtggcatctatagcgcatttgcatggaatagatgctgagttgttaaccatatcttgtgctggaagaggatatcttaatatcgagttgttggatgaaaatccagtagctgaaaaattccgttatttacatgccgaccttcctcttttatcaggatgcaatgacaaattaaaacaaatttcactttatgagaactataatttgataaatgctatgctggcatgtgcatggaacagcaatagtacattaagtgttgatttttactctgacagatttggaaaggataaagcaacactcagtattaaacgctacgatggtagttttattgaacacgatcaagggttactggttgatataaaaaattctgttgtttttcctgcaaatagaatagacgaactggttgttgatgctatttctcttaaggatcctggcttacacatatcgttgctaaaaaaagatgaatttgcttatgaactttcagctctgaatgttcaggatagcccatggttaattgtgggaaaacttgatggtatagctcgcattgcaccagtaattaaatgggtgctacctgtattacagacaaatgatttattactaaatgctttatgcgaagcggattccgaacagcgaaaaaaatattttaatgagctaatttttgaaatagataacaatcctttgcaaaattattgctgtttattaacggagtatattaagaaatacaaaatgaataatggcttatccttgctggatctggatttgttcagaggtatttcgagtaattaccgcgtagttgttcagttgttaatatcatcatgtctttctggtgatagcgatacgatttatgatatacaggaagaattacccttttcatggggatggattcccgtttcaatctggaaagatgtttttcaaaagtgttggacttatctggaaaaacagattaacgataaaacattagcattacatatattgcaaccctttattgcttttatgaaccatcgtgcacatatcgatcgtcgtctggctcccattgcgaatatgttacttacatatagcgaactcctaccagccggttgtaatgtcttgccaactgttagtcgtgagcagtttaatgaagctaaacagatgctattaaggaaccccgacagctttgggcgtatcagtatcttccctaaagaactttggtctagtgctattactccagagttaaaatctgtttttaataagctttggattgaagataaatatcactcacggcttgaaaaacgttttaatttgatgttagtcgcagcgctgttaacccaaaaagataataacttgatacatcaactgtctgcgctttttgaattccactatcagcaagccccgcagcaattaggggtaatctatcaatattattttgaacaagcaggagtatgtcattga

SEQ ID NO: 29538 - DNA, 6315 bp, Escherichia coli TT12B; identical to SEQ ID NO: 29414

SEQ ID NO: 29539 - DNA, 2937 bp, Escherichia coli TT12B; identical to SEQ ID NO: 28445

SEQ ID NO: 29540 - DNA, 6315 bp, Escherichia coli TW06591; identical to SEQ ID NO: 28464

SEQ ID NO: 29541 - DNA, 2937 bp, Escherichia coli TW06591; identical to SEQ ID NO: 28445

SEQ ID NO: 29542 - DNA, 6315 bp, Escherichia coli TW07945; identical to SEQ ID NO: 28540

SEQ ID NO: 29543 - DNA, 2937 bp, Escherichia coli TW07945; identical to SEQ ID NO: 28445

SEQ ID NO: 29544 - DNA, 6321 bp, Escherichia coli TW09098
atggacgttcagcaactgcattatgcgccacttctaaatcagcttcatcagcgtgcggtgaggtcggtggtaagtcagttggcattgcggagcaagtcgttgactcattatctggaatcacaatattttcagcctcccggtcaggaggggtcactgcttgcagacccggtattcgaaagtacattcggctggatgcctgcggatgaaacaatggaggatttgcgggacaagctgatctccagcccgctggttgatgcattgagcaaagcgccagtgccatttcgtcatcaacttactgcgtggcgaacgattctggaagacaaaaaatccttgttagtgagcagcggtacgggatccgggaaaacagaatgctttatggtaccggttctggaagatcttattcgtcagcaaaaatcgacccgccagtcactaacagggacacaagctattttcttgtatccgttaaatgcattaattaacagccaacaggagcggcttcgcgaatggacgcgcggatttaaggggaaaatacgcttcgcgctatataatggcgaaacccggcataccaaatacgaaattcaggaagatcagttgaaagtacctgaacaagctttgagtcgggaagccatttatgaagaaccaccttccatcatggtgacgaataccaccatgctggaatatatgctgattcgtcgtaaagatgccccaatcatcgaaaagtctcaggggatgttaaagtatatcgtcctggatgaagcccatagttatattggttctcaggctgctgagttagcgctgcttttacgtcgtgttatgcaggctttcaatgttggacccggcacagataaacctgtgcagattatcgcgacctctgccactattggtgaagactctcctgaaggtaataaggagcttgctaaatttgtcgctgatctcgcgggcgttacagaacgtgatgtcaaagtggttcgcggttatcgacaaataccgcgggtatcggagtcgctgattcgtcatgaataccccacatctttaacttctcttaaatccctgagccctcaggatctttaccaacagctttgtcattaccgtgtggcccagcaattgcgtcaggcgttaactcatcccggacggcaggcagtacgtttgagtgagttgctcaatgttgccagaagaacctggccagatattaatcaccgtgagctactgcaactcctcgatctaatggcaagatcgcgagaaggtgaactggcttttacgccattacgtatgcatgggtttatcagaacactggcgggtctatgggcatgttcaaacaaacaatgctcacataaagcacatgaattaaatcagagtgactggccatttggtcaggtatggtttgagcagcgccaatattgtgactgtggagcgccggtatttgaagttttacgttgctccgggtgtggttcagcttatttgtctgccaaagaggagatgcgcggtgatggaacgaactggttggtagcgcaaccagccgctgccgaagtggatgagtttgctcttgatgtagatgtttattctgaagatgaagacaacgacgaattagacaataactctcaatttgatcgtctgattgcgagcgatggtgaaaaatatatcatttcactggaagaaacgacggcggggaaaattgatagtgaagcgcaaaagcactatgaaataaacctgttaagaccggaatctcgaggtgagggacgcaataactcctttgcttgtgtttgctgtggtgacactcaacggaaaaataatcctttattccgtccgcttcggctcggcgcgcccttttttttaaatgaaattattcctactctgctggagttttctccattaccgcaaacaagagaagagcagttaggaccgtttaatggtcgacgcttgctcacctttacggattcgcgtcagggtaccgctcgcatttcagcccgcttacagcaggatgccgataaagcgacgttgcgagctctttgttaccaggagctggcaaatattacagagccttcagcaaaactcagcccggcacactgtgcactgttagagaaagttattagccagttttctgtcctccctttaaaaaattccatcgacgcgctgaaaaaagcgatggctgcgaatgaggagcttagcccgacggacattcaggcacttaaaattattgagccgatggtgagttccttaagcacggagcatgctgaagcgatgcaaatacttcaggctaactctggcaatcagcagaagaaaaccatgtcatggcaaacgctgtctgaacagctggttggcagtgtggaccttgccgatagaatgagaggcagttttaaagaattgtctgggcttgatcttactaaacaacagtttgcagatttttgtttatacagcgagtttggtcgccgccctaaaaatgcctggaccctcgaaagtctgggtctggtagccattcactatccattcattgataaagttacaacctgcccgcaggactggaagacattattacccgatcccgataagcaattagcggaatggcgtaatttattgaagattactcttgatttctttatccgtgaaaacagtgccgttttttacgaaaacgagcaataccctcgctggatgggggcacgtttcccggtaaaaatgctccaggggccagataaaaaaaacaaagggcagaaacgtgatcaactttggccacaaatacgcgatcgccattataaccgggtcattaagctattaatcgcagtctttccggcaatacaacctgagcaggctcactggaaatcgttagttaaccacttaatgattgaggtctgggatgcaattcgaccctgcttacgtcagtttgagtcgggttatcagctggatattaaacaacaagctgaattttacagtccaaagcaagtgtggcgttgcccctatactcgacgtgcgttagacgtcacgttgctgggatactctccgtatttgccgggtagcaaagaaattgcacctgaaaaagcagtgttgattgaaatgcctgagcttcctgtacgtcactggcgtttgtctggtggtggagaaatcgcccgagaagaacgtctggagtggctggaaagtaatgcgctgattcaacatgcccgcgaggaaggattatggtctactcgcagcgaccgactggccctgaaagatagctggtatcgtctggaggaacactctgcgcagagaacgcctgagcagaaccagtttaatgaaaaacaatttaagtcaggcaaagttaatgtgctgaactgttccacgaccatggagatggagatgggggtggatattggtggtatgagtttggtggcaatgaacaacgttcctccagcgccggcaaattatttgcaacgtgcaggtcgcgcggggcgtcgtggagagagtgcatctgctgccattacgttatgtaaaaacacggcgcatggaatggaggtattcaaagaccccctctgggcgttcaacactactgccagtgcgccacgggttcgttttgggagcagtagtattgttcaacgacatgttaatgccctggttttaggtctgtttttacgagctgaagttcctgatgcgacaaaactgagttgcaaatggttctttgaaggtgatgagagccagtgtcttcgttttctccattggttaaatcaccaggccgatcagctggcggataaacttaaacgccttactcagggaaccgtactgatgtcattgacggcaacccagctcttgacccgcacacaagcaatgatgcagcaggttgatatccgctggagaagccaacttgcgatactgttggaaaatatcgaagcgttgaaggcggataacagcgcgtgggaagaaacaccagcaggtaaagccatcgcttatcagcttcgtgattatcgcggtgcatatctgttttctaaactcattagtgaagcgttcctgccggggcatggtttcccggttggcgtagtcaatttcaattatctgacggcagatgagctggaaaaacgtcgcgcaataaaagccactcaggctgaccctaatgaagggggagaaagcttttctcgtcgtattgaaaaattgcccagccgtgatttgcctacagcattacgcgagtatgcgcctggtgcagatgtggtattgggcggaaaagtatatcgttcctcgggcattatgcttggcaaggtgcttgccagcgggcaggagctgtcaggcgatcatcatattccgtggttctggcattgccgtaaatgtggtgcgggggcaaccagtactacccatcctgtcgaatgtagtcactgcaaagcggatatacagcaacttgatgtgaagcgttatttacagcctgttggttttgcgacagatattcgttatcaggcacataatgatgtatccatgcctgcacaacttccctggaaagatccacgtgttcttgtaccgtcttcggtgtgggtttctttacccgatgctgggctaggacgttaccgttttagccatagtggggaattgttccacttcagtgaaggggaatttgggcacggctacgcaatttgcctctcatgtggtcgggcagaatctcaaactcaaccccagcgtacccctgaaaatctaaagaacccagagagggaaaatacgcattacctgttgcgagggggcagtaacgatcgtcaggggagcaataaattgtgccacggtcatgtgcataaagatctgtggttgggatatagcagtcgtacagatatggttgagctgcaactcaatgatgataatggcctgttgatccgtgatgaggttgccgcgcgttcccttgcggtcgctttgcgtgaagggttagcgcataaattgggtatcgaaaatactgagctgggcgtgacgacgcagcaagcgcgcgatatcaatggctataccggatattccatcttcatttacgacaataatgcgggtggtgcaggttatgcagtgcaattgatcgaccattgggctgatgtctttaattacgccagaaaattgctcgattgcagttgcgataaattctgtcaccactgcttgctcagctacgacagtcagcattatgtcaacagattagatcgtcaccatgcattaaccctgcttaccaatgtacggttgcagcgacttaacctcgcgccagaatatcagtacttcggcgatggtagccgggttgaaactaaccctctgagtttacgtattgcgcaatgcctgaacagcgagatttatgactcctgctcgctggttcttgcggggccgcaggaacagtgggactttgcccaatggccattatttaaagagttgctccagtttgcctcctccggtgggaatgttgagttgctggtggccacgccgctggcaaacttaactgatagctccagacatcagctttccgcgttggcggcgatgccgggaggtcgcttacaagtgaaatccattgccactgcgcagctcatgcaaggaaaggggcgctggcttgcgcaggtgactcgcgaagggcaaagccaacagtgggccgcagacgacagcgctaccgttgcacctggtgaattatggggacaaagtgcgtcttcaccagtagtgacacttaaaggaacgtccggaaaaaccttctcgggtcagaccttaagtgcagaagatttactgcccgccttacccaccggggcggtgcgcatcaatctctgtgaacaactggacgggccgctggaaggttttggttcgcgtttctggtcgttagtcacgcaacagcacgctggctggaagcaggcatttacccgccacaaagagataacgcatgttgagtacagcgatcgttatcttaatagcccattcacggcgcgtttgttaggtgaaatcttaaccgagctggttgaacagggaatggcggaacgcgccagcctcactgtttgcgtcaaaaaattggattacaactctcgccaacacgacgctctctataacgcgtggcttaatgaggaagatcgtcagcaggttgtgaccactttacttgaagaaggatatctggggcctgcgtggccgggagcaattagctggttaacgggggataaccagagtacggagcatggacgagaactgacagtcaccttcagcgatggcagtcagcattatgtcctgctcgacatggggcttagctactggcgctgtattgaagataccttctttgattttgccctgcgagtaccgcagcaagttgaacggctggcaaacacgcgagcgcgagctgttgccccgggtaatgaccttaggagttatattatcgctggataa

SEQ ID NO: 29545 - DNA, 2937 bp, Escherichia coli TW09098; identical to SEQ ID NO: 28445

SEQ ID NO: 29546 - DNA, 6315 bp, Escherichia coli TW09109; identical to SEQ ID NO: 28464

SEQ ID NO: 29547 - DNA, 2949 bp, Escherichia coli TW09109; identical to SEQ ID NO: 28645

SEQ ID NO: 29548 - DNA, 6315 bp, Escherichia coli TW10246; identical to SEQ ID NO: 28464

SEQ ID NO: 29549 - DNA, 2937 bp, Escherichia coli TW10246; identical to SEQ ID NO: 28445

SEQ ID NO: 29550 - DNA, 6315 bp, Escherichia coli TW11039; identical to SEQ ID NO: 28464

SEQ ID NO: 29551 - DNA, 2937 bp, Escherichia coli TW11039; identical to SEQ ID NO: 28445

SEQ ID NO: 29552 - DNA, 6315 bp, Escherichia coli TW14301; identical to SEQ ID NO: 28732

SEQ ID NO: 29553 - DNA, 2937 bp, Escherichia coli TW14301; identical to SEQ ID NO: 28733

SEQ ID NO: 29554 - DNA, 6315 bp, Escherichia coli TW14313; identical to SEQ ID NO: 28540

SEQ ID NO: 29555 - DNA, 1128 bp, Escherichia coli TW14313
aatattaaacgctacgatggtagttttattgaacacgatcaagggttactggttgatataaaaaattctgttgtttttcctgcaaatagaatagacgaactggttgttgatgctatttctcttaagaatcctggcttacacatatcattgttaaaaaaagatgagtttgcttatgatctttcagctctgaatgttcaggatagtccatggttaattgtgggaaaacttgatggtacagctcgcattgcaccagtaattaaatggatgctacctgtattgcagacaaatgatttattactaaatgctctatgcgaagcagacccagaacagcgcaaaaaaaattttaatgagctaatttttgaaatagataacaacccattgcaaaattattgctgtttattaacagagtatattaagaaatacaaaatgaataatggcttatccttgctggatctggacttgttcagaggtatttcgagtaattaccgcgtggttgttcaattgttaatatcatcatgtctttctggtgatagcgatacgatttatgatatacaggaagaattacccttttcatggggatggattcccgtttcaatctggaaagatgttttccaaaaatgttggacttatctggagaaacagattaacgataaaacattagcattacatatattgcaaccctttattgcttttatgaaccatcgtgcacatatcgatcgtcggctggctccgattgcgaatatgttacttacatatagtgagagcctaccaaccggttgtgatgtattgccaactgttagtcgtgagcagtttaatgaagctaaacagatgctattaaggaaccccgacagctttgggcgtatcagtatcttccctaaagaactttggtctagtgctattactccagagttaaaatctgtttttaataagctttggattgaagataaatatcactcacggcttgaaaaacgttttaatttgatgttagtcgcagcgctgttaacccaaaaagataataacctgatacatcaactgtctgcgctttttgaatttcactatcagcaagccccacagcaattaggggtaatctatcaatattattttgaacaagcaggagtatgtcattga

SEQ ID NO: 29556 - DNA, 6315 bp, Escherichia coli Tx1686; identical to SEQ ID NO: 28732

SEQ ID NO: 29557 - DNA, 2937 bp, Escherichia coli Tx1686; identical to SEQ ID NO: 28733

SEQ ID NO: 29558 - DNA, 6315 bp, Escherichia coli Tx3800; identical to SEQ ID NO: 28636

SEQ ID NO: 29559 - DNA, 2937 bp, Escherichia coli Tx3800; identical to SEQ ID NO: 28445

SEQ ID NO: 29560 - DNA, 6345 bp, Escherichia coli UCI 57
atgactacacgctatttttcgtcacttattgaacaatcgttgtctcgttcaactgaagcaacgctcagtatcatgggcgttaccaacccgcagttgcgtgaacatctcgctcagcaaatggggactgattgtgggaaaccgggatcattccttgcttctccggtattccagcaaatgtttggctggaaggagtcaaatcacacgatgcgcagcctgacggaaggcaaggcattgttgagcaaagcagtggttgattcactggatgatcagagtaatggccggtaccggtttggtgctgactggaggccttttacgcaccagttagccagttggaaagctttgctggaaaagaaacattcagtggtggtaaccagtggtacggggtcaggtaaaacggaatgttttatggtaccggtgctggaagatctttaccgggaactgcatgaaaatggcaacaatccgttggtcggtgtccgagccctttttctctatccattgaacgccctgattaattcacagcgcgagcgtctggatgcctggacgcggggttttggtaccgggatccgatactgcctttacaacggcaacaccgaaaacctacacgcttcggtaaaaagcgaacaggcaaaaaggccgaatgaggttctctcgcgcgaaaaaatgcgtgaagaacctgcgccgattctggtgaccaacggcacgatgctggaatatatgatggttcgccaggtcgacgccccgattatccagcaatccaaagcacaaaaatcactacgctggatcgtactggatgaagcgcatacttatgtagggtcgcaggccgctgaactggcgctccagctgcgtcgtgtgatgaccgcgtttggcgtgacgccagatgatgtgcgctttgtagcgacctctgcgaccattgccggcagcgacgctgaaaagcagctgaaaaaatttctctctgaattatccggtatcccgcaggagcgcatcgatgttctggacggaagtcgggtgattcctgaactggaaccatccaaaaacgtttctcttccgttagacgaaatagagcaaatacctgatctggatctaagagataaaaatgataataaaattaaagggataagtcctgatcgcttttatgcgcttacgcattcccccgaagcgcgttacatacgtgagatgttggtcaaacagcccaatccaatgaagctggatgagatgatgcagcggttaaatgctttgactaaaaagcattacagccagcaggaagtactgcgttggatcgacgtctgttcaggtacccaacctaatgcaaaggatcccgcatttcttaaagtcagggcgcatatcttccagcgtaatacccagggaatatgggcttgtgttgataaagattgcagattaaagcacggtacaccgctcgaaaaaggctggccctttggctatgtatatgtgaaccagcgacaaaattgcgactgtggaagccctgtctacgaagtggcgttctgtaatgattgtaatgagcctcatcttctggcacgggacaaaaagggcaaactagttcagtgggaaaataaaggtggcgatgaattctctctgcaggatgaagtacctgttgaacatgacgcgacagaggaaaaagtcgaaaaagagaacagtttccagcctccgttgattattgccgcaggagaaagcagtgaggcaggttataccctacaacgcctcgaccgtcagacgcgccgtattggcgttattaacaatgacagcattccgctgattattaatgatattgaacaggtttgtagcgccagtggctgtggctacagaggcatgagtgggaaacaacccttccggcgtgcattattaggagggccattttacgttactaacatcgtgcccaccgttcttgagtattgtcaggactttaccagtgatgaaggcaaagagggcgtcggaccagattcgttgccagggcgaggacgtcgactcattacttttacggacagtcgacaaggtacagcccgaatggcggtgcgtatgcagcaagaagcagaacgcagtcgcttacgtggaagcgtagtcgaaattctgagttggcatcaacggacacaaacgtccacagcgccgaatgccaatgccgatttggaaaaattagcgaccagggcgaagcaagcccgtgagcaggcagaagaatatcgaagctggggattgccggaccaggctaaattgtcgcaagcacaggctgaacagcttgaacaggcttatcaggctgcaaccggtgggaaagccgcgactattctggtatcccgaacctggacagaaatggttaacgagcttaaagagagagccgatatccgcgggccggttctgcaatataaccattatcttaagcctgaagtgtttaatgaaaacggcgggcctctaaagctctcggaaatgttgttgttccgggaattcatgcgtcgccctaaacgaaccaacagcctggaaacacaggggcttgttcaggttggttacctgggactggagaaaatacataagatccctctgcactggcaggaaaaaggattaacgctggatgactggcgcgattttctcaaggttacgctggatcattacgttcgcgagagcaacttcacacagctggatgatgagctgaaaaactggatcggtagccgtttttcatcaaaattcgtccgtaacccggaatcaaaagatcctgaagataatcagaacagacgctggcctcaaattcgtaatggcaatataacccatcgtttagcgaagttgctgatgctgggagccggattcaaaaccgtcaatacggcgactattgatattatcaatacatggctgaaagaagcatgggcccaacttaccggaccgcttgcagtattgaaacccgatggcaaccgtttttatttaccgaaagagcatatgactttttctttaatcacggatgcctggatttgcccggtaaccaataaaatcctggatacggcttttaaaggcttaaccccttatctgcctacccatatttcgttcgagcatcttacccaggcgcaatatgacagttttgtcgcgcagaaagtcactatgccggaaatctggaagctggatcgttcacaggaagactacgcagaggggctggcgaaagtacgcgactgggtcagcaatcagccgctgatcgcacaattgcggtcggaaaacgtctggacagacattaacgatcgtgtcgttgaaggcggcttctactaccgtacagccgagcactcagcccagcagtcttcagagcgcctgcaaagctatgaaaagatgttcaagaatgggcaacttaatgttctcaactgttcaaccaccatggaaatgggggttgatatcgggggcattactgcggtggtaatgaacaacgttccgccacatccggccaactatttacagcgcgccgggcgagccgggcgtagtaaagaatcacgtgcgatctcttacaccctatgtaaaggtaacccacacgaccagcaggtttttgccaacccgctctggccatttgaaaccatgatcccggcccccatggtcgcgatgaactccgcccgactggtgcaacgtcacgtcaatgcattattactgtccgactttttatgtaacgttattggcgaaaccgataaagaaaaaaccagcctcgatagcctctggtttttcggtgaagatgacgggcagtcaaaatgcgaacgctttaaaatctggctggaacgtccggttcttgatatcgacacggcgctggaacggctggtgaaaggtacggcgttgcatggtgcaagagccgaatatctgcgggataaaacaatcaacgcgatcaccttcctgcaacagcggtggctctccgtttatcgcgatctcgtgacacaggagcgtgagtcgcagccgcaaacgccttatcgtaagcgcatagagctggagaagaaacggcactgtggcgagtatctgctgcgcgatctggctgccagaaccttcctgccgggatacggtttcccgacagatgtagtgacgtttgataacttcacgatggaagattatatccgcgaaaaatcgcagaaaagtcgtgataaaaaggaccgtgaagataacgtctcccgttataaaggattaccttcccgtaacctcggtgttgccattcgtgaatatgcaccgggagcagagatcatccttgatggccgtgtcttccgctctgccggtgtctcactgcactggcacaatattaatgccgataccaatgaagcccagcgtctggattgcgcctggcgctgtcacaaatgcgggaccattggctatgaagaggggatgagcagttccgggatgctcttttgctccaatagcgcctgcggcgaaaaaataatcatggataatcgccgtcaggtgctgcagcctgccgggtttgtcaccgatgcacacgctccggtaacgaacaatattgaaaccatgaaattcgtcccggttgtccccgcgtgggtctttgttaaagcagagcccgtaccgttgcctaacccgctaatgggttatatggcttctggggctgatgggcatgttttccagcaaagtttgggggaaggtggacacggttatgcattgtgtctgagctgtggccgtgcggagtcgatgctgaatgaaaatgatgcgccgaaaagcatggaagctcactatccaccgcgtccgggtaaagcggatcgcgacagccagaatcatcgtctgatttgcccgggttcgacggcactcatgaagaacgtcacgctgggcgcactggcgcgcaccgatgtcttcgaaatggttctgcgcaaaccacaaaatggcgagtatctgccagataacacagaagagggacggattgtcgccatgactctggcggtggctctgcgtcaggcgctggcgggcgttctgggtatctccgccgcagaacttggctattctgtacgtccggtcagactggaggatgggcaatcggtattagccgtacagctttatgatgtgatcagcggtggtgcaggttttgcctccagcgcaccggtacacattgaagctatattgcagggaatggtgaaacagttaggctgccgccattgtgagactgcatgtagtgaatgcctgcttgattcccagactcgccacgatcacgatttgctggatcgcaaagcggcgctggcctggcttggcgatgacttcacgtattacatcggtttaccggatgaagagacattctcgctgccggatgcccgctactgcccaggcgccattggcgatacgattcgccgggcgattaacgaaggcgctgaaaagctcaccatgtggatgaccggcgcgcccaatgagtgggatttatacgcacgtcagttccgcgcggcggttcagaactatcggctaaaagacaacgtcgaggtcgatcttgttattcctgcgggagtggatgacccggacctgttgcatgaactatcgcaatttactgcgctgggtgtgcggctgtgccatgttgaacaggatctgcaattaccgatcgttgcccaggtcacctttgccgatcgcgtgatgacgctggcctctcgcagccagcaggcaacgattccggggccggagtggcacctgaatgacgaactggtggtgcgtagtctcggttataaaacggtagaactgaacgagtttattctgccggctaaagccgccaacgctgtcgagcgggtcaaagacattcagatccacaaacagttgaatggacccctgtcgcagtttgggcaacgcttctgggacgtgctgtttaacgaccatgaagaagcgcagtcactgatgaataacacgcgaattaccggcgttcactataccgatcgctatctgcaaaacccggttgcgctggcgttgttgggatctattctgagaccgctaaaaacaaagctgaccgatggcgctgaagtgacgctggatacgctatttaaagataaagatcgccccggtaaccggcctttccatgactggatgagcatagcggattttcaggatttcgctgatcagtggtttgctgctgcgctgggcaggccggtagaactgacggtgttcgactcgccgcgcgatatccctcaccatcgtaaactgacggtgacttttgaggatggtcaggtattgaagatccgcttcgatcaggggatgggctactggcgcatcaactttgcatcgcaatggcattactttgatttccgcgatgacgtttctttccagttagtcaaaatggctcaggcctgcaaggaagggaatgtcgccaacagcgaagagagttgggcaacggatgtgctggtggaggtgatcgcctcctga

SEQ ID NO: 29561 - DNA, 3291 bp, Escherichia coli UCI 57
ttggatcaatcagaatacatttcatgggtaaaatgtacttcctggctaagtaactttttgaatcttagagggttgagacaaccggatggccgtcctctttatgaatatcatgcgaccaatgatgaatataaccaattaacgcagctactccgtgcagtcggtcaatcacaatctaatatatgtaatagggactttgctgcctgttttgttcttttttgctctgagtggtaccgcagggattatgaacggcaatgcggatggacgtgggaccctatatataaaaaaataggaatttcattcaccgccacagagcttggtactatcgtaccgaaagggatggaagattactggctgcgcccaattcgattttatgaatctgaacgacgcaattttatcggaacattattcagtgaaggtggtttacctttccggctactcaaagaatcagacagtcgctttctggctgttttctcgaggatccttggacaatatgagcaagcaaaacagtcaggtttttctgccctttcgctggcaagagctgtcatagaaaaatcagcgctgccaactgtttttagcgaagatacctctgtagaacttatcagtcatatggctgataacctcaattccttagtacttactcacaacctaataaatcacaaagaaccagtacaacagcttgataaggttcaccctacctggcgaagcgagtttccaataccgttagatgatgaaacaggaacgcattttttgaatggactgctatgcgcagcctctgtagaggctaagcctcgactacaaaaaaataagagtacgcgttgccaattctattggtcagaaaagcatccagatgagcttagggcgatagtatctctccctgacgaagtttcctttcctgtaacaagcgagccgtcaactacgcgctttgaacttgccatttgtgaagatggtgaggaagtctctggccttgggccagcctatgcttccctggaaaacaggcaggcaacagttcgattacgtaaaagcgaagtgagatttgtcaggcaaaatccatcggcaggtttgtcgttagtggctcgtgctggagggatgattgttgggagcattaaacttgatgacagtgaaattgccattggtgaggtgccgttaaccttcatcgttgatgcagatcaatggctgttacagggacaggcctcctgtagtgtgcgaagcagcgatgttctgattgtgctccctcgggacaatagcactgttgctggttttgatggccaatcgagcgcagtaaacgtattaggacttcaagcgctacctgttaaaggatgtcgggacgttactattacagcaaatgaaacttatcggattcgcaccggaagagaacaaattaacaccgggggatttgctctacatggaaagcgagcaagctgggtttgtcatccagatgagacatttattggtgtaccaaaagtcatttctacactaccggatattcagagcattgatgtaacgcgttacctgagcggaatatcaattgagcaatgtcatatacaagagatgatgggggctcaatatctttctatccggaatagtaataatgaaacgctcttacgtcgcaaaatcggtatcctgccagcagatttcagtgttgagataaaaggcggtgtgcgcgcaaatgaaggttctatcgtaatcaccacacagcatccttgtgtagcaaaacttaaagataaaacattggaggctacacgtaagcgtactgaggggcgaacagagatacaactcaaagcggaaggggtacctccggcatttattacattacaagttctgcctaatttggcggctgatcccatcgacattgagttaccttttcccgctaaaggctgtctcgctcttgatgtaaacggacgtcctctggataaaaacattacgctgcatgatctgctgggttccagagcattcctgttctccagaaatggcgaaccgacaagatatacattgcagttgcatttgcgctccgttagtggattacaggcatggcacgaatggtgttatacggcgttgagcgatcgtcctgttgaattgaatctctatagtctgcgcgaacatattgagaacctgatttcacttgaggcaggtattgatcaggttgttgagatgcgtattacgggggcgggggtggtcatggcctggcaaattcgtcgctataaatacagcctgcgctatgattatgaaaaagaactattactcagccagtcagtgaaccatcgtgctggtcagattccttcccccgttatcatgctgttaagtgaacccgagaggaaatccattcccttagcatcaagaatgagcgagggagtgcctgtcggtgaatatgagttgagctcaatcgttaacaaaaatggaccatggttggttgttcctaaaccgggtgaagagatggcttttcgtccctgcttcgttcgtggcgaatcttcgttaccggtagaagaaagcaacatccgctcattgcagaaagcgacccagctttttaatccacaggcagaagttaataccatcacactggttctcggacagatggctaacgatcctgcccattctggctggcaatttatgcgtagcctgtatgatcaatttggttatttaccgctggcaacctttgaagtatggcgtgcactggtgcagcatccgcaggcattggcgatgtcgctcttcaaattcgaaatgtcagcagagtatctgagtcgtattgagaatgagttccctattctatgggagtttttccccatctttgagatcaaagctgcatctgagcgtttcaaattgttcctgagccaaaaaggtgcaccggaggaaacccagaaattactggttactaatatgtttcaacggctggggctcgtgttcccgacatatgccgatgaaattgagaaatggttaagtaacggatatctccctccgtctattcctgaatcttgtgtccacgggtggtatcaggagcttttacgtgagcacagtgaagctcgctggcctgaatatggctgcaagcgtctgtataaatggatgatgtcacaaaaaaatccagtgattggtattaatcctgacgcaaatcaccgctattccgtggcctggttacccgtcttcgctgcagctgtggcaagcggaaatacttcttttgaagctgtatttgaccgtaaacccggtgccgtatttttcctgaggcaagtcagggacttcgattcccgctggtttaagaccatctttcagtgcagcctgttgcgttatgttgctaaaaaataa

SEQ ID NO: 29562 - DNA, 6345 bp, Escherichia coli UCI 58; identical to SEQ ID NO: 29560

SEQ ID NO: 29563 - DNA, 3291 bp, Escherichia coli UCI 58; identical to SEQ ID NO: 29561

SEQ ID NO: 29564 - DNA, 6315 bp, Escherichia coli UMEA 3144-1; identical to SEQ ID NO: 28574

SEQ ID NO: 29565 - DNA, 3360 bp, Escherichia coli UMEA 3144-1; identical to SEQ ID NO: 28647

SEQ ID NO: 29566 - DNA, 6315 bp, Escherichia coli UMEA 3151-1
atggacgttcagcaactgcattatgcgccacttctaaatcagcttcatcagcgtgcggtgaggtcggtggtaagtcagttggcattgcggagcaagtcgttgactcattatctggaatcacaatattttcagcctcccggtcaggaggggtcactgcttgcagacccggtattcgaaagtacattcggctggatgcctgcggatgaaacaatggaggatttgcgggacaagctgatctccagcccgctggttgatgcattgagcaaagcgccagtgccatttcgtcatcaactcactgcgtggcgaacgattctggaagacaaaaaatccttgttagtgagcagcggtacgggatccgggaaaacagaatgctttatggtacctgttctggaagatcttattcgtcagcaaaaatcgacccgccagtcactaacagggacacaagctattttcttgtatccgttaaatgcattaattaacagccaacaggagcggcttcgcgaatggacgcgcggatttaaggggaaaatacgcttcgcgctatataatggcgaaacccggcataccaaatacgaaattcaggaagatcagttgaaagtacctgaacaagctttgagtcgggaagccatttatgaagcaccaccttccatcatggtgacgaataccaccatgctggaatatatgctgattcgtcgtaaagatgccccaatcatcgaaaagtctcaggggatgttaaagtatatcgtcctggatgaagcccatagttatattggttctcaggctgctgagttagcgctgcttttacgtcgtgttatgcaggctttcaatgttggacccggcacagataaacctgtgcagattatcgcgacctctgccactattggtgaagactctcctgaaggtaataaggagcttgctaaatttgtcgctgatctcgcgggcgttacagaacgtgatgtcaaagtggttcgcggttatcgacaaataccgcgggtatcggagtcgctgattcgtcatgaataccccacatctttaacttctcttaaatccctgagccctcaggatctttaccaacagctttgtcattaccgtgtggcccagcaattgcgtcaggcgttaactcatcccggacggcaggcagtacgtttgagtgagttgctcaatgttgccagaagaacctggccagatattaatcaccgtgagctactgcaactcctcgatctaatggcaagatcgcgagaaggtgaactggcttttacgccattacgtatgcatgggtttatcagaacactggcgggtctatgggcatgttcaaacaaacaatgctcacataaagcacatgaattaaatcagagtgactggccatttggtcaggtatggtttgagcagcgccaatattgtgactgtggtgcgccggtatttgaagttttacgttgctccgggtgtggttcagcttatttgtctgccaaagaggagatgcgcggtgatggaacgaactggttggtagcgcaaccagccgctgccgaagtggatgagtttgctcttgatgtagatgtttattctgaagatgaagacaacgacgaattagacaataactctcaatttgatcgtctgattgcgagcgatggtgaaaaatatatcatttcactggaagaaacgacggcggggaaaattgatagtgaagcgcaaaagcactatgaaataaacctgttaagaccggaatctcgaggtgagggacgcaataactcctttgcttgtgtttgctgtggtgacactcaacggaaaaataatcctttattccgtccgcttcggctcggtgcgcccttttttttaaatgaaattattcctactctgctggagttttctccattaccgcaaacaagagaagagcagttaggaccgtttaatggtcgacgcttgctcacctttacggattcgcgtcagggtaccgctcgcatttcagcccgcttacagcaggatgccgataaagcgacgttgcgagctctttgttaccaggagctggcaaatattacagagccttcagcaaaactcagcccggcacactgtgcactgttagagaaagttattagccagttttctgtcctccctttaaaaaattccatcgacgcgctgaaaaaagcgatggctgcgaatgaggagcttagcccgacggacattcaggcacttaaaattattgagccgatggtgagttccttaagcccggatcatgctgaagcgatgcaaatacttcaggctaactctggcaatcagcagaagaaaaccatgtcatggcaaacgctgtctgaacagctggttggcagtgtggaccttgccgatagaatgagaggcagttttaaagaattgtctgggcttgatcttactaaacaacagtttgcagatttttgtttatacagcgagtttggtcgccgccctaaaaatgcctggaccctcgaaagtcttggtctggtagccattcactatccatttattgataaagttacaacctgcccgcaggactggaagacattattacccgatcccgataagcaattagcggaatggcgtaatttattgaagattactgttgatttctttatccgtgaaaacagtgccgttttttacgaaaacgagcaataccctcgctggatgggggcacgtttcccggtaaaaatgctccaggggccagataaaaaaaacaaagggcagaaacgtgatcaactttggccacaaatacgcgatcgccattataaccgggtcattaagctattaatcgcagtctttccggcaatacaacctgagcaggctcactggaaatcgttagttaaccacttaatgattgaggtctgggatgcaattcgaccctgcttacgtcagtttgagtcgggttatcagctggatattaaacaacaagctgaattttacagtccaaagcaagtgtggcgttgcccctatactcgacgtgcgttagacgtcacgttgctgggatactctccgtatttgccgggtagcaaagaaattgcacctgaaaaagcagtgttgattgaaatgcctgagcttcctgtacgtcactggcgtttgtctggtggtggagaaatcgcccgagaagaacgtctggagtggctggaaagtaatgcgctgattcaacatgcccgcgaggaaggattatggtctactcgcagcgaccgactggccctgaaagatagctggtatcgtctggaggaacactctgcgcagagaacgcctgagcagaaccagtttaatgaaaaacaatttaagtcaggcaaagttaatgtgctgaactgttccacgaccatggagatgggggtggatattggtggtatgagtttggtggcaatgaacaacgttcctccagctccggcaaattatttgcagcgtgcaggccgcgcgggtcgacgtggagagagtgcatctgctgccattacgttatgtaaaaacacggcgcatggaatggaggtattcaaagaccccctctgggcgttcaacactactgccagtgcgccacgggttcgttttgggagcagcagtattgttcaacgacatgttaatgccctggttttaggtctgtttttacgagctgaagttcctgatgcgacaaaactgagttgcaaatggttctttgaaggtgatgagagccagtgttttcgttttctccattggttaaatcaccaggccgatcagctagcggataaacttaaacgccttactcagggaaccgtcctgatgtcattgacggcaacccagctcttgacccgcacacaagcaatgatgcagcaggttgatatccgctggagaagccaacttgcgatactgttggaaaatatcgaagcgttgaaggcggataacagcgcgtgggaagaaacgccagcaggtaaagccatcgcttatcagcttcgtgattatcgcggtgcatatctgttttctaaactcattagtgaagcgttcctgccggggcatggtttcccggttggcgtcgtcaatttcaattatctgacggcagatgagctggaaaaacgtcgcgcaataaaagctactcaggctgaccctaatgaagggggagaaagcttttctcgtcgtattgaaaaattgcccagccgtgatttgcctacagcattacgcgagtatgctccaggtgcagatgtggtattgggcggaaaagtatatcgttcctcgggcattatgcttggcaaggtacttgccagcgggcaggagctgtcaggcgatcatcatattccgtggttctggcattgtcgtaaatgtggtgcgggggcaaccagtactacccgtcctgtcgaatgtagtcactgcaaagcggatatacagcaacttgatgtgaagcgttatttacagcctgttggttttgcgacagatatccgttatcaggcgcataatgatgtatccatgcctgcacaacttccctggaaagatccacgtgttcttgtaccgtcttcggtgtgggtttctttacccgatgctgggctaggacgttaccgttttagccatagtggggaattgttccacttcagtgaaggggaatttgggcacggctacgcaatttgcctctcatgtggtcgggcagaatctcaaactcaaccccagcgtacccctgaaaatctaaagaacccagagagggaaaatacgcattacctgttgcgagggggcagtaacgatcgtcaggggagcaataaattgtgccacggtcatgtgcataaagatctgtggttgggatatagcagtcgtacagatatggttgagctgcaactcaatgatgataatggcctgttgatccgtgatgaggttgccgcgcgttcccttgcggtcgctttgcgtgaagggttagcgcataaattgggtatcgaaaatactgagctgggcgtgacgacgcagcaagcgcgcgatatcaatggctataccggatattccatcttcatatacgacaataatgcgggtggtgcaggttatgcagtgcaattgatcgaccattgggctgatgtctttaattacgccagaaaattgctcgattgcagttgcgataaattctgtcaccactgcttgctcagctacgacagtcagcattatgtcaacagattagatcgtcaccatgcattaaccctgcttaccaatgtacggttgcagcgacttaacctcgcgccagaatatcagtacttcggcgatggtagccgggttgaaactaaccctctgagtttacgtattgcgcaatgcctgaacagcgagatttatgactcctgctcgctggttcttgcggggccgcaggaacagtgggactttgcccaatggccattatttaaagagttgctccagtttgcctcctccggtgggcatgttgagttgctggtggccacgccgctggcaaacttaactgatagctccagacatcagctttccgcgttggcggcgatgccgggaggtcgcttacaagtgaaatccattgccactgcgcagctcatgcaaggaaaggggcgctggcttgcgcaggtgactcgcgaagggcaaagccaacagtgggccgcagacgacagcgctaccgttgcacctggtgaattatggggacaaagtgcgtcttcaccagtagtgacacttaaaggaacgtccggaaaaaccttctcgggtcagaccttaagtgcagaagatttactgcccgccttacccaccggggcggtgcgcatcaatctctgtgaacaactggacgggccgctggaaggttttggttcgcgtttctggtcgttagtcacgcaacagcacgctggctggaagcaggcatttacccgccacaaagagataacgcatgttgagtacagcgatcgttatcttaatagcccattcacggcgcgtttgttaggtgaaatcttaaccgagctggttgaacagggaatggcggaacgcgccagcctcactgtttgcgtcaaaaaattggattacaactctcgccaacacgacgctctctataacgcgtggcttaatgaggaagatcgtcagcaggttgtgaccactttacttgaagaaggatatctggggcctgcgtggccgggagcaattagctggttaacgggggataaccagagtacggagcatggacgagaactgacagtcaccttcagcgatggcagtcagcattatgtcctgctcgacatggggcttagctactggcgctgtattgaagataccttctttgattttgccctgcgattaccgcagcaagttgaacggctggcaaacacgcgagcgcgagctgttgccccgggtaatgaccttaggagttatattatcgctggataa

SEQ ID NO: 29567 - DNA, 3360 bp, Escherichia coli UMEA 3151-1
ttgcttgtgaaaactccagttaacccacttttgcaatggcttaacatgttttttagtcgccgttcattatccggagctgatggacgggcgttatatgcttaccgttgtactgatacagagtacgaaagtttggcagaactactgcgtacatatgccccccgtagttatccaagaacgatattcatttcctatagcgatgttctatttagcatatatgccgcagagtttatccgccggactcatacggtcggacaccctaaatgggacacaattttagattctattaactggaaagttccgtatgttcatcgacagaagctggttaatgatggcattcgctactggaaaagaaagataagaaacctggggcaagcttcgggttatctccatacactggcttgtgaaggtggtttacctatccgcatgattgaaaatgagagcggttatttgattacctatttcagaaggatatatcaggcgcttcgtgggcaatcatctcaatatcctgccgctaaaattgcacaagaattaggcgatacgattcctgtcacaatgcaaaacgaactggtctatgaaatagccggtgaattctgcgagactctctgccgattacttagtgagcatcctcctcatagcagtgatcccgtttctgcattacgtaagctctctccagactggcatcttcaacttccactcgttctccccgaagcgaatgctgcagagattgtaaggcgattactttctcaatcttctgaaatacgcagtgcaagtagtcttcaggttgaaagaatctgggtcgatgttgatgacagttggtattgcgatgcccggttccgattcccggccacaatgcgtacagaacagttaacctctttgtttgaatgccatattcagccggagcagacccgactcatcatttcaggaaaatggaaaaatggcggggcaaggttggcaatgctaagccgttatgagcagcaagattggcgggtcgagttattacctattgcgatgcaaaaactctctggtgcagatgcaatggccgaaatctcattgtcgcttcatgaaggtccaattctgttaggtcacacaattccaaaaggcggttatgaacttactgaagaacttccctgggtttttgaagcgatgaatgagagtgaatcgcagctaaaacttgttggtatggggtctgtgagttccaggctaaatgctctgtttatttcgctaccgaaaaatagccatttagatattagtggagaaggtgagtttgatatcccaaggttgctaaaaaacagtgaacgcagcttaactaaaataagtggagtatttagcgttgttttacatgatggtgctgtttgtacaattcgcacccagcaactttatgattctgcgattgaatattatattaaatcgacagaagttgaactggttaaatcggattatcctgtccatcgagcctggccgaagatcggttggaaaaaggatctgcaatatggcattgtaccggagaaagaacttttttggcgttccattcgttcaggtaataatgcctggtattctgtcgcatcagaaatgccaaaaggacagatagaagtccggcgaatagttaatgatgaggttttatttagcggtaaagttgtagttttaccagcagacttcgatattaatattatacctgagagtgctcagcaaggcattattatgctttctggtataacggatactagaattgataaatattcaaacaatgaaaaagtaacacttaagtccgattattcacaaaacgagtgtgctatttattataattcatcgctgatgctggaaaataccgttgatttacgggtctcctggaaagatggttctaatcttaaactattattacctaagccggttagcggtggccgatttgtaactaatgatggttctgttcattttgatggtgtggcatctatagcacatttgcatggaatagatgctgagttattaaccatatcatgtgctggaagaggatatcttaatatcgagttattggatgaaaatccagtagctgaaaaattccgttatttacatgccgaccttcctcttttatcaggacgcaatgacaaattacaacaaatttcactttatgagaactataatttgctaaatgctatgctggcatgtgcatggaacagcaatagtacattatgtgttgatttttactctgacagatttggaaaggataaagcaacactcaatattaaacgctacgatggtagttttattgaacacgatcaagggttactggttgatataaaaaattctgttgtttttcctgcaaatagaatagacgaactggttgttgatgctatttctcttaagaatcctggcttacacatatcattgttaaaaaaagatgagtttgcttatgatctttcagctctgaatgttcaggatagtccatggttaattgtgggaaaacttgatggtacagctcgcattgcaccagtaattaaatggatgctacctgtattgcagacaaatgatttattactaaatgctctatgcgaagcagacccagaacagcgcaaaaaaaattttaatgagctaatttttgaaatagataacaacccattgcaaaattattgctgtttattaacagagtatattaagaaatacaaaatgaataatggcttatccttgctggatctggacttgttcagatgtatttcgagtaattaccgcgtggttgttcaattgttaatatcatcatgtctttctggtgatagcgatacgatttatgatatacaggaagaattacccttttcatggggatggattcccgtttcaatctggaaagatgttttccaaaaatgttggacttatctggagaaacagattaacgataaaacattagcattacatatattgcaaccctttattgcttttatgaaccatcgtgcacatatcgatcgtcggctggctccgattgcgaatatgttacttacatatagtgagagcctaccaaccggttgtgatgtattgccaactgttagtcgtgagcagtttaatgaagctaaacagatgctattaaggaaccccgacagctttgggcgtatcagtatcttccctaaagaactttggtctagtgctattactccagagttaaaatctgtttttaataagctttggattgaagataaatatcactcacggcttgaaaaacgttttaatttgatgttagtcgcagcgctgttaacccaaaaagataataacctgatacatcaactgtctgcgctttttgaatttcactatcagcaagccccacagcaattaggggtaatctatcaatattattttgaacaagcaggagtatgtcattga

SEQ ID NO: 29568 - DNA, 6345 bp, Escherichia coli UMEA 3201-1
atgactacacgctatttttcgtcacttattgaacaatcgttgtctcgttcaactgaagcaacgctcagtatcatgggcgttacaaacccgcagttgcgtgaacatctcgcgcagcaaatgggggctgattgtgggaaaccgggctcattccttgcttctccggtattccagcaaatgtttggctggaaggagtcaaaccacacgatgcgcagtctgacggaaggcaacgcattgttgagcaaagcagtggttgattcactggatgatcagagtaatggccggtaccgatttggtgctgactggaagccttttacacaccagttagccagttggaaagctttgctggaaaagaaacattcagtggtggtaaccagtggtacgggttcaggtaaaacggaatgttttatggtaccggtgctggaagatctttaccgggaactgcatgaaaatggcaacaatccgttggtcggtgtccgagccctttttctctatccattgaacgccttgattaattcacagcgcgagcgtctggatgcctggacgcgtggttttggtactgggatccgctactgcttgtataacggaaatacagaagagctccacgcaaaaatgaaaacagtgcaggataatagaccaaatgaagtcttatcccgtgaaaagatgcgtctggagccagccccgattctggtgaccaacggcacgatgctggaatatatgatggttcgccaggtcgacgccccgattatccagcaatccaaagcacaaaaatcactacgctggattgtactggatgaagcgcatacctatgtcgggtcgcaggccgctgaactggcactccagctgcgtcgtgtgatgacagcgtttggcgtgacgccagatgatgtgcgctttgtagcgacctctgcgaccattgcctgcagcgacgccgaaaagcagctgaaaaaatttctctctgaattatccggtatcccgcaggagcgcatcgatgttctggacggaagtcgggtgattcctgaactggaaccatccaaaaacgtttctgttccgttagacgaaatagagcaaatacctgatctggatctaaaagataaaaatgataataaaattaaagggataagccctgagcgcttttatgcgcttacgcactcccccgaagcgcgttacatacgtgaaatgttggttagccaacccaatccaatgaaactggatgagatgacgcagcggttaaatgcgctgacaaaacagcattacagccagcaggaagtactgcgttggatcgatgtctgttcagggactcaacctaatgcaaaggatcccgcatttcttaaagtcagggcgcatatcttccagcgtaatacccaaggaatatgggcttgtgttgataaagattgcagattaaagcacggtacaccgctcgaaaaaggctggccctttggctatgtgtatgtgaaccagcgacaaaattgtgactgtggaagccctgtatacgaagttgcattctgtaatgattgtaatgagcctcatcttctggcgcaggacaaaaagggcaaacttgtccaatgggaaaataaaggtggcgatgagttctccttgcaggatgaagtacctgttgaacatgacactacagaggaaaaagtcgaaaaagagaacggtttcctgcctccgttgattattgccgcaggagagaccagcgagacaggctataccctacaacgcctcgaccaccagacgcgccgtattggcgttattaacaatgacagcattccgctgattattaatgatgttgaacaggtttgtagcgccagtggctgtggctacagaggcatgagtgggaaacagcccttccggcgtgcactattaggtgggccattttacgttactaatatcgtgcccaccgttcttgagtattgtcaggactttaccagtgatgaaggcaaagagggcgtcggaccagattcgttgccagggcgaggacgtcgactcattacctttacggacagtcgacaaggtacagctcgaatggcggtgcgtatgcagcaagaagcagaacgcagtctcttacgcggaagcgtagtcgaaattctgagctggcatcaacggacgcaaacgtccacggcgccgaatgccaatgccgatctggaaaaattagcggccagggcaaagcaagcccgtgagcaggcagaagaatatcgaagctggggaatgccagaccaggcgaaattgtcacaagcacaggctgaacagcttgaacaggcttatcaggctgcaaccggtggaaaagcagcaactaccctggtatcccgcacctggacagaaatggttaacgagcttaaagataaagccgatatccgtggcccggtactgaaatataaccactatttgcagcctgaagtgtttaataaaaacggcgggccactaaagctttcggaaatgttgttgttccgggaattcatgcgtcgccctaaacggactaacagcctggaaacacaggggctggttcaggttggttaccaggggctggagaaaatacataagagccccttgcactggcaggaaaaaggattaacgctggatgactggcgcgattttctcaaggttacgttggatctttatgttcgcgaaagcaacttcacacagctggatgatgagctgaaaaactggattggtagccgtttttcatcaaaattcgtccgtaacccggaatcaaaagatcctgaagataatcagaacagacgctggcctcaaattcgtaatggcaacgtatcccatcgtttagcgaagttactgatgctgggggctggattcaaaaccgtcaatacggcgactattgatattatcaatacatggctgaaagaagcatgggcccaacttaccggaccacttgcagtactgaaacccgatggcaaccgtttttatttaccgaaagagcatatgactttttctttaatcacggatgcctggatttgcccggtaaccaataaaatcctggatacggcttttaaaggcttaaccccttatctgcccacccatatttcgttcgagcatcttacccaggcgcaatatgacacttttgtcgcgcagaaagtcaccatgccggaaatctggaagctggatcgttcacaggaagactacgcagagggtctggcaaaagcacgagactgggtcaacaatgatccgctgatcgcacaattgcggtcggaaaacgtctggacagacatcaacgatcgtgtagtggaaggcggtttctactatcgcactgccgagcactctgcccagcagtcgtcagaacgcctgcaaagctatgaaaagatgttcaagaacgggcaactaaatgttctcaactgttccaccaccatggaaatgggggttgatattgggggcattactgcggtggtaatgaacaacgttccgccacatccggccaactatttacagcgcgccgggcgagccgggcgtagtaaagaatcacgcgcgatctcttataccctatgcaaaggtaacccacacgaccagcaggtttttgccaacccactctggccatttgaaaccatgatcccggcacccatggtcgcgatgaactccgcccgactggtgcaacgtcacgtcaatgcattattactgtctgactttttatgtaacgttattggcgaaaccgataaagagaaaaccagcctcgatagcctctggtttttcggtgaagatgacgggcagtcaaaatgcgaacgctttaaagtctggctggaacgcccggttcttgatatcgacacggcgctggaacggctggtgaaaggtacggcgttgcatggcgcaagagccgaacatctgcgggataaaacaatcaatgcgatcaccttcctgcaacagcggtggctctccgtttatcgcgatctcgtgacccaggagcgtgagtcgcagccgcaaacgccttatcgtaagcgcatagagctggagaagaaacggcactgtggcgagtatctgctgcgcgatctggctgccagaaccttcctgccgggatacggtttcccgacagatgtagtgacgtttgataacttcacgatggaagattatatccgcgaaaaatcgcagaaaagtcgtgataaaaaggaccgtgaagataacgtctcccgttataaaggattaccttcccgtaacctcggtgttgccattcgtgaatatgcatcgggagcagagatcattcttgatggtcgtgtcttccgctctgccggtgtctcactgcactggcacaacattaatgctgataccaatgaagcccagcgtctggattgcgcctggcgctgtcacaaatgcgggaccattggctatgaagaggggatgagcagttccgggatgctcttttgctccaacagcgcctgcggcgaaaaaataaccatggataatcgccgtcaggtgttgcagcctgccgggtttgtcaccgatgcacacgctccggtaacgaacaatattgaaaccatgaaattcgtcccggttgtccccgcgtgggtctttgttaaagcagagcccgtaccgttgcctaacccgctaatgggttatatggcttctggggctgatgggcatgttttccagcaaagtttgggggaaggtggacacggttatgcattgtgtctgagctgtggccgtgcggagtcgatgctgaatgaaaatgatgcaccgaaaagtatggaagctcactatccaccgcgtccgggtaaagcggaccgcgacagccagaatcatcgtctgatttgccccggttcgacggcactcatgaagaacgtcaccctgggcgcactggcgcgcaccgatgtctttgaaatggttctgcgcaaaccgcaaaacggcgagtatctgccagataacacagaagaggggcggattgtcgctatgactctggcggttgctctgcgtcaggcgctggcaggcgttctgggtatctccgccgcagaactcggctattctgtacgtccggtcagactggaggatgggcaatcggtattagccgttcagctttatgatgtgatcagcggtggtgctggttttgcctccagcgcaccggtacatattgaagctatattgcagggaatggtgaaacagttaggctgccgccattgtgatactgcatgcagtgaatgtctgcttgattcccagactcgccacgatcacgatttgctggatcgcaaagtggcgctggcttggcttggcgatgacttcacgtattacatcggtttaccggatgaagagacattctcgctgccggatgcccgctactgccctggcgctattggcgatacgattcgccgggcgattaacgaaggcgctgaaaagctcaccctgtggatgactggcgcgcccaatgagtgggatttatacgcccgtcagttccgcgcggctattcagagctatcggctaaaagacaacgtcgaggtcgatcttgttattcctgcgggagtggatgacccagacctgttgcatgaactatcgcaatttactgcgctgggtgtgcggttgtgccatgttgagcaggagctgcaattaccgattgttgcccaggtcacctttgccgatcgcgtgatgacgctggcctctcgcagtcagcaggcaacgattccggggccggagtggcacctgaatgacgaactggtggtgcgtagtctcggttatcaaacggtagaactgaacgagtttattctgcccgctaaagccgccaacgctgtcgagcgggtcaaagacattcagatccacaaacagttgaatggaccactttcgcagtttgggcaacgcttctgggacgtgctgtttaacgaccatgaagaagcgcagtcactgatgaaaaacacgcgaattaccggcgttcactataccgatcgctatctgcaaaacccggttgcgctggcgttgttgggatcaattctgaaaccgctaaaaacaaagctgaccgatggcgctgaagtggcgctggatacgctgtttaaagataaagatcgccccggtaaccggcctttccatgactggatgagcatagcggattttcaggatttcgctgatcagtggtttgctgctgcgctgggcaggccgatagaactgacggtgttcgattcgccgcgcgatatccctcaccatcgtaaactgacggtgacttttgaggatggtcaggtattgaagatccgcttcgatcaggggatgggctactggcgcatcaactttgcatcgcaatggcattactttgatttccgcgatgacgtttctttccagttagtcaaaatggctcaggcctgcaaggaagggaatgtggccaacagcgaagagagctgggcaacggatgtgctggtggaggtgatcgcctcctga

SEQ ID NO: 29569 - DNA, 3291 bp, Escherichia coli UMEA 3201-1
ttgggtcaatcagaatacatttcatgggtaaaatgtacttcctggctaagtaactttgtgaatcttagagggttgagacaaccggatggacgtcctctttatgaatatcatgcaaccaatgctgaatataaccaattaacgcagctactctgtgctgttggtcaatcacaatctaatatatgtaatagagactttgctgcctgttttgttcttttttgctctgagtggtaccgcagggattatgaacggcaatgcggatggacgtgggaccctatatataaaaaaatagggatttcattcaccgccacagagcttggtactatcgtaccgaaagggatggaagattactggctgcgcccaattcgattttatgaatctgaacgacgtaattttctcggaacattattcagtgaaggtggtttacctttccggctactcaaagaatcagacagtcgctttctggctgttttctccaggatccttggacaatatgagcaagcaaagcagtcaggtttttctgccctttcgctggcaagagctgtcatagaaaaatcagcgctgccaactgtttttagcgaagatacctctgtagaacttatcagtcatatggctgataacctcaattccttagtacttactcacaacctaacaaatcacaaagaaccagtacaacagcttgataaggttcaccctacctggcgaagcgagtttccaataccgttagatgatgaaacaggaacgcattttttgaatggactgctatgcgcagcctctgtagaggctaagcctcgactacaaaaaaataagagtacgcgttgccaattctattggtcagaaaagcatccagatgagcttagggtgatagtatctcttcctgacgaagtttcctttcctgtaactagcgagccgtcaactacgcgctttgaacttgccatttatgaagatggtgaggaagtctctggccttgggccagcctatgcttccctggaaaacagacaggcaacagttcgattacgtaaaagcgaagtgagatttgtcaggcaaaatccatctgcaggtttgtcgttagtggctcgtgctggagggatgattgttgggagcattaaacttgatgacagtgaaattgccattggtgaggtgccgttaaccttcatcgttgatgcagatcaatggctgttacagggacaggcctcctgcagtgtgcgaagcagcgatgttctgattgtgctccctcgggacaatagcactgttgctggttttgatggccaatcgagtgcagtaaacgtattaggacttaaagcgctacctgttaagggatgtcaggacgttacagttacagcaaatgaaacttatcggattcgcaccggaagagaacaaatcagcatcggaaggtttgctctaaatggaaagcgtgcaagctgggtttgtcatccagatgagacatttattggtgtaccaaaagtcatttctacactaccagatattcaaagcattgatgtaacgcgttacctgagcggaatttcaattgagcaatgtcatatacaagagatgctaggggctcaatatctttctatccgtaatagtaataatgaaacgctcttgcgtcgcaaaatcggtatcttgcctgctgatttcagtattgagataaaaggtggaatgcacgcaaatgaaggcactatcgtaatcaccacacagcatccttgtgtagcaacacttaaagataaaacattggaggctacacgtaagcgtactgaggggcgaacagagatacaactcaaagcggaaggggtacctccggcatttattacattacaagttctgcctaatttggcggctgataccatcgacattgagttacctttcccagctaaaggctgccttgctcttgatgtaaacggacgtcctctggataaaaacattacgctgcatgatctgctgggttccagagcattcctgttctccagaaatggtgagccgacaaaatatacattgcagttgcatttgcgctccattagtggattacaggcatggcacgaatggagttatacggcattgagcgagcgtcctgttgaattgaatctctatagtctacgtgaacacattgaaaatctgatttcacttgaggcaggtattgatcaggttgttgagatgcgtattacgggggcgggtgtggtcatggcctggcaaattcgtcgctataaatacagcctgcgctatgattatgaaaaagaactattactcagccagtcagtgaaccatcgtgctggacagattccttcccccgttatcatgctgttaagtgaacccgagaggaaatccattcccttagcatcaagaatgagcgagggagtgcctgtcggtgaatatgagttgagctcaatcgttaacaaaaacggaccatggttggttgttcctaaaccgggtgaagagatggcttttcgcccctgcttcattcgtggcgaatcttcgttaccggtagaagaaagcaacatccgctcattgcagaaagcgacccagctttttaatccacaggcagaagttaataccatcacacgggttctcggacagatggctaacgatcctgcccattccggctggcaatttatgcgtagcctgtacgatcaatttggttatttaccgctggcaacctttgaagtatggcgtgcactagtgcagcatccgcaggcattggcgatgtcgctcttcaaattcgaaatgtcagcagagtatctgagtcgtattgagaatgagttccctattttatgggagtttttctccatctttgagatcaaagctgcatctgagcgtttcaaattgttcctgagccaaaaaggtgcaccggaggaaacccagaaattactggttaccaatatgtttcaacggctggggctcgtgttcccgacatatgccgatgaaattgagaaatggttaagtaatggatatctccccccgtctattcctgaatcttgtgtccacgggtggtatcaggagctcttacgtgagcacagtgaagctcgctggcctgaatacggctgcaagcgtctgtataaatggatgatgtcacaaaaaaatccagtgattggtattaatcctgacgcaaatcaccgctattccgtggcctggttacccgtcttcgccgcagcggtggcaagcggaaatgcttcttttgaatctgtatttgaccgtaaacccggtgccgtatttttcctgaggcaagtcagggatttcgattcccgctggtttaaggccatcttccagttcagcctgttgcgttatgttgctaaaaaataa

SEQ ID NO: 29570 - DNA, 6345 bp, Escherichia coli UMEA 3240-1
atgactacacgctatttttcgtcacttattgaacaatcgttgtctcgttcaactgaagcaacgctcagtatcatgggcgttaccaacccgcagctgcgtgaacatctcgcgcaacaaatgggggctgattgtgggaaaccgggctcattccttgcttctccggtattccagcaaatgtttggatggaaggagtcaaatcacacgatgcgcagcctgacggaaggcaacgcattgttgagcaaagcagtggttgattcactggataatcagagtaatggcaggtaccggtttggtgctgactggaagccttttacacaccagttagccagttggaaagctttgctggaaaagaaacattcagtggtggtaaccagtggtacgggttcaggtaaaacggaatgttttatggtaccggtgctggaagatctttaccgggaactgcatgaaaatggcaacaatccgttggtcggtgtccgagccctttttctctatccattgaacgccctgattaattcacagcgcgagcgtctggatgcctggacgcgtgggtttggtaccgggatccgctactgcctttacaacggcaacaccgaaaacctacacgcttcggtaaaaagcgaacaggcaaaaaggccgaatgaggtgctctcgcgcgaaaaaatgcgtgaagaacctgcgccgattctggtgaccaacggcacgatgctggaatatatgatggttcgccaggtcgacgccccgattatccagcaatctaaagcacaaaaatcactacgctggattgtactggatgaagcgcatacctatgtagggtcgcaggccgctgaactggcgctccagctgcgtcgtgtgatgaccgcgtttggcgtgacaccagatgacgtgcgctttgtcgcgacctctgcgaccattgccggcagcgacgctgaaaagcagctgaaaaaatttctctctgaattatccggtatcccgcaggagcgcatcgatgttctggacggaagtcgggtgattcctgaactggaaccatccaaaaacgtttctcttccgttagacgagatagagcaaatacctgatctggatttaagagataaaaatgataataaaattaaagggataagtcctgagcgcttttatgcgcttacgcattcccccgaagcgcgttacatacgtgagatgttggtcaaacagcccaatccgatgaagctggatgagataacagaacggttaaatgcgctgacaaaacagcattacagccagcaggaagtactgcgttggatcgatgtctgttcagggactcaacctaatgcaaaggatcccgcatttcttaaagtcagggcgcatatcttccagcgtaatacccagggaatatgggcttgtgttgataaagattgcagattaaagcacagtacaccgctcgaaaaaggctggccctttggctatgtgtatgtgaaccagcgacaaaattgtgactgtggaagccctgtgtacgaagttgcattctgcaatgattgtaatgagcctcatcttctggcacgggataaaaagggcaaactagtccagtgggaaaataaaggtggcgatgaattctctttgcaggatgaagtacctgttgaacatgacgctacagaagaaaaagtcgaaaaagagaacagttttcagcctccgttaattattgccgcaggagagaccagcgaggcaggttataccctacaacgcctcgaccgtcagacgcgccgtattggcgttattaacaatgacagcattccgctgattattaatgatattgaacaggtttgtagtgccagtggctgtggctacagaggcatgagtgggaaacagcccttccggcgtgcactattaggtgggccattttacgttactaatatcgtgcccaccgttctagagtattgtcaggactttaccagtgatgaaggcaaagagggcgtcggaccagattcgttgccaggacgaggtcgtcgactcatcacctttacagacagtcgacaagggacagcccgaatggcggtgcgtatgcagcaagaagcagaacgcagtcgcttacgcggaagcgtagtcgaaattctcagctggcatcaaaggacgcaaacgtctacagcgccgaatgccaatgccgatctggaaaaattagcggccagggcgaagcaagcccgtgagcaggcagaagaatatcgaagctggggaatgccagaccaggcgaaattgtcacaagcacaggctgaacagcttgaacaggcttatcaggctgcaaccggtgggaaagccgcgactatcctggtatcccgaacctggacggagatggttaacgagcttaaagagagagctgatatccgcgggccggttctgcaatataaccattatcttaagcctgaagtgtttaatgaaaacggcggcccccttaagctttctgaaatgttgttgttccgggaattcatgcgtcgccctaaacggactaacagcctggaaacacaggggctggttcaggttggttaccaggggctggagaaaatacataagagccccttgcactggcaggaaaaaggattaacgctggatgactggcgcgattttctcaaggttacgttggatctttatgttcgcgaaagcaacttcacacagctggatgatgagctgaaaaactggattggtagccgtttttcatcaaaattcgtccgtaacccggaatcaaaagatcctgaagataatcagaacagacgctggcctcaaattcgtaatggcaacgtatcccatcgtttagcgaagttactgatgctgggggctggattcaaaaccgtcaatacggcgactattgatattatcaatacatggctgaaagaagcatgggcccaacttaccgggccacttgcagtactgaaacccgatggcaaccgtttttatttaccgaaagagcatatgactttttctttaatcacggatgcctggatttgcccggtaaccaataaaatcctggatacggcttttaaaggcttaaccccttatctgcccacccatatttcgttcgagcatcttacccaggcgcaatatgacacttttgtcgcgcagaaagtcaccatgccggaaatctggaagctggatcgttcacaggaagactacgcagagggtctggcaaaagcacgagactgggtcaacaatgatccgctgatcgcacaattgcggtcggaaaacgtctggacagacatcaacgatcgtgtcgtggaaggcggtttctactatcgcactgccgagcactctgcccagcagtcgtcagaacgcctgcaaagctatgaaaagatgttcaagaacgggcaactaaatgttctcaactgttccaccaccatggaaatgggggttgatattgggggcattactgcggtggtaatgaacaacgttccgccacatccggccaactatttacagcgcgccgggcgagccgggcgtagtaaagaatcacgcgcgatctcttataccctatgcaaaggtaacccacacgaccagcaggtttttgccaacccactctggccatttgaaaccatgatcccggcacccatggtcgcgatgaactccgcccgactggtgcaacgtcacgtcaatgcattattactgtctgactttttatgtaacgttattggcgaaaccgataaagagaaaaccagcctcgatagcctctggtttttcggtgaagatgacgggcagtcaaaatgcgaacgctttaaagtctggctggaacgcccggttcttgatatcgacacggcgctggaacggctggtgaaaggtacggcgttgcatggcgcaagagccgaacatctgcgggataaaacaatcaatgcgatcaccttcctgcaacagcggtggctctccgtttatcgcgatctcgtgacccaggagcgtgagtcgcagccgcaaacgccttatcgtaagcgcatagagctggagaagaaacggcactgtggcgagtatctgctgcgcgatctggctgccagaaccttcctgccgggatacggtttcccgacagatgtagtgacgtttgataacttcacgatggaagattatatccgcgaaaaatcgcagaaaagtcgtgataaaaaggaccgtgaagataacgtctcccgttataaaggattaccttcccgtaacctcggtgttgccattcgtgaatatgcaccgggagcagagatcattcttgatggccgtgtcttccgctctgccggtgtctcactgcactggcacaacattaatgctgataccaatgaagcccagcgtctggattgcgcctggcgctgtcacaaatgcgggaccattggctatgaagaggggatgagcagttccgggatgctcttttgctccaacagcgcctgcggcgaaaaaataaccatggataatcgccgtcaggtgttgcagcctgccgggtttgtcaccgatgcacacgctccggtaacgaacaatattgaaaccatgaaattcgtcccggttgtccccgcctgggtctttgttaaagcagagcccgtaccgttgcctaacccgctaatgggttatatggcttctggggctgatgggcatgttttccagcaaagtctgggggaaggtggacacggttatgcattgtgtctgagctgtggccgtgcggagtcgatgctgaatgaaaatgatgctccgaaaagtatggaagctcactatcctccgcgtccgggtaaagcggaccgcgacagccagaatcatcgtctgatttgccccggttcgacagcactcatgaagaacgtcaccctgggcgcactggcgcgcaccgatgtctttgaaatggttctgcgcaaaccacaaaatggcgagtatctgccagataacacagaggaggggcggattgtcgccatgactctggcggttgctctgcgtcaggcgctggcaggcgttctgggtatctccgccgcagaactcggctattctgtacgtccggtcagactggaggatgggcaatcggtattagccgttcagctttatgatgtgatcagtggtggtgcaggttttgcctccagcgcaccggtacacattgaagctatattgcagggaatggtgaaacagttaggctgccgccattgtgatactgcatgtagtgaatgcctgcttgattcccagactcgccacgatcacgatttgctggatcgcaaagttgcgctggcctggcttggcgatgacttcacgtattacatcggtttaccggatgaagagacattctcgctgccggatgcccgctactgccctggcgctattggcgatacgattcgccgggcgattaacgaaggtgctgaaaagcttaccctatggatgaccggcgcgcccaatgagtgggatttatacgcccgtcagttccgcgcagctattcagagctatcggctaaaagacaacgtcgaggtcgatcttgttatccctgcgggagtggatgacccggatctattgcatgaactttcgcaatttactgcgctgggtgtgcggttgtgccatgttgagcaggagctgcaattaccgattgttgcccaggtcacctttgccgatcgcgtgatgacgctggcctctcgcagtcagcaggcaacgattccggggccggagtggcacctgaatgacgaactggtggtgcgtagtctcggttatcaaacggtagaactgaacgagtttattctgcccgctaaagccgccaacgctgtcgagcgggtcaaagacattcagatccacaaacagttgaatggaccactttcgcagtttgggcaacgcttctgggacgtgctgtttaacgaccatgaagaagcgcagtcactgatgaaaaacacgcgaattaccggcgttcactataccgatcgctatctgcaaaacccggttgcgctggcgttgttgggatcaattctgaaaccgctaaaaacaaagctgaccgatggcgctgaagtggcgctggatacgctgtttaaagataaagatcgccccggtaaccggcctttccatgactggatgagcatagcggattttcaggatttcgctgatcagtggtttgctgctgcgctgggcaggccgatagaactgacggtgttcgattcgccgcgcgatatccctcaccatcgtaaactgacggtgacttttgaggatggtcaggtattgaagatccgcttcgatcaggggatgggctactggcgcatcaactttgcatcgcaatggcattactttgatttccgcgatgacgtttctttccagttagtcaaaatggctcaggcctgcaaggaagggaatgtggccaacagcgaagagagctgggcaacggatgtgctggtggaggtgatcgcctcctga

SEQ ID NO: 29571 - DNA, 1002 bp, Escherichia coli UMEA 3240-1
atgaatatgatgatctcatatcaggaacttgttcgcaccttccctagaatgagcgagggagtgcctgtcggtgaatatgagttgagctcaatcgttaacaaaaatgggccatggttggttgttcctaaaccgggtgaggagatggcttttcgtccctgcttcattcgtggcgaatattcgttaccggtagaagaaagcaacatccgctcattgcagaaagcgacccagctttttaatccacaggcagaagttaataccatcacactggttctcggacagatggctaacgatcctgcccattccggctggcaatttatgcgtagcctgtacgatcaattcgggtatttaccactggcaacctttgaagtatggcgtgcactggtgcagcatccgcaggcattggcaatgtcgctcttcaaatttgaaatgtcagcagagtacctgagtcgtattgagaatgagttccctattctatgggagtttttccccatctttgagatcaaagcggcatctgagcgtttcaaattgttcctgagccaaaaaggtgcaccggaggaaacccagaaattactggttactaatatgtttcaacggctggggctcgtgttcccgacatatgccgatgaaattgagaaatggttaagtaacggatatctccccccatctattcctgagtcttttgtccacgtgtggtatcaggagcttttacgtgagcatagtgaagctcaatggccagagtacggcagcaagcggctgcatagctggatggcatcacaaaaaaatccagttattggtattaatcctgacgcaaatcaccgctattccgtggccttgttacccgtcttcgctgcagctgtggcaagcggaaatgcttcttttgaatctgtatttgaccgtaaacccggtgccgtatttttcctgaggcaagtcagggatttcgattcccgctggtttaaggccatcttccagtgcagcctgttgcgttatgttgctaaaaaataa

SEQ ID NO: 29572 - DNA, 6345 bp, Escherichia coli UMEA 3271-1; identical to SEQ ID NO: 29142

SEQ ID NO: 29573 - DNA, 1743 bp, Escherichia coli UMEA 3271-1
atgctgggggctcaatatctttctatccgtaatagtaagaatgaaacgctcttgcgtcgcaaaatcggtattttgcctgctgatttcagtattgagataaaaggtggaatacacgcaaatgaaggcactatcgtaatcaccacacagcatccttgtgtagcaaaacttaaagataaaacattggaggctacacgtaagcgtactgaggggcgaacagagatacaactcaaagcggaaggggtacctccggcatttattacattacaagttctgcctaatttggcggctgaccccatcgatattgagttaccttttcccgctaaaggctgtctcgctcttgatgtaaacggacgtcctctggataaaaacattacgctgcatgatctgctgggttccagagcgtttctgttctccagaaatggcgagccgacaaaatatacattgcagttatatttgcgctccgttagtggattacaggcatggcatgaatggtgttatacggcgttgagcgatcgtcctgttgaattgaatctctatagtctgcgcgaacatattgagaacctgatttcacttgaggcaggtattgatcaggttgttgagatgcgtattacgggggcaggtgtggtcatggcctggcaaattcgtcgctataaatacagcctgcgctatgattatgaaaaagaactattactcagccagtcagtgaaccatcgtgctgggcagattccttcccccgttatcatgctgttaagtgaacccgagaggaaatccattcccttagcatctagaatgagcgagggagtgcctgtcggtgaatatgagttgagctcaatcgttaacaaaaatgggccatggttggttgttcctaaaccgggtgaggagatggcttttcgtccctgcttcattcgtggcgaatattcgttaccggtagaagaaagcaacatccgctcattgcagaaagcgacccagctttttaatccacaggcagaagttaataccatcacactggttctcggacagatggctaacgatcctgcccattccggctggcaatttatgcgtagcctgtacgatcaattcgggtatttaccactggcaacctttgaagtatggcgtgcactggtgcagcatccgcaggcattggcaatgtcgctcttcaaatttgaaatgtcagcagagtacctgagtcgtattgagaatgagttccctattctatgggagtttttccccatctttgagatcaaagcggcatctgagcgtttcaaattgttcctgagccaaaaaggtgcaccggaggaaacccagaaattactggttactaatatgtttcaacggctggggctcgtgttcccgacatatgccgatgaaattgagaaatggttaagtaacggatatctccccccatctattcctgagtcttttgtccacgtgtggtatcaggagcttttacgtgagcatagtgaagctcaatggccagagtacggcagcaagcggctgcatagctggatggcatcacaaaaaaatccagttattggtattaatcctgacgcaaatcaccgctattccgtggccttgttacccgtcttcgctgcagctgtggcaagcggaaatgcttcttttgaatctgtatttgaccgtaaacccggtgccgtatttttcctgaggcaagtcagggatttcgattcccgctggtttaaggccatcttccagtgcagcctgttgcgttatgttgctaaaaaataa

SEQ ID NO: 29574 - DNA, 6345 bp, Escherichia coli UMEA 3329-1; identical to SEQ ID NO: 28446

SEQ ID NO: 29575 - DNA, 1743 bp, Escherichia coli UMEA 3329-1
atgctaggggctcaatatctttctatccgtaatagtaataatgaaacgctcttgcgtcgcaaaatcggtatcttgcctgctgatttcagtattgagataaaaggtggaatgcacgcaaatgaaggcactatcgtaatcaccacacagcatccttgtgtagcaacacttaaagataaaacattggaggctacacgtaagcgtactgaggggcgaacagagatacaactcaaagcggaaggggtacctccggcatttattacattacaagttctgcctaatttggcggctgataccatcgacattgagttacctttcccagctaaaggctgccttgctcttgatgtaaacggacgtcctctggataaaaacattacgctgcatgatctgctgggttccagagcattcctgttctccagaaatggtgagccgacaaaatatacattgcagttgcatttgcgctccattagtggattacaggcatggcacgaatggagttatacggcattgagcgagcgtcctgttgaattgaatctctatagtctacgtgaacacattgaaaatctgatttcacttgaggcaggtattgatcaggttgttgagatgcgtattacgggggcgggtgtggtcatggcctggcaaattcgtcgctataaatacagcctgcgctatgattatgaaaaagaactattactcagccagtcagtgaaccatcgtgctggacagattccttcccccgttatcatgctgttaagtgaacccgagaggaaatccattcccttagcatcaagaatgagcgagggagtgcctgtcggtgaatatgagttgagctcaatcgttaacaaaaacggaccatggttggttgttcctaaaccgggtgaagagatggcttttcgcccctgcttcattcgtggcgaatcttcgttaccggtagaagaaagcaacatccgctcattgcagaaagcgacccagctttttaatccacaggcagaagttaataccatcacacgggttctcggacagatggctaacgatcctgcccattccggctggcaatttatgcgtagcctgtacgatcaatttggttatttaccgctggcaacctttgaagtatggcgtgcactagtgcagcatccgcaggcattggcgatgtcgctcttcaaattcgaaatgtcagcagagtatctgagtcgtattgagaatgagttccctattttatgggagtttttccccatctttgagatcaaagctgcatctgagcgtttcaaattgttcctgagccaaaaaggtgcaccggaggaaacccagaaattactggttaccaatatgtttcaacggctggggctcgtgttcccgacatatgccgatgaaattgagaaatggttaagtaatggatatctccccccgtctattcctgaatcttgtgtccacgggtggtatcaggagctcttacgtgagcacagtgaagctcgctggcctgaatacggctgcaagcgtctgtataaatggatgatgtcacaaaaaaatccagtgattggtattaatcctgacgcaaatcaccgctattccgtggcctggttacccgtcttcgccgcagcggtggcaagcggaaatgcttcttttgaatctgtatttgaccgtaaacccggtgccgtatttttcctgaggcaagtcagggatttcgattcccgctggtttaaggccatcttccagttcagcctgttgcgttatgttgctaaaaaataa

SEQ ID NO: 29576 - DNA, 6345 bp, Escherichia coli UMEA 3355-1; identical to SEQ ID NO: 28446

SEQ ID NO: 29577 - DNA, 3291 bp, Escherichia coli UMEA 3355-1; identical to SEQ ID NO: 28447

SEQ ID NO: 29578 - DNA, 6345 bp, Escherichia coli UMEA 3718-1; identical to SEQ ID NO: 28624

SEQ ID NO: 29579 - DNA, 3291 bp, Escherichia coli UMEA 3718-1; identical to SEQ ID NO: 28625

SEQ ID NO: 29580 - DNA, 6345 bp, Escherichia coli UMEA 4076-1
atgactacacgctatttttcgtcacttattgaacaatcgttgtctcgttcaactgaagcaacgctcagtatcatgggcgttaccaacccgcagctgcgtgaacatctcgcgcaacaaatgggggctgattgtgggaaaccgggctcattccttgcttctccggtattccagcaaatgtttggatggaaggagtcaaatcacacgatgcgcagcctgacggaaggcaacgcattgttgagcaaagcagtggttgattcactggataatcagagtaatggccggtaccgatttggtgctgactggaagccttttacacaccagttagccagttggaaagctttgctggaaaagaaacattcagtggtggtaaccagtggtacgggttcaggtaaaacggaatgttttatggttccggtgctggaagatctttaccgggaactgcatgaaaatggcaacaatccgttggttggtgtccgagccctttttctctatccattgaacgccttgattaattcacagcgcgagcgtctggatgcctggacgcgtggttttggtactgggattcgctactgcttgtataacggaaatacagaagagctccacgcaaaaatgaaaacagtgcaggataatagaccaaatgaagtcttatcccgtgaaaagatgcgtctggagccagccccgattctggtgaccaacggcacgatgctggaatatatgatggttcgccaggtcgacgccccgattatccagcaatccaaagcacaaaaatcactacgctggattgtactggatgaagcgcatacctatgtcgggtcgcaggccgctgaactggcgctccagctgcgtcgtgtgatgacagcgtttggcgtgacgccagatgatgtgcgctttgtagcgacctctgcgaccattgccggcagcgacgccgaaaagcagctgaaaaaatttctctctgaattatccggtatcccgaaggagcgcatcgatgttctggacggaagtcgggtgattcctgaactggaaccatccaaaaacgtttctcttccgttagacgaaatagagcaaatacccgatctggatctaagagataaaaatgataataaaattaaaggtataagtcctgatcgcttttatgcgcttacgcattcccccgaagcgcgttacatacgtgagatgttggtcaaacagcccaatccgatgaagctggatgagataacagagcggttaaacgtgctgacaaaacagcattacagccagcaggaagtactgcgttggatcgatgtctgttcagggactcaacctaatgcaaaggatcccgcatttcttaaagtcagggcgcatatcttccagcgtaatacccagggaatatgggcttgtgttgataaagattgcagattaaagcacggtacaccgctcgaaaaaggctggccctttggctatgtgtatgtgaaccagcgacaaaattgcgactgtggaagccctgtctacgaagtggcgttctgtaatgattgtaatgagcctcatcttctggcacgggacaaaaagggcaaactagttcagtgggaaaataaaggtggcgatgaattctctctgcaggatgaagtacctgttgaacatgacgcgacagaggaaaaagtcgaaaaagagaacagtttccagcctccgttgattattgccgcaggagaaagcagtgaggcaggttataccctacaacgcctcgaccgtcagacgcgccgtattggcgttattaacaatgacagcattccgctgattattaatgatattgaacaggtttgtagcgccagtggctgtggctacagaggcatgagtgggaaacaacccttccggcgtgcattattaggagggccattttacgttactaacatcgtgcctaccgttcttgagtattgtcaggactttaccagtgatgaaggcaaagatggcgtcggaccagattcgttgccagggcgaggacgtcgactcattacctttacggacagtcgacaaggtacagctcgaatggcggtgcgtatgcagcaagaagcagaacgcagtctcttacgcggaagcgtagtcgaaattctgagctggcatcaacggacacaaacgtccacggcgccgaatgccaatgccgatctggaaaaattagcggccagggcgaagcaagcccgtgagcaggcagaagaatatcgaagctggggaatgccagaccaggcgaaattgtcacaagcgcaggctgaacagcttgaacaggcttatcaggctgcaaccggtggaaaagcagcaactaccctggtatcccgcacctggacagaaatggttaacgagcttaaagataaagccgatatccgtggcccggtactgaaatataaccactatttgcagcctgaagtgtttaataaaaacggcgggccactaaagctttcggaaatgttgttgttccgggaattcatgcgtcgccctaaacggactaacagcctggaaacacaggggctggttcaggttggttaccaggggctggagaaaatacataagagccccttgcactggcagggaaaaggattaacgctggatgactggcgcgattttctcaaggttacgctggatcattacgttcgcgagagcaacttcacacagctggatgatgagctgaaaaactggatcggtagccgtttttcatcaaaattcgtccgtaacccggaatcaaaagatcctgaagataatcagaacagacgctggcctcaaattcgtaatggcaatataacccatcgtttagcgaagttgctgatgttgggagccggattcaaaaccgtcaatacggcgactattgatattatcaatacatggctgaaagaagcatgggcccaacttaccggaccgcttgcagtattgaaacccgatggcaaccgtttttatttaccgaaagagcatatgactttttctttaatcacggatgcctggatttgcccggtaaccaataaaatcctgaatacggcttttaaaggcttaaccccttatctgcctacccatatttcgttcgagcatcttacccaggcgcaatatgacagttttgtcgcgcagaaagtcactatgccggaaatctggaagctggatcgttcacaggaagactacgcagaggggctggcgaaagtacgcgactgggtcagcaatcagccgctgatcgcacaattgcggtcggaaaacgtctggacagacattaacgatcgtgtcgttgaaggcggcttctactaccgtacagccgagcactcagcccagcagtcttcagagcgcctgcaaagctatgaaaagatgttcaagaatgggcaacttaatgttctcaactgttcaaccaccatggaaatgggggttgatatcgggggcattactgcggtggtaatgaacaacgttccgccacatccggccaactatttacagcgcgccgggcgagccgggcgtagtaaagaatcacgtgcgatctcttacaccctatgtaaaggtaacccacacgaccagcaggtttttgccaacccgctctggccatttgaaaccatgatcccggcccccatggtcgcgatgaactccgcccgactggtgcaacgtcacgtcaatgcattattactgtccgactttttatgtaacgttattggcgaaaccgataaagaaaaaaccagcctcgatagcctctggtttttcggtgaagatgacgggcagtcaaaatgcgaacgctttaaaatctggctggaacgtccggttcttgatatcgacacggcgctggaacggctggtgaaaggtacggcgttgcatggtgcaagagccgaatatctgcgggataaaacaatcaacgcgatcaccttcctgcaacagcggtggctctccgtttatcgcgatctcgtgacacaagagcgtgagtcgcagccgcaaacgccttatcgtaagcgcatagagctggagaagaaacggcactgtggcgagtatctgctgcgcgatctggctgccagaaccttcctgccgggatacggtttcccgacagatgtagtgacgtttgataacttcacgatggaagattatatccgcgaaaaatcgcagaaaagtcgtgataaaaaggaccgtgaagataacgtttcccgttataaaggattaccttcccgtaacctcggtgttgccattcgtgaatatgcaccgggagcagagatcatccttgatggccgtgtcttccgctctgccggtgtctcactgcactggcacaacattaatgctgataccaatgaagcccagcgtctggattgcgcctggcgctgtcacaaatgcgggaccattggctatgaagaggggatgagcagttccgggatgctcttttgctccaatagcgcctgcggcgaaaaaataatcatggataatcgccgtcaggtgctgcagcctgccgggtttgtcaccgatgcacacgctccggtaacgaacaatattgaaaccatgaaattcgtcccggttgtccccgcgtgggtctttgttaaagcagagcccgtaccgttgcctaacccgctaatgggttatatggcttctggggctgatgggcatgttttccagcaaagtttgggggaaggtggacacggttatgcattgtgtctgagctgtggccgtgctgagtcgatgctgaatgaaaatgatgcgccgaaaagtatggaagctcactatccaccgcgtccgggtaaagcggatcgcgacagccagaatcatcgtctgatttgccccggttcgacggcactcatgaagaacgtcaccctgggcgcactggcgcgtaccgatgtctttgaaatggttctgcgcaaaccgcaaaacggcgagtatctgccagataacacagaggaggggcggattgttgccatgactctggcggttgctctgcgtcaggcgctggcgggcgttctgggtatctccgccgcagaactcggctattctgtacgtccggtcagactggaggatgggcaatcggtattagccgtacagctttatgatgtgatcagcggtggtgcaggttttgcctccagcgcaccggtacacattgaagctatattgcagggaatggtgaaacagttaggctgccgccattgtgagactgcatgtagtgaatgcctgcttgattcccagactcgccacgatcacgatttgctggatcgcaaagcggcgcaggcctggcttggcgatgacttcacgtattacatcggtttaccggatgaagagacattctcgctgccggatgcccgctactgccctggcgccattggcgatacgattcgccgggcgattaacgaaggcgctgaaaagctcaccctgtggatgaccggcgcgcccaatgagtgggatttatacgcacgtcagttccgcgcggcggttcagaactatcggctaaaagacaacgtcgaggtcgatcttgttattcctgcgggagtggatgacccggacctgttgcacgaactatcgcaatttactgcgctgggtgtgcggctatgccatgttgaacaggatttgcaattaccgatcgttgctcaggtcacctttgccgatcgcgtgatgacgctggcctctcgtagccagcaggcaacgattccggggccggagtggcacctgaatgacgaactggtggtacgtagtctcggctataaaacggtagagctgaacgaatttattctgccggctaaagccgccaacgctgtggagcgggtcaaagacattcagatccacaaacagttgaatggaccactgtcgcagtttgggcaacgcttctgggacgtgctgtttaacgaccatgaagaagcgcagtcactgatgaataacacgcgaattaccggcgttcactataccgatcgctatctgcaaaacccggttgcgctggcgttgttgggatcaattctgagaccgctaaaaacaaagctgaccgatggcgctgaagtgacgctggatacgctatttaaagataaaggtcgccccggtaaccggcctttccatgactggatgagcatagcggattttcaggatttcgctgatcagtggtttgcagctgcgctgggcaggccggtagaactgacggtgttcgactcgccgcgcgatatccctcaccatcgtaaactgacggtgacttttgaggatggtcaggtattgaagatccgcttcgatcaggggatgggctactggcgcatcaactttgcatcgcaatggcattactttgatttccgcgatgacgtttctttccagttagtcaaaatggatcaagcttgtcaggaagggaatgtggtcaacagtgaagagagctgggcaacggatgtgctggtggaggtgctcgcctcctga

SEQ ID NO: 29581 - DNA, 3291 bp, Escherichia coli UMEA 4076-1
ttgggtcaatcagaatacatttcatgggtaaaatgtacttcctggctaagtaactttgtgaatcttagagggttgagacaaccggatggccgtcctctttatgaatatcatgcaaccaatgatgaatatacccaattaatgcagctactccgtgcggtcggtcaatcgcaatctaatatatgtaatagggactttgctgcctgttttgttcttttttgctctgagtggtaccgcagggattatgaacggcaatgcggatggacgtgggaccctatatataaaaaaatagggatttcattcaccgccacagagcttggtactatcgtaccgaaagggatggaagattactggctgcgcccaattcgattttatgaatctgaacgacgcaattttctcggaacattattcagtgaaggtggtttacctttccggctactcaaagaatcagacagtcgctttctggctgttttctccaggatccttggacaatatgagcaagcaaagcagtcaggtttttctgccctttcgctggcaagagctgtcatagaaaaatcagcgctgccaactgtttttagcgaagatacctctgtagaacttatcagtcatatggctgataacctcaattccttagtacttactcacaacctaataaatcacaaagaaccagtacaacagcttgagaaggttcaccctacctggcgaagcgagtttccaataccgttagatgatgaaacaggaacgcattttttgaatggactgctatgcgcagcctctgtagaggctaagcctcgactacaaaaaaataagagtacgcgttgccaattctattggtcagaaaagcatccagatgagcttagggtgatagtatctcttccggacgaagtttcctttcctgtaacaagcgagccgtcaactacgcgctttgaacttgccatttgtgaagatggtgaggaagtctctggccttgggccagcctatgcttccctggaaaacagacaggcaacagttcgattacgtaaaagcgaagtgagatttgtcaggcaaaatccatcggcaggtttgtcgttagtggctcgtgctggagggatgattgttgggagtattaaacttgatgacagtgaaattgccattggtgaggtgccgttaaccttcatcgttgatgcagatcaatggctgttacagggacaggcttcttgcagtgtacgaagcagcgatgttctgattgtactccctcgggataatagcaatgttgctggttttgatggccaatcgagcgcagtaaacgtattaggactaaaagcactacctgtgaagggatgtcaggacgttacagttacagcaaatgaaacttatcggattcgcaccggaagagaacaaatcagcatcggaaggtttgctctaaatggaaagcgtgcaagctgggtttgtcatccagatgaaacatttattggtgtaccaaaagtcatttctacactaccggatattcaaagcattgatgtaacgcgttacctgagcggaatttcaattgagcaatgtcatatacaagagatgctgggggctcaatatctttctatccgtaatagtaacaatgaaacgctcttgcgtcgcaaaatcggtatcttgcctgctgatttcagtattgagataaaaggtggaatgcacgcaaatgaaggcactatcttaatcaccacacagcatccttgtgtagcaaaacttaaagataaaacattggaggctacacgtaagcgtactgaggggcgaacagagatacaacttaaagcggaaggggtacctccggcatttattacattacaagttctgcctaatttggcggctgaccccatcgacattgagttaccttttcccgctaaaggctgtctcgctcttgatgtaaacggacgtcctctggataaaaacattacgctgcatgatctgctgggttccagagcgtttctgttctccagaaatggtgagccgacaaaatatacattgcagttgtatttgcgctccgttagtggattacaggcatggcatgaatggtgttatacggcgttgagcgatcgtcctgttgaattgaatctctatagtctgcgcgaacatattgagaacctgatttcacttgaggcaggtattgatcaggttgttgagatgcgtattacgggggcaggtgtggtcatggcctggcaaattcgtcgctataaatacagcctgcgctatgattatgaaaaagaactattactcagccagtcagtgaaccatcgtgctgggcagattccttcccccgttatcatgctgttaagtgaacccgagaggaaatccattcccttagcatctagaatgagcgagggagtgcctgtcggtgaatatgagttgagctcaatcgttaacaaaaatggaccgtggttggttgtccctaaaccgggtgaagagatggcttttcgtccctgcttcattcgtggcgaatcttcgttaccggtagaagaaagcaacatccgctcattgcagaaagcgacccagctttttaatccacaggcagaagttaataccatcacactggttctcggacagatggctaacgatcctgcccattccggctggcaatttatgcgtagcctgtacgatcaattcgggtatttaccactggcaacctttgaagtatggcgtgcactggtgcagcatccgcaggcattggcaatgtcgctcttcaaatttgaaatgtcagcagagtacctgagtcgtattgagaatgagttccctattctatgggagtttttccccatctttgagatcaaagctgcatctgagcgtttcaaattgttcctgagccaaaaaggtgcaccggaggaaacccagaaattactggttactaatatgtttcaacggctggggctcgtgttcccgacatatgccgatgaaattgagaaatggttaagtaacggatatctccctccgtctattcctgaatcttgtgtccacgggtggtatcaggagcttttacgtgagcacagtgaagctcgctggcctgaatatggctgcaagcgtctgtataaatggatgatgtcacaaaaaaatccagtgattggtattaatcctgacgcaaatcaccgctattccgtggcctggttacccgtcttcgctgcagctgtggcaagcggaaatacttcttttgaagctgtatttgaccgtaaacccggtgccgtatttttcctgaggcaagtcagggacttcgattcccgctggtttaagaccatctttcagtgcagcctgttgcgttatgttgctaaaaaataa

SEQ ID NO: 29582 - DNA, 6345 bp, Escherichia coli UMN026; identical to SEQ ID NO: 28560

SEQ ID NO: 29583 - DNA, 3339 bp, Escherichia coli UMN026; identical to SEQ ID NO: 28605

SEQ ID NO: 29584 - DNA, 6315 bp, Escherichia coli Xuzhou21; identical to SEQ ID NO: 28464

SEQ ID NO: 29585 - DNA, 3354 bp, Escherichia coli Xuzhou21; identical to SEQ ID NO: 28793

SEQ ID NO: 29586 - DNA, 6342 bp, Escherichia fergusonii
atgactacacgctatttttcgtcacttattgaacaatcgttgtctcgttcaactgaagcaacgctcagtatcatgggcgttaccaacccgcagctgcgtgaacatctcgcgcaacaaatgggggctgattgtgggaaaccgggctcattccttgcttctccggtattccagcaaatgtttggatggaaggagtcaaatcacacgatgcgcagcctgacggaaggcaacgcattgttgagcaaagcagtggttgattcactggataatcagagtaatggccggtaccgatttggtgctgactggaagccttttacacaccagttagccagttggaaagctttgctggaaaagaaacattcagtggtggtaaccagtggtacgggttcaggtaaaacggaatgttttatggttccggtgctggaagatctttaccgggaactgcatgaaaatggcaacaatccgttggtcggtgtccgagccctttttctctatccattgaacgccttgattaattcacagcgcgagcgtctggatgcctggacgcgtggttttggtactgggatccgctactgcttgtataacggaaatacagaagagctccacgcaaaaatgaaaacagtgcaggataatagaccaaatgaagtcttatcccgtgaaaagatgcgtctggagccagccccgattctggtgaccaacggcacgatgctggaatatatgatggttcgccaggtcgacgccccgattatccagcaatccaaagcacaaaaatcactacgctggattgtactggatgaagcgcatacctatgtcgggtcgcaggccgctgaactggcactccagctgcgtcgtgtgatgacagcgtttggcgtgacgccagatgatgtgcgctttgtagcgacctctgcgaccattgccggcagcgacgccgaaaaacagctgaaaaaatttctctctgaattatccggtatcccgcaggagcgcatcgatattctggacggaagtcgggtgattcctgaactggaaccatccaaaaacgtttctgttccgttagacgaaatagagcaaatacctgatctggatctaaaagataaaaatgataataaaattaaagggataagtcctgagcgcttttatgcgcttacgcactcccccgaagcgcgttacatacgtgaaatgttggttagccaacctaatccaatgaaactggatgagatgacgcagcggttaaatgcgctgacaaaacagcattacagccagcaggaagtactgcgttggatcgatgtctgttcagggactcaacctaatgcaaaggagcccgcatttcttaaagtcagggcgcatatcttccagcgtaatacccagggaatatgggcttgtgttgataaagattgcagattaaagcacggtacaccgctcgaaaaaggctggccctttggctatgtgtatgtgaaccagcgacaaaattgcgactgtggaagccctgtctacgaagtggcgttctgtaatgattgtaatgagcctcatcttctggcgcaggacaaaaagggcaaacttgtccaatgggaaaataaaggtggcgatgagttctccttgcaggatgaagtacctgttgaacatgacactacagaggaaaaagtcgaaaaagagaacggtttccagcctccgttgattattgccgcaggagagaccagcgagacaggctataccctacaacgcctcgaccgtcagacgcgccgtattggcgttattaacaatgacagcattccgctgattattaatgataaaaaggtttgtggcgccagtggctgtggctacagcggcgtgagcgggaaacagcccttccggcgtgcactattaggtgggccattttacgttactaatatcgtgcccaccgttctagagtattgtcaggactttaccagtgatgaaggcaaagagggcgtcggaccagattcgttgccagggcgaggacgtcgactcattacctttacggacagtcgacaaggtacagctcgaatggcggtgcgtatgcagcaagaagcagaacgcagtctcttacgcggaagcgtagtcgaaattctgagctggcatcaacggacgcaaacgtccacggcgccgaatgccaatgccgatctggaaaaattagcggccagggcgaagcaagcccgtgagcaggcagaagaatatcgaagctggggaatgccagaccaggcgaaattgtcacaagcgcaggctgaacagcttgaacaggcttatcaggctgcaaccggtggaaaagcagcaactaccctggtatcccgcacctggacagaaatggttaacgagcttaaagataaagccgatatccgtggcccggtactgaaatataaccactatttgcagcctgaagtgtttaataaaaacggcgggcctctaaagctttcggaaatgttgttgttccgggaattcatgcgccgccctaaacggactaacagcctggaaacacaagggctggttcaggttggttacctgggactggagaaaatacataagctccctctgcactggcaggaaagggaattaacgctggatgactggcgcgattttctcaaggttacgttggatcattacgttcgcgagagcaacttcacacagctggatgatgagctgaaaaactggattggtagccgtttttcatcaaaattcgtccgtaacccggaatcaaaagatcctgaagataatcagaatagacgctggcctcaaattcgtaatggcaacgtatcccatcgtttagcgaagttactgatgctgggggctggattcaaaaccgtcaatacggcgactattgatattatcaatacatggctgaaagaagcatgggcccaacttaccggaccgcttgcagtactgaaacccgatggcaaccgtttttatttaccgaaagagcatatgactttttctttaatcacggatgcctggatttgcccggtaaccaataaaatcctggatacggcttttaaaggcttaaccccttatctgcctacccatatttcgttcgagcatcttacccaggcgcaatatgacacttttgtcgcgcagaaagtcaccatgccggaaatctggaagctggatcgttcacaggaagactacgcagagggtctggcaaaagcacgcgactgggtcagccatgatccgctgatcgcacaattgcggtcggaaaacgtctggacagacattaacgatcgtgtcgtggaaggaggcttctactatcgtactgccgagcactctgcccagcagtcgtcagaacgtctgcaaagctatgaaaagatgttcaagaatgggcaactaaatgttctcaactgttccaccaccatggaaatgggggttgatatcgggggcattactgcggtggtaatgaacaacgtaccgccacatccggccaactatttacagcgcgccgggcgagccgggcgtagtaaagaatcacgtgcgatctcttacaccctatgtaaaggtaacccacacgaccagcaggtttttgccaacccactctggccatttgaaaccatgatcccggcacccatggtcgcgatgaactccgcccgactggtgcaacgtcacgtcaatgcattattactgtccgactttttatgtaacgttattggcgaaaccgataaagaaaaaaccagcctcgatagcctctggtttttcggtgaagatgacgggcagtcaaaatgcgaacgctttaaaatctggctggaacgtccggttcttgatatcgacacggcgctggaacggctggtgaaaggtacggcgttgcatggtgcaagagccgaatatctgcgggataaaacaatcaacgcgatcaccttcctgcaacagcggtggctctccgtttatcgcgatctcgtgacacaggagcgtgagtcgcagccgcaaacgccttatcgtaagcgcatagagctggagaagaaacggcactgtggcgagtatctgctgcgcgatctggctgccagaaccttcctgccgggatacggtttcccgacagatgtagtgacgtttgataacttcacgatggaagattatatccgcgaaaaatcgcagaaaagtcgtgataaaaaggaccgtgaagataacgtttcccgttataaaggattaccttcccgtaacctcggtgttgccattcgtgaatatgcaccgggagcagagatcatccttgatggccgtgtcttccgctctgccggtgtctcactgcactggcacaacattaatgctgataccaatgaagcccagcgtctggattgcgcctggcgctgtcacaaatgcgggaccattggctatgaagaggggatgagcagttccgggatgctcttttgctccaatagcgcctgcggcgaaaaaataatcatggataatcgccgtcaggtgctgcagcctgccgggtttgtcaccgatgcacacgctccggtaacgaacaatattgaaaccatgaaattcgtcccggttgtccccgcgtgggtctttgttaaagcagagcccgtaccgttgcctaacccgctaatgggttatatggcttctggggctgatgggcatgttttccagcaaagtttgggggaaggtggacacggttatgcattgtgtctgagctgtggccgtgctgagtcgatgctgaatgaaaatgatgcgccgaaaagtatggaagctcactatccaccgcgtccgggtaaagcggatcgcgacagccagaatcatcgtctgatttgccccggttcgacggcactcatgaagaacgtcaccctgggcgcactggcgcgtaccgatgtctttgaaatggttctgcgcaaaccgcaaaacggcgagtatctgccagataacacagaggaggggcggattgttgccatgactctggcggttgctctgcgtcaggcgctggcgggcgttctgggtatctccgccgcagaactcggctattctgtacgtccggtcagactggaggatgggcaatcggtattagccgtacagctttatgatgtgatcagcggtggtgcaggttttgcctccagcgcaccggtacacattgaagctatattgcagggaatggtgaaacagttaggctgccgccattgtgagactgcatgtagtgaatgcctgcttgattcccagactcgccacgatcacgatttgctggatcgcaaagcggcgctggcctggcttggcgatgacttcacgtattacatcggtttaccggatgaagagacattctcgctgccggatgcccgctactgtcctggcgccattggcgatacgattcgccgggcgattaacgaaggcgctgaaaagctcaccctgtggatgaccggcgcgcccaatgagtgggatttatacgcccgtcagttccgcgcggcggttcagaactatcggctaaaagacaacgtcgaggtcgatcttgttattcctgcgggagtggatgacccggacctgttgcatgaactatcgcaatttactgcgctgggtgtgcggctgtgccatgttgaacaggatctgcaattaccgatcgttgcccaggtcacctttgccgatcgcgtgatgacgctggcctctcgcagccagcaggcaacgattccggggcctgagtggcacctgaatgacgaactggtggtgcgtagtctcggttataaaacggtagaactgaacgagtttattctgccggctaaagccaccaacgctgtcgagcgggtcaaagacattcagatccacaaacagttgaatggaccactgtcgcagtttgggcaacgcttctgggacgtgctgtttaacgaacatgaagaagcgcagtcactgatgaataacacgcgaattaccggcgttcactataccgatcgctatctgcaaaacccggttgcgcaggcgttgttgggatcaattctgagaccgctaaaaacaaagctgaccgatggcgctgaagtgacgctggatacgctatttaaagataaagatcgccccggtaaccggcctttccatgactggatgagcatagcggattttcaggatttcgctgatcagtggtttgctgctgcgctgggcaggccggtagaactgacggtgttcgactcgccgcgcgatatccctcaccatcgtaaactgacggtgacttttgaggatggtcaggtattgaagatccgcttcgatcaggggatgggctactggcgcatcaacttttcatcgcaatggcattactttgatttccgcgatgacgtttctttccagttagtcaaaatggatcaagcttgtcaggaagggaatgtggtcaacagtgaagagagctgggcaacggatgtgctggtggaggtgatcgcctcctga

SEQ ID NO: 29587 - DNA, 3291 bp, Escherichia fergusonii
ttgggtcaatcagaatacatttcatgggtaaaatgtacttcctggctaagtaactttgtgaatcttagagggttgagacaaccggatggccgtcctctttatgaatatcatgcaaccaatgatgaatatacccaattaacgcagctactccgtgcagtcggtcaatcacaatctaatatatgtaatagggactttgctgcctgttttgttcttttttgctctgagtggtaccgcagggattatgaacggcaatgcggatggacgtgggaccctatatataaaaaaatagggatttcattcaccgccacagagcttggtactatcgtaccgaaagggatggaagattactggctgcgcccaattcgattttatgaatctgaacgacgcaattttctcggaacattattcagtgaaggtggtttacctttccggctactcaaagaatcagacagtcgctttctggctgttttctccaggatccttggacaatatgagcaagcaaagcagtcaggtttttcagccctttcgctggcaagagctgtcatagaaaaatcagcgctgcctactgtttttagcgaagatacctctgtagaacttatcagtcatatggctgataacctcaattccttagtacttactcacaacctaataaatcacaaagaaccagtacaacagcttgataaggttcaccctacctggcgaagcgagtttccaataccgttagatgatgatacaggaacgcattttttgaatggactgctatgcgcagcctctgtagaggctaagcctcgactacaaaaaaataagagtacgcgttgccaattctattggtcagaaaagcatccagatgagcttagggcgatagtatctctccctgacgaagtttcctttcctgtaacaagcgagccgtcaactacgcgctttgaacttgccatttgtgaagatggtgaggaagtctctggccttgggccagcctatgcttccctggaaaatagacaggcaacagttcgattacgtaaaagcgaagtgagatttgtcaggcaaaatccatcggcaggtttgtcgttagtggctcgtgctggagggatgattgttgggagcattaaacttgatgacagtgaaattgccattggtgaggtgccgttaaccttcatcgttgatgcagatcaatggctgttacagggacaggcttcttgcagtgtacgaagcagcgatgttctgattgtactccctcgggataatagcaatgttgctggttttgatggccaatcgagcgcagtaaacgtattaggactaaaagcactacctgtgaagggatgtcaggacgttacagttacagcaaatgaaacttatcggattcgcaccggaagagaacaaatcagcatcggaaggtttgctctaaatggaaagcgtgcaagctgggtttgtcatccagatgaaacatttattggtgtaccaaaagtcatttctacactaccggatattcaaagcattgatgtaacgcgttacctgagcggaatttcaattgagcaatgtcatatacaagagatgctgggggctcaatatctttctatccgtaatagtaataatgaaacgctcttgcgtcgcaaaatcggtatcttgcctgctgatttcagtattgagataaaaggtggaatgcacgcaaatgaaggcactatcttaatcaccacacagcatccttgtgtagcaaaacttaaagataaaacattggaggctacacgtaagcgtactgaggggcgaacagagatacaacttaaagcggaaggggtacctccggcatttattacattacaagttctgcctaatttggcggctgaccccatcgacattgagttaccttttcccgctaaaggctgtctcgctcttgatgtaaacggacgtcctctggataaaaacattacgctgcatgatctgctgggttccagagcgtttctgttctccagaaatggtgagccgacaaaatatacattgcagttgtatttgcgctccgttagtggattacaggcatggcatgaatggtgttatacggcgttgagcgatcgtcctgttgaattgaatctctatagtctgcgcgaacatattgagaacctgatttcacttgaggcaggtattgatcaggttgttgagatgcgtattacgggggcaggtgtggtcatggcctggcaaattcgtcgctataaatacagcctgcgctatgattatgaaaaagaactattactcagccagtcagtgaaccatcgtgctgggcagattccttcccccgttatcatgctgttaagtgaacccgagaggaaatccattcccttagcatctagaatgagcgagggagtgcctgtcggtgaatatgagttgagctcaatcgttaacaaaaatggaccgtggttggttgtcccaaaaccgggtgaagagatggcttttcgtccctgcttcattcgtggcgaatcttcgttaccggtagaagaaagcaacatccgctcattgcagaaagcgacccagctttttaatccacaggcagaagttaataccatcacactggttctcggacagatggctaacgatcctgcccattccggctggcaatttatgcgtagcctgtacgatcaattcgggtatttaccactggcaacctttgaagtatggcgtgcactggtgcagcatccgcaggcattggcaatgtcgctcttcaaatttgaaatgtcagcagagtacctgagtcgtattgagaatgagttccctattctatgggagtttttccccatctttgagatcaaagcggcatctgagcgtttcaaattgttcctgagccaaaaaggtgcaccggaggaaacccagaaattactggttactaatatgtttcaacggctggggctcgtgttcccgacatatgccgatgaaattgagaaatggttaagtaacggatatctccccccatctattcctgagtcttttgtccacgtgtggtatcaggagcttttacgtgagcatagtgaagctcaatggccagagtacggcagcaagcggctgcatagctggatggcatcacaaaaaaatccagttattggtattaatcctgacgcaaatcaccgctattccgtggccttgttacccgtcttcgctgcagctgtggcaagcggaaatgcttcttttgaatctgtatttgaccgtaaacccggtgctgtatttttcctgaggcaagtcagggatttcgattcccgctggtttaaggccatcttccagtgcagcctgttgcgttatgttgctaaaaaataa

SEQ ID NO: 29588 - DNA, 6342 bp, Escherichia fergusonii ATCC 35469
atgactacacgctatttttcgtcacttattgaacaatcgttgtctcgttcaactgaagcaacgctcagtatcatgggtgttacaaacccgcagttgcgcgaacatctcgcgcagcaaatgggggctgattgcgggaaaccgggctcattccttgcctctccggtattccagcaaatgtttggctggaaggagtcaaaccacacgatgcgcagcctgacggaaggcaacgcattgttgagcaaagcagtggttgattcactggatgatcagaataatggccggtaccggtttggtgctgactggaggccttttacgcaccagttagccagttggaaagctttgctggaaaagaaacattcagtggtggtaaccagtggtacgggttcaggtaaaacggaatgttttatggtaccggtgctggaagatctttaccgggaactgcatgaaaatggcaacaatccgttggtcggtgtccgagccctttttctctatccattgaacgccctgattaattcacagcgcgagcgtctggatgcctggacgcgtggttttggtactgggatccgctactgcttgtataacggaaatacagaagagctccacgcaaaaatgaaaacagtgcaggataatagaccaaatgaagtcttatcccgtgaaaagatgcgtctggagccagccccgattctggtgaccaacggcacgatgctggaatatatgatggttcgccaggtcgactccccgattatccagcaatccaaagcacaaaaatcactacgctggattgtactggatgaagcgcatacctatgtcgggtcgcaggccgctgaactggcactccagctgcgtcgtgtgatgacagcgtttggcgtgacgccagatgatgtgcgctttgtagcgacctctgcgaccattgccggcagcgacgccgaaaaacagctgaaaaaatttctctctgaattatccggtatcccgcaggagcgcatcgatattctggacggaagtcgggtgattcctgaactggaaccatccaaaaacgtttctgttccgttagacgaaatagagcaaatacctgatctggatctaaaagataaaaatgataataaaattaaagggataagtcctgagcgcttttatgcgcttacgcattcccccgaagcgcgttacatacgtgagatgttggtcaaacagcccaatccgatgaagctggatgagataacagaacggttaaacgtgctgacaaaacagcattacagccagcaggaagtactgcgttggatcgatgtctgttcagggactcaacctaatgcaaaggatcccgcatttcttaaagtcagggcgcatatcttccagcgtaatacccaaggaatatgggcttgtgttgataaagattgcagattaaagcacggtacaccgctcgaaaaaggctggccctttggctatgtgtatgtgaaccagcgacaaaattgcgactgtggaagccctgtctacgaagtggcgttctgtaatgattgtaatgagcctcatcttctggcgcaggacaaaaagggcaaacttgtccaatgggaaaataaaggtggcgatgagttctccttgcaggatgaagtacctgttgaacatgacactacagaggaaaaagtcgaaaaagagaacggtttccagcctccgttgattattgccgcaggagagaccagcgagacaggctataccctacaacgcctcgaccgtcagacgcgccgtattggcgttattaacaatgacagcattccgctgattattaatgataaaaaggtttgtggcgccagtggctgtggctacagcggcgtgagcgggaaacagcccttccggcgtgcactattaggtgggccattttacgttactaatatcgtgcccaccgttctagagtattgtcaggactttaccagtgatgaaggcaaagagggcgtcggaccagattcgttgccaggacgaggtcgtcgactcatcacctttacagacagtcgacaagggacagcccgaatggcggtgcgtatgcagcaagaagcagaacgcagtcgcttacgcggaagcgtagtcgaaattctcagctggcatcaaaggacgcaaacgtctacagcgccgaatgccaatgccgatctggaaaaattagcggccagggcgaagcaagcccgtgagcaggcagaagaatatcgaagctggggaatgccagaccaggcgaaattgtcacaagcacaggctgaacagcttgaacaggcttatcaggctgcaaccggtgggaaagccgcgactatcctggtatcccgaacctggacggagatggttaacgagcttaaagagagagccgatatccgcgggccggttctgcaatataaccattatcttaagcctgaagtgtttaatgaaaacggtggcccccttaagctttctgaaatgttgttgttccgggaattcatgcgtcgccctaaacggactaacagcctggaaacacaagggctggttcaggttggttaccaggggctggagaaaatacataagagccccttgcactggcaggaaaaaggattaacgctggatgactggcgcgattttctcaaggttacgttggatcattacgttcgcgagagcaacttcacacagctggatgatgagctgaaaaactggattggtagccgtttttcatcaaaattcgtccgtaacccggaatcaaaagatcctgaagataatcagaacagacgctggcctcaaattcgtaatggcaacgtatcccatcgtttagcgaagttgctgatgctgggggctggattcaaaatcgtcaatgcggcaactattgatattatcaatacatggctgaaagaagcatgggcccaacttaccggaccgcttgcagtactgaaacccgatggcaaccgtttttatttaccgaaagagcatatgactttttctttaatcacggatgcctggatttgcccggtaaccaataaaatcctggatacggcttttaaaggcttaaccccttatctgcctacccatatttcgttcgagcatcttacccaggcgcaatatgacacttttgtcgcgcagaaagtcaccatgccggaaatctggaagctggatcgttcacaggaagactacgcagagggtctggcaaaagcacgcgactgggtcagcaatgatccgctgatcgcacaattgcggtcggaaaacgtctggacagacatcaacgatcgtgtcgtggaaggcggcttctactatcgtactgccgagcactctgcccagcagtcgtcagaacgtctgcaaagctatgaaaagatgttcaagaatgggcaactaaatgttctcaactgttccaccaccatggaaatgggggttgatatcgggggcattactgcggtggtaatgaacaacgtaccgccacatccggccaactatttacagcgcgccgggcgagccgggcgtagtaaagaatcacgtgcgatctcttacaccctatgtaaaggtaacccacacgaccagcaggtttttgccaacccgctctggccatttgaaaccatgatcccggcacccatggtcgcgatgaactccgcccgactggtgcaacgtcacgtcaatgcattattactgtccgactttttatgtaacgttattggcgaaaccgataaagaaaaaaccagcctcgatagcctctggtttttcggtgaagatgacgggcagtcaaaatgcgaacgctttaaaatctggctggaacgtccggttcttgatatcgacacggcgctggaacggctggtgaaaggtacggcgttgcatggtgcaagagccgaatatctgcgggataaaacaatcaacgcgatcaccttcctgcaacagcggtggctctccgtttatcgcgatctcgtgacacaggagcgtgagtcgcagccgcaaacgccttatcgtaagcgcatagagctggagaagaaacggcactgtggcgagtatctgctgcgcgatctggctgccagaaccttcctgccgggatacggtttcccgacagatgtagtgacgtttgataacttcacgatggaagattatatccgcgaaaaatcgcagaaaagtcgtgataaaaaggaccgtgaagataacgtttcccgttataaaggattaccttcccgtaacctcggtgttgccattcgtgaatatgcaccgggagcagagatcatccttgatggccgtgtcttccgctctgccggtgtctcactgcactggcacaacattaatgctgataccaatgaagcccagcgtctggattgcgcctggcgctgtcacaaatgcgggaccattggctatgaagaggggatgagcagttccgggatgctcttttgctccaatagcgcctgcggcgaaaaaataatcatggataatcgccgtcaggtgctgcagcctgccgggtttgtcaccgatgcacacgctccggtaacgaacaatattgaaaccatgaaattcgtcccggttgtccccgcgtgggtctttgttaaagcagagcccgtaccgttgcctaacccgctaatgggttatatggcttctggggctgatgggcatgttttccagcaaagtttgggggaaggtggacacggttatgcattgtgtctgagctgtggccgtgctgagtcgatgctgaatgaaaatgatgcgccgaaaagtatggaagctcactatccaccgcgtccgggtaaagcggatcgcgacagccagaatcatcgtctgatttgccccggttcgacggcactcatgaagaacgtcaccctgggcgcactggcgcgtaccgatgtctttgaaatggttctgcgcaaaccgcaaaacggcgagtatctgccagataacacagaggaggggcggattgttgccatgactctgacggttgctctgcgtcaggcgctggcgggcgttctgggtatctccgccgcagaactcggctattctgtacgtccggtcagactggaggatgggcaatcggtattagccgtacagctttatgatgtgatcagcggtggtgcaggttttgcctccagcgcaccggtacacattgaagctatattgcagggaatggtgaaacagttaggctgccgccattgtgagactgcatgtagtgaatgcctgcttgattcccagactcgccacgatcacgatttgctggatcgcaaagcggcgctggcctggcttggcgatgacttcacgtattacatcggtttaccggatgaagagacattctcgctgccggatgcccgctactgtcctggcgccattggcgatacgattcgccgggcgattaacgaaggcgctgaaaagctcaccctgtggatgaccggcgcgcccaatgagtgggatttatacgcccgtcagttccgcgcggcggttcagaactatcggctaaaagacaacgtcgaggtcgatcttgttattcctgcgggagtggatgacccggacctgttgcatgaactatcgcaatttactgcgctgggtgtgcggctgtgccatgttgaacaggatctgcaattaccgatcgttgcccaggtcacctttgccgatcgcgtgatgacgctggcctctcgcagccagcaggcaacgattccggggcctgagtggcacctgaatgacgaactggtggtgcgtagtctcggttataaaacggtagaactgaacgagtttattctgccggctaaagccaccaacgctgtcgagcgggtcaaagacattcagatccacaaacagttgaatggaccactgtcgcagtttgggcaacgcttctgggacgtgctgtttaacgaacatgaagaagcgcagtcactgatgaataacacgcgaattaccggcgttcactataccgatcgctatctgcaaaacccggttgcgctggcgttgttgggatcaattctgagaccgctaaaaacaaagctgaccgatggcgctgaagcgacgctggatacgctatttaaagataaagatcgccccggtaaccggcctttccatgactggatgagcatagcggattttcaggatttcgctgatcagtggtttgctgctgcgctgggcaggccggtagaactgacggtgttcgactcgccgcgcgatatccctcaccatcgtaaactgacggtgacttttgaggatggtcaggtattgaagatccgcttcgatcaggggatgggctactggcgcatcaacttttcatcgcaatggcattactttgatttccgcgatgacgtttctttccagttagtcaaaatggctcaggcctgcaaggaagggaatgtcgccaacagcgaagagagttgggcaacggatgtgctggtggaggtgatcgccttctga

SEQ ID NO: 29589 - DNA, 3339 bp, Escherichia fergusonii ATCC 35469
atgttgtggggttttgtttttgtatcttttatctctaaggagcttgctttgggtcaatcagaatacatttcatgggtaaaatgtacttcctggctaagtaactttgtgaatcttagagggttgagacaaccggatggccgtcctctttatgaatatcatgcaaccaatgatgaatatacccaattaacgcagctactccgtgcagtcggtcaatcacaatctaatatatgtaatagggactttgctgcctgttttgttcttttttgctctgagtggtaccgcagagattatgaacggcaatgcggatggacgtgggaccctatatataaaaaaatagggatttcattcaccgccacagagcttggtactatcgtaccgaaagggatggaagattactggctgcgcccaattcgattttatgaatctgaacgacgcaattttctcggaacattattcagtgaaggtggtttacctttccggctactcaaagaatcagacagtcgctttctggctgttttctccaggatccttggacaatatgagcaagcaaagcagtcaggtttttctgccctttcgctggcaagagctgtcatagaaaaatcagcgctgcctactgtttttagcgaagatacctctgtagaacttatcagtcatatggctgataacctcaattccttagtacttacccacaacctaataaatcacaaagaaccagtacaacagcttgataaggttcaccctacctggcgaagcgagtttccaataccgttagatgatgaaacaggaacgcattttttgaatggactgctatgcgcagcctctgtagaggctaagcctcgactacaaaaaaataagagtacgcgttgccaattttattggtcagaaaagcatccagatgagcttagggcgatagtatctcttcctgacgaagtttcctttcctgtaacaagcgagccgtcaactacgcgctttgaacttgccatttgtgaagatggtgaggaagtctctggccttgggccagcctatgcttctctggaaaacagacaggcaacagttcgattacgtaaaagcgaagtgagatttggcaggcaaaatccatcggcaggtttgtcgttagtggctcgtgctggagggatgattgttgggagcattaaacttgatgacagtgaaattgccattggtgaggtgccgttaactttcatcgttgatgcagatcaatggctgttacagggacaggcttcttgcagtgtgcgaagcagcgatgttctgattgtgctccctcgggataatagcaatgttgctggttttgatggccaatcgagcgcagtaaacgtattaggactaaaagcactacctgttaagggatgtcaggacgttacagttacagcaaatgaaacttatcggattcgcaccggaagagaacaaatcagcttcggaaggtttgctctaaatggaaagcgtgcaagctgggtttgtcatccagatgaaacatttattggtgtaccaaaagtcatttctacactaccagatattcaaagcattgatgtaacgcgttacctgagcggaatttcaattgagcaatgtcatatacaagagatgctgggggctcaatatctttctatccgtaatagtaagaatgaaacgctcttgcgtcgcaaaatcggtattttgcctgctgatttcagtattgagataaaaggtggaatacacgcaaatgaaggcactatcgtaatcaccacacagcatccttgtgtagcaaaacttaaagataaaacattggaggctacacgtaagcgtactgaggggcgaacagagatacaactcaaagcggaaggggtacctccggcatttattacattacaagttctgcctaatttggcggctgaccccatcgatattgagttaccttttcccgctaaaggctgtctcgctcttgatgtaaacggacgtcctctggataaaaacattacgctgcatgatctgctgggttccagagcgtttctgttctccagaaatggcgagccgacaagatatacattgcagttgcatttgcgctccgttagtggattacaggcatggcacgaatggtgttatacggcgttgagcgatcgtcctgttgaattgaatctctatagtctgcgcgaacatattgagaacctgatttcacttgagacaggtattgatcaggttgttgagatgcgtattacgggggcgggtgtggtcatggcctggcaaattcgtcgctataaatacagtctgcgctatgattatgaaaaagaactattactcagccagtcagtgaaccatcgtgctggacagattccttcccccgttatcatgctgttaagtgaacctgagaggaaatccatccccttagcatcaagaatgagcgagggagtgcctgtcggtgaatatgagttgagctcaatcgttaacaaaaatgggccatggttggttgttcctaaaccgggtgaggagatggcttttcgcccctgcttcattcgtggcgaatcttcgttaccggtagaagaaagcaacatccgctcattgcagaaagcgacccagctttttaatccacaggcagaagttaataccatcacactggttctcggacagatggctaacgatcctgcccattccggctggcaatttatgcgtagcctgtacgatcaatttggttatttaccgctggcaacctttgaagtatggcgtgcactagtgcagcatccgcaggcattggcgatgtcgctcttcaaattcgaaatgtcagcagagtatctgagtcgtattgagaatgagttccctattctatgggagtttttccccatctttgagatcaaagccgcatctgagcgtttcaaattgttcctgagccaaaaaggtgcaccggaggaaacccagaaattactggttactaatatgtttcaacggctggggctcgtgttcccgacatatgccgatgaaattgagaaatggttaagtaacggatatctccctccgtctattcctgaatcttgtgtccacgggtggtatcaggagcttttacgtgagcacagtgaggctcgctggcctgaatatggctgtaagcgtctttataaatggatgatgtcacaaaaaaatccagtgattggtattaatcctgacgcagactaccgttattccgtggcctggttacccgtcttcgctgcagctgtggcaagcggaaatacttcttttgaagctgtatttgaccgtaaacccggtgccgtatttttcctgaggcaagtcagggacttcgattctcgctggtttaagactatcttccagtgcagcctgttgcgttatattgctaaaaaataa

SEQ ID NO: 29590 - DNA, 6345 bp, Escherichia fergusonii B253
atgactacacgctatttttcgtcacttattgaacaatcgttgtctcgttcaactgaagcaacgctcagtatcatgggcgttaccaacccgcagctgcgtgaacatctcgcgcaacaaatgggggctgattgtgggaaaccgggctcattccttgcttctccggtattccagcaaatgtttggatggaaggagtcaaatcacacgatgcgcagcctgacggaaggcaacgcattgttgagcaaagcagtggttgattcactggataatcagagtaatggccggtaccgatttggtgctgactggaagccttttacacaccagttagccagttggaaagctttgctggaaaagaaacattcagtggtggtaaccagtggtacgggttcaggtaaaacggaatgttttatggttccggtgctggaagatctttaccgggaactgcatgaaaatggcaacaatccgttggtcggtgtccgagccctttttctctatccattgaacgccttgattaattcacagcgcgagcgtctggatgcctggacgcgtggttttggtactgggatccgctactgcttgtataacggaaatacagaagagctccacgcaaaaatgaaaacagtgcaggataatagaccaaatgaagtcttatcccgtgaaaagatgcgtctggagccagccccgattctggtgaccaacggcacgatgctggaatatatgatggttcgccaggtcgacgccccgattatccagcaatctaaagcacaaaaatcactacgctggattgtactggatgaagcgcatacctatgtcgggtcgcaggccgctgaactggcgctccagctgcgtcgtgtgatgacagcgtttggcgtgacaccagatgacgtgcgctttgtagcgacctctgcgaccattgccggcagcgacgctgaaaagcagctgaaaaaatttctctctgaattatccggtatcccgcaggagcgcatcgatgttctggacggaagtcgggtgattcctgaactggaaccatccaaaaacgtttctcttccgttagacgagatagagcaaatacctgatctggatctaagagacaaaaatgataataaaattaaagggataagtcctgagcgcttttatgcgcttacgcattcccccgaagcgcgttacatacgtgagatgttggtcaaacagcccaatccgatgaagctggatgagataacagaacggttaaacgtgctgacaaaacagcattacagccagcaggaagtactgcgttggatcgatgtctgttcagggactcaacctaatgcaaaggatcccgcatttcttaaagtcagggcgcatatcttccagcgtaatacccagggaatatgggcttgtgttgataaagattgcagattaaagcacggtacaccgctcgaaaaaggctggccctttggctatgtgtatgtgaaccagcgacaaaattgtgactgtggaagccctgtatacgaagttgcattctgcaatgattgtaatgagcctcatcttctggcacgggataaaaagggcaaactagtccagtgggaaaataaaggtggcgatgaattctctttgcaggatgaagtacctgttgaacatgacgctacagaagaaaaagtcgaaaaagagaacagttttcagcctccgttgattattgccgcaggagagaccagcgaggcaggttataccctacaacgcctcgaccgtcagacgcgccgtattggcgttattaacaatgacagcattccgctgattattaatgatattgaacaggtttgtagtgccagtggctgtggctacagaggcatgagtgggaaacagcccttccggcgtgcactattaggtgggccattttacgttactaatatcgtgcccaccgttctagagtattgtcaggactttaccagtgatgaaggcaaagagggcgtcggaccagattcgttgccaggacgaggtcgtcgactcatcacctttacagacagtcgacaagggacagcccgaatggcggtgcgtatgcagcaagaagcagaacgcagtcgcttacgcggaagcgtagtcgaaattctcagctggcatcaaaggacgcaaacgtctacagcgccgaatgccaatgccgatctggaaaaattagcggccagggcgaagcaagcccgtgagcaggcagaagaatatcgaagctggggaatgccagaccaggcgaaattgtcacaagcacaggctgaacagcttgaacaggcttatcaggctgcaaccggtgggaaagccgcgactatcctggtatcccgaacctggacggagatggttaacgagcttaaagagagagccgatatccgcgggccggttctgcaatataaccattatcttaagcctgaagtgtttaatgaaaacggcggcccccttaagctttctgaaatgttgttgttccgggaattcatgcgtcgccctaaacggactaacagcctggaaacacaggggctggttcaggttggttaccaggggctggagaaaatacataagagccccttgcactggcaggaaaaaggattaacgctggatgactggcgcgactttctcaaggttacgttggatcattacgttcgcgagagcaacttcacacagttggatgatgagctgaaaaactggattggtagccgtttttcatcaaaattcgtccgtaacccggaatcaaaagatcctgaagataatcagaacagacgctggcctcaaattcgtaatggcaacgtatcccatcgtttagcgaagttgctgatgctgggggctggattcaaaaccgccaatgcggcaactattgatattatcaatacatggctgaaagaagcatgggcccaacttaccggaccgcttgcagtactgaaacccgatggcaaccgtttttatttaccgaaagagcatatgactttttctttaatcacggatgcctggatttgcccggtaaccaataaaatcctggatacggcttttaaaggcttaaccccttatctgcctacccatatttcgttcgagcatcttacccaggcgcaatatgacacttttgtcgcgcagaaagtcaccatgccggaaatctggaagctggatcgttcacaggaagactacgcagagggtctggcaaaagcacgcgactgggtcagccatgatccgctgatcgcacaattgcggtcggaaaacgtctggacagacattaacgatcgtgtcgtggaaggcggcttctactatcgtactgccgagcactctgcccagcagtcgtcagaacgtctgcaaagctatgaaaagatgttcaagaatgggcaactaaatgttctcaactgttccaccaccatggaaatgggggttgatatcgggggcattactgcggtggttatgaacaacgtaccgccacatccggccaactatttacagcgcgccgggcgagccgggcgtagtaaagaatcacgtgcgatctcttacaccctatgtaaaggtaacccacacgaccagcaggtttttgccaacccgctctggccatttgaaaccatgatcccggcccccatggtcgcgatgaactccgcccgactggtgcaacgtcacgtcaatgcattattactgtccgactttttatgtaacgttattggcgaaaccgataaagaaaaaaccagcctcgatagcctctggtttttcggtgaagatgacgggcagtcaaaatgcgaacgctttaaaatctggctggaacgtccggttcttgatatcgacacagcgctggaacggctggtgaaaggtacggcgttgcatggtgcaagagccgaatatctgcgggataaaacaatcaacgcgatcaccttcctgcaacagcggtggctctccgtttatcgcgatctcgtgacacaggagcgtgagtcgcagccgcaaacgccttatcgtaagcgcatagagctggagaagaaacggcactgtggcgagtatctgctgcgcgatctggctgccagaaccttcctgccgggatacggtttcccgacagatgtagtgacgtttgataacttcacgatggaagattatatccgcgaaaaatcgcagaaaagtcgtgataaaaaggaccgtgaagataacgtttcccgttataaaggattaccttcccgtaacctcggtgttgccattcgtgaatatgcaccgggagcagagatcatccttgatggccgtgtcttccgctctgccggtgtctcactgcactggcacaacattaatgctgataccaatgaagcccagcgtctggattgcgcctggcgctgtcacaaatgcgggaccattggctatgaagaggggatgagcagttccgggatgctcttttgctccaatagcgcctgcggcgaaaaaataatcatggataatcgccgtcaggtgctgcagcctgccgggtttgtcaccgatgcacacgctccggtaacgaacaatattgaaaccatgaaattcgtcccggttgtccccgcgtgggtctttgttaaagcagagcccgtaccgttgcctaacccgctaatgggttatatggcttctggggctgatgggcatgttttccagcaaagtttgggggaaggtggacacggttatgcattgtgtctgagctgtggccgtgctgagtcgatgctgaatgaaaatgatgcgccgaaaagtatggaagctcactatccaccgcgtccgggtaaagcggatcgcgacagccagaatcatcgtctgatttgccccggttcgacggcactcatgaagaacgtcaccctgggcgcactggcgcgtaccgatgtctttgaaatggttctgcgcaaaccgcaaaacggcgagtatctgccagataacacagaggaggggcggattgttgccatgactctggcggttgctctgcgtcaggcgctggcgggcgttctgggtatctccgccgcagaactcggctattctgtacgtccggtcagactggaggatgggcaatcggtattagccgtacagctttatgatgtgatcagcggtggtgcaggttttgcctccagcgcaccggtacacattgaagctatattgcagggaatggtgaaacagttaggctgccgccattgtgagactgcatgtagtgaatgcctgcttgattcccagactcgccacgatcacgatttgctggatcgcaaagcggcgctggcctggcttggcgatgacttcacgtattacatcggtttaccggatgaagagacattctcgctgccggatgcccgctactgccctggcgccattggcgatacgattcgccgggcgattaacgaaggcgctgaaaagctcaccctgtggatgaccggtgcgcccaatgagtgggatttatacgcccgtcagttccgcgcggcggttcagaactatcggctaaaagacaacgtcgaggtcgatcttgttattcctgcgggagtggatgacccggacctgttgcatgaactatcgcaatttactgcgctgggtgtgcggctgtgccatgttgaacagaatctgcaattaccgatcgttgcccaggtcacctttgccgatcgcgtgatgacgctggcctctcgcagccagcaggcaacgattccggggccggagtggcacctgaatgacgaactggtggtgcgtagcctcggctataaaacggtagaactgaacgagtttattctgccggctaaagccgccaacgctgtcgagcgggtcaaagacattcagatccacaaacagttgaatggaccactgtcgcagtttgggcaacgcttctgggacgtgctgtttaacgaccatgaagaagcgcagtcactgatgaataacacgcgaattaccggcgttcactataccgatcgctatctgcaaaacccggttgcgctggcgttgttgggatcaattctgagaccgctaaaaacaaagctgaccgatggcgctgaagtgacgctggatacgctatttaaagataaagatcgccccggtaaccggcctttccatgactggatgagcatagcggattttcaggatttcgctgatcagtggtttgctgctgcgctgggcaggccggtagaactgacggtgttcgactcgccgcgcgatatccctcaccatcgtaaactgacggtgacttttgaggatggtcaggtattgaagatccgcttcgatcaggggatgggctactggcgcatcaacttttcatcgcaatggcattactttgatttccgcgatgacgtttctttccagttagtcaaaatggatcaagcttgtcaggaagggaatgtggtcaacagtgaagagagctgggcaacggatgtgctggtggaggtgatcgcctcctga

SEQ ID NO: 29591 - DNA, 3291 bp, Escherichia fergusonii B253
ttgggtcaatcagaatacatttcatgggtaaaatgtacttcctggctaagtaactttgtgaatcttagagggttgagacaaccggatggccgtcctctttatgaatatcatgcaaccaatgatgaatatacccaattaacgcagctactccgtgcagtcggtcaatcacaatctaatatatgtaatagggactttgctgcctgttttgttcttttttgctctgagtggtaccgcagggattatgaacggcaatgcggatggacgtgggaccctatatataaaaaaatagggatttcattcaccgccacagagcttggtactatcgtaccgaaagggatggaagattactggctgcgcccaattcgattttatgaatctgaacgacgcaattttctcggaacattattcagtgaaggtggtttacctttccggctactcaaagaatcagacagtcgctttctggctgttttctccaggatccttggacaatatgagcaagcaaagcagtcaggtttttcagccctttcgctggcaagagctgtcatagaaaaatcagcgctgcctactgtttttagcgaagatacctctgtagaacttatcagtcatatggctgataacctcaattccttagtacttactcacaacctaataaatcacaaagaaccagtacaacagcttgataaggttcaccctacctggcgaagcgagtttccaataccgttagatgatgaaacaggaacgcattttttgaatggactgctatgcgcagcctctgtagaggctaagcctcgactacaaaaaaataagagtacgcgttgccaattttattggtcagaaaagcatccagatgagcttagggcgatagtatctcttcctgacgaagtttcctttcctgtaacaagcgagccgtcaactacgcgctttgaacttgccatttgtgaagatggtgaggaagtctcaggccttgggccagcctatgcttctctggaaaacagacaggcaacagttcgattacgtaaaagcgaagtgagatttgtcaggcaaaatccatcggcaggtttgtcgttagtggctcgtgctggcgggatgattgttgggagcattaaacttgatgacagtgaaattgccattggtgaggtgccgttaactttcatcgttgatgcagatcaatggctgttacagggacaggcttcttgcagtgtgcgaagcagcgatgttctgattgtgctccctcgggataatagcaatgttgctggttttgatggccaatcgagcgcagtaaacgtattaggactaaaagcactacctgttaagggatgtcaggacgttacagttacagcaaatgaaacttatcggattcgcaccggaagagaacaaatcagcttcggaagatttgctctaaatggaaagcgtgcaagctgggtttgtcatccagatgaaacatttattggtgtaccaaaagtcatttctacactaccagatattcaaagcattgatgtaacgcgttacctgagcggaatttcaattgagcaatgtcatatacaagagatgctgggggctcaatatctttctatccgtaatagtaagaatgaaacgctcttgcgtcgcaaaatcggtattttgcctgctgatttcagtattgagataaaaggtggaatacacgcaaatgaaggcactatcgtaatcaccacacagcatccttgtgtagcaaaacttaaagataaaacattggaggctacacgtaagcgtactgaggggcgaacagagatacaactcaaagcggaaggggtacctccggcatttattacattacaagttctgcctaatttggcggctgaccccatcgatattgagttaccttttcccgctaaaggctgtctcgctcttgatgtaaacggacgtcctctggataaaaacattacgctgcatgatctgctgggttccagagcgtttctgttctccagaaatggcgagccgacaagatatacattgcagttgcatttgcgctccgttagtggattacaggcatggcacgaatggtgttatacggcgttgagcgatcgtcctgttgaattgaatctctatagtctgcgcgaacatattgagaacctgatttcacttgagacaggtattgatcaggttgttgagatgcgtattacgggggcgggtgtggtcatggcctggcaaattcgtcgctataaatacagtctgcgctatgattatgaaaaagaactattactcagccagtcagtgaaccatcgtgctggacagattccttcccccgttatcatgctgttaagtgaacctgagaggaaatccatccccttagcatcaagaatgagcgagggagtgcctgtcggtgaatatgagttgagctcaatcgttaacaaaaatgggccatggttggttgttcctaaaccgggtgaggagatggcttttcgcccctgcttcattcgtggcgaatcttcgttaccgatagaagaaagcaacatccgctcattgcagaaagcgacccagctttttaatccacaggcagaagttaataccatcacactggttctcggacagatggctaacgatcctgcccattccggctggcaatttatgcgtagcctgtacgatcaattcgggtatttaccactggcaacctttgaagtatggcgtgcactggtgcagcatccgcaggcattggcaatgtcgctcttcaaatttgaaatgtcagcagagtacctgagtcgtattgagaatgagttccctattctatgggagtttttccccatctttgagatcaaagcggcatctgagcgtttcaaattgttcctgagccaaaaaggtgcaccggaggaaacccagaaattactggttactaatatgtttcaacggctggggctcgtgttcccgacatatgccgatgaaattgagaaatggttaagtaacggatatctccccccgtctattcctgagtcttttgtccacgtgtggtatcaggagcttttacgtgagcatagtgaagctcaatggccagagtacggcagcaagcggctgcatagctggatggcatcacaaaaaaatccagttattggtattaatcctgacgcaaatcaccgctattccgtggccttgttacccgtcttcgctgcagctgtggcaagcggaaatgcttcttttgaatctgtatttgaccgtaaacccggtgctgtatttttcctgaggcaagtcagggatttcgattcccgctggtttaaggccatcttccagtgcagcctgttgcgttatgttgctaaaaaataa

SEQ ID NO: 29592 - DNA, 6345 bp, Escherichia sp. KTE172; identical to SEQ ID NO: 29120

SEQ ID NO: 29593 - DNA, 2685 bp, Escherichia sp. KTE172; identical to SEQ ID NO: 29121

SEQ ID NO: 29594 - DNA, 6255 bp, Geobacter sulfurreducens
atgtccaacgagtcgtattcatatttttctattctgatccgagagctggggcaacgggcagcacgcgcgttcatcagcaagtttagtccggtctccacacccctgcgcctccatctccatgacgtgttcgaaaggcccccaggagaaaccgggagctttcttgccgaccccgtatttgaggcgagcttcggatggcagcaagcatcgatgacgatgcaggagctagcggggactctactcaacaagcgactggtcaccgccatggacaccccgccgaaggacttggctgagcagcggttcggcgccgactggcatccgtacacgcatcaggtcacggcatggaagacgctgaaggaatcaccgccgcgctccatcatcgttagcagtgggaccgggtccggtaagacagagtgcttcctggtaccgatccttagcgacttggccgaccaactggacaggaaggagacgctcgagggagtacaggcgttgatgctctacccgttgaacgctctgatcaatagtcagcgggaccgcctgagagcgtggaccactgaattcaaggggggaattcggtatgccctctataatggagagaccccagacgacgaaagtcaggccgtccaaaacgaaacaccggaagaggtgttgtcccgcaagctgctccggtcatccccgccgcccattctggtcacgaactcgaccatgctggaatatatgctcgtgcgccagcaggacaacccgatcctcgaaaagtcgaagggaaaactgcggtggatcgttctcgacgaggctcacacctacataggatcgcacgcagcggagatttcgctgctgctcagacgggtcttgcatgcgtttggggtagaggcgcacgaggtccggtttattgccacgtcggcgacgataggaagtgccggcgacgagagtgcgtcacggcagcttcagcactatctggcagacgtcgccggcgtagacccggacagggtgaccgtcgtaacaggcaacagacaggtccccgcactggacacgacctatacacagacggaccatccactcccgccaatcccggagcttagacaactcgacccggagcccctctacgcaacactggcaaaaaataaacgcgtccggttgcttcggcaggagctgacagagagaggaccgatgactatctccgagctggcggaggtctatgccggcaaggagcatccgtcgttggacgaaaagacccgggccttggagctgctggacctgtgcagagtcgcgcagcgcgagggtgaaaccctcatccccctccgtgggcacctgttccatcggacccagagcgggatctgggcctgctgcaacaatgcttgtgcaggtcgggagggaaccccgctggacagcttcgaatggcccttcggaaagatttatatggagcgccgtgagagatgcgacgccccaggctgcggctccaaggtatacgaggtcatcttctgcgactcctgcggtgaggagtacctgtctgctgaggaaaaggtggtcgacgaaaagtccgtcctagtgccctatgcgatcgatgtcaacgaggacgacgcggaggacgaggggctggtagatgaggagaacccggatgaggaggccgagccttatccctactcgttcccacggctaatctcggatgcaaaatacgtcgaggtgccggcatcggtagaccggattacagggggactcggcgaaaccggccaaaacgccatacagctcggtctgacgtgtcaggacgatggcttccggtgccaccggtgcggccaaaaagaaaaacgacagggtcagctcttccgtccggcccggtcgggggctgcataccatctgcttatgtccattccgacgcttttggagcacacgccgcccatttctgagaaggcgaccagcgtacccttcggcggacggcgcctcatcacgttcagcgacagccggcagggtactgccaggttctccctgcaatcacagctggatgcagaaagaaactattcacgtagctggctgtaccaccaactttatgcaagtaagccttgcatagccccggaggatcttgcgacaaaaaaatcacagcttgccggtttagaattggctttccagcaaacacaactagaagatctcaagtcactaattgccgaaaagaggaaagaaatcgaaagctatgaattatcctcctgctgtttcatgtcatggacagaagcgcttcagcacatgcaggggacagaggtcttgcaggtatggatgccagaacagtggcgacatacggcgttcaggcacctgactgcccaccagatagcccagctgtgcctgatccgggagtttgcccgaaggccgaagcgccagacatcgctcgagaccctcggcatggtgtccctccactacccggacttggacaggattggtgagtcagatctcccatcggcatggaaacaacggaggctaggagtccaggagtggcgagacttcctgaagatagcggtggatttcaccatccgagggacgtgtgccgtccaggtcccgcatgagtacaatcgctggatcggcatcgacctgccgacgcgcttcgtcatcggaccggatgatgtgccgtccagccgcagacagcagcgctggccgttggtccgggacgcgatcccacgctctcggctgccaatcctcctctttcgggccctggcgctgtctcccgacgaccgggcggatcgctccgacatcaacgagctcctggccgcagcatgggcacagatccgagcgagggtactgagccaggaacaggatggataccgcctcagcctcgagcggaaggtggtgttcaagtccgtccaggacgcgtggttctgccccgtgacccggcgtgtcgtggacgtgacgctgatggggtggtcgccgtacacgtctatggagatcccggaagccttagccaagtgcacgaagatccagctgcccgagctgcggtatccctttacccgcgatagcggtaagtccgtctcgcgtgagaccgtcctggactggctggaaacggaccccaggattgccgagctccggaagctgggggtctggtcggcgtacagtgaccggatcgcaacgttcagcgatttctaccggatcaacgagcactcggcacaacagaacagcgcccgattacgcaagctcgaagaagggttcaagacagccaggatcaacgtcctcagctgctcgaccaccatggagatgggggtagatatcgggggtgtatcgtgtgtcgccatgaataacgcccccccttcgccggcaaactacctccagcgtgctggccgggccggcagacggaaggagtccgccgctgtaagctttactctgtgtcagagtgccccgcacggtgaatccgtgttctctaatccggtctggcccttcagaacgcccataaagctgccacacgtctcgttgcagagcgcgcgaataatccagcgacacatcaacgcactcacgctcacccggttcctgcagcagcacgcacaggacttgacgaagctccagtgccagtggttcttcacggctcccacggaggatgccagctctcccgccaccactatggagctatgggtacagaaacacgaggagcgcctcgaggacacttggctgattagggggatacgacgtctctcccgcgggacagccttggagggagttgagccgacgcgactattggagcaagtcggattacagctctgcaggatcaaggatagatggctcgaagaggaaaactccctcaaggccgaactggaaaacgcaggaggcgaaccctccgaccaggcccgcgcaacgcccgcgcaactcgcaatcctgaagcagcttaagcgcatctacgatgagtacctgctaggagagctcgctgcatccggattcttgccagggtacgggttccctacctcggtagtcccctttatcaactcgacgctggagaccctgcgccgcgattcgagggcatccaatgagcgggaggacaaccggtcccagcgacgaggatacccctcccgtgacctcccgatggccatccgggagtacgccccaggcagcgatatcgtcatcgatggacaggttttcacgtctgagggcgtcacgcttaactggcacatccccgcaggggactatacggaagcaccagagctgcagtcattcagaaatgcctggcgctgcaggagctgtggctccagcggtactcgatcgactctgctgcacagctgcccggtctgcggagcggactccaacctgctggtaattaagccctatctgcagccagcaggcttcgccgtgaatatctatactgaaccgcacaacgatctgtcctatcgccgttatatgccggttcacaaaccgtggatcaccgccggacagaccccttggtcgcctctgccgcgacctgagctcggtcgttacaggtttagtcatgagggacatatcttctatcagtcggggggactgatggggcacggctatgccatctgcctccgttgcggacgagcggcatcagagatagaggtggggggagccttgccggtcgagttgcaagaccactatcgactgcggggtggcatggaaaggaacggccagtcgttgtgcccgggaaacgaccagcagtgggcgatcaagcgaaaccagtggctggggatgggagtatccaccgacgtatttgaactccagctctcggacccagtgacaggggtgccgctcaacgacgatgtggctgcgtattctctggccacagcgctaaggcaggcacttgctgaggaactggggatcaacgacagggagatcagctgcgcaagcatcccgtcacgaacaccgacaaaccagctggcacgctccattgtgctctacgacacatctacggggggagccggctttgtcgctgccgttgcctctcacctgcctcgactcctggagagagcaaaggaaatcctggcatgcaaaaagaactgcgacactgcctgccattcatgtctactgacttatgacactcagcacgatgtagcacgattgaaccgacatgaagcattgacgcaaatctctccgcaattattgaaaggactcagtctccccaaagaactgcattactttggcccacagtccaggctggagttcgatgagttgcagttcgccctctatagagagatgcagcggagcgatgttgacgagttgcgaatctatctgggaggaagcttggagaactgggatttcctcgactggccaattcgatcgtctttactcaaatgggcgagcgaggagcgcaaggtggtgctgcttgctaagaaggaggcgatcttctcacttgactcatcagtggctaacccgctagcaagtctgattgaggcgggtggcatcgaactacgcgagatcgcccagcacgaggacgatatacaggttcccaatctcattgctgaagtaggcggaaaacagagatctgtgaggtgggctacaacctcatcggactgcttgaccccatctgagtcttgggcccgggcgaatcaggacgaccggtgtgtaaaaatctctggtagtcggccgctgctacccataaagggagaggtaattgacacggcacaagtcaggagagtcccgccggggagttttacagaactggtgattaccaaggagcttgacgggccgatcgacaattttggcggtcttttctggcagcaggtagctgctaagctaccgcacctcaaggaacggttggagcagcgaaagcctatctccttcgttgagttcagggatagatttttctcctctccattaaatgtgaagctattggcggaggcagtgaaaggactcagtgcatatttcggacagttcgattccggcgtcaaactcgttattgaaactactgattttattaagcaaaattataagccttcagagtttctacatgacgattggcaaatacgacaacacagaaacgttgccatagcacaattgttaaaggcgtctggaggtacagtatcagtaaaagaggtgccaaaaaaccaatctcagcatgcgcgagatatttcgatatgttggtgtgacggtgccaagtgtacgatacggctcgatcacgggctcagttttatgaaaagtacatcaattgtccctttcaattttaatattgatgcattaacgcaagtagcatcactcatgacactatcttgtaatttgatgaacaggctcacaactacaggtacatatatctatttgtcggacgtgtcagatgtacagaaatga

SEQ ID NO: 29595 - DNA, 3426 bp, Geobacter sulfurreducens
atgccaaggtgtcctgaaataatcgtatctatcctcaagaggcacaatctgtcagatgctgacggccgaatgctttgcaaataccggtgcagcgagatcgaatatgaaaacattcaagctgagctgcgagacatcatcaggttcagaaacgggcatctcaatggcagtaccctggaagttgcagcattttgcctctatgcctcagagtggtggagaaaaaactacgattccggtcattggacatggaacggcatcctggtatcacttgggctcgatgcagattacaacagaatagacctctatgaacctgtccggaagggactaaaattctggaagcgggggttgctgaccgtcggggacagaaacgcctacttcatcaccctcgcctgtgaaggcggacttcccctcaaaatcatccaccgggaggggtacaactacctccagcagtacctcaaggcgctcctcaacgaattccgggtatacggccgaggagagattagctccttcgagctcgccggtcgcatcgggtcgcgccttcccatgggtctccgccaaaagccgttgtttcaactatgcggtgagttgatcgaacaagtatggaacctacaacacagtatcggtgatacatcgacccctatagaggacctggaccggactcagcccagctggcgggagaactttccgctcgtggtgtcagacgaggcggccaaggctctcctgaacagcctcatcaaggacgcagtcaagatagcacggatccaggagatcaagatttccacaatcctgaaacggatcggcaccacatatcggctcgagcgtaagatccagattcccccctcctttgacgccccatctttggcagcccagctgcagatcccggtccatcagctaccctacaatgtgcaactctacctatgcaagcaatcagcgccacgacaactcctggcgctggtaacaagaagaacggctggagacgatggcaggtttgcagcggagatccccggcggcgcccctaacaccgtatccggcatcagcgcggtcgagcagctttggctggatgcgcggtcgaacaacatcaccagggagatccgcaacatcaagggaagcctcgggctatcggaactgccatgggttttttccgcgaaagatagcaatgccgaccaatgggagctgatcggagaaggcggtctaaggacaaggcatcccttcgttgtcgtggcaatcccaagcacctcaaatataatcagcagcgatgacctctgtgaatacctgggagaggactcgcagttagggagacagctttatcatatctcgggaacggtcgtcgtatcggacgggacgagcaatacgaccatctgcacaaaggccgtcgaagaggacagcgcacaatacgccatgtctggagactttctctcacacgggaccttcggatccaacatctataaggggatcccgaaaatccttagctatctggaaaatggagctatccagattatcccagaggcacagctccaatggcgcacgaggagaggaagcgacgcgtggaaatccgacctgcgcacttgttgtggaccagtcgccatccgccatgtgcgacagggcgaaacgcactttatgacgaacatcgatgtggtacccagggatggcaagataaccttcatcccaggaaggaacgcgcgcgagggcgcgatagaaatcaccgggatggccgccatgcagtacgggtgcaccacaaatcatgcaggcctgcagatcacgacgactaccttcccggagggggtccgattcgagtgcatcgcagcaaacgacccgccggcgaatctcgacgtacatatccgatggcatcttggccaggagcttgccctgagtgtaccgtacccggcacggggcgtccgcttcataaaccgcgacgggaccgtattgcacaacgacgagatcatccacatgactcgcatggcgggggttacggttcaggtcatggacctagatccgaccctcacgtttagcatcgaggcaacagcactctcgaacaggctgccggggctcaagctggaaagcatccggctggaagaggtcgccccaggccgacacgagatcgacctccggcaactgcaggacggatgcaaccttctattttctgccgtcgaagacctcgatgcgatgattaagattggagtcatatcgaacaagtttacgacctttccccaacggatatatgtcgccaggtacgacctgaacatcaaaccggacagggacgctggtgaggtatacatcccggagaacgagctcgagacactcaatggagatgcgtctcgattagagtttcgggcgtttccgttggcaaaccccgaccaagagcatgaggtgcttccggccacaagctcggggcgatggcagttccatagggaggatagagcgctcggaccctggcttataacgggctgggatggcgattggtccaggatcagaccgctgtgctggacggtgtacgacgactcaatgtccgctccgtatgatgcgacagataaatcgtttgattctgttgtgagacttgtcgcacaacgcgatcgatccgacgcctgcgacgaattgctgggacggctgtcagcagaccccaaccacaacgactggaaaaaagtcaacgcctgcttcaaccacctgaagcatttgcctgccaccacctttgatgtcatcggccgcttggcccgccacccagatgccgcggcgaccgccatcctgaaggcaggagaagacaccttcgacgaggtttggaccggattagagcggcttccgtttgcctggtacctcgtaccagtgtcctcatggatgaaggcagtaaagctaagagagcgtagcctgagggaaactctcgctcccctggcagaatcgtttggcggcaaccttgatacggtaatagagtcctccttcaggacgtttctcaatcaggtcccgatccggcagccagggatgcagacactggtggagctcaccagacacaagctgttcagcacaccgattaccaacctgccgtgcctgaacatgtttacgaatagcccattccaaatcatgaggggacttattgtcactcccgcagaacaggaccttttgcagatgcacgcagacgacatctggcccacgtgcccagagctggaggaggaatggtggcccacaatacagggacagatccctgcagatctccataccctgtggaatacgagcataatgggagcagggtttcgtctctctgtcctcaacgcccctgtagctgcggcctattgcgccaccttcaacatcaagctcaagaagcgaatggtcttcaacatccggaagctccgagagttcgatccgacatggtttgatgtggcctatggctatgcactggcgtcgagtatcgggtactgcataagaaacgatagggagctctga

SEQ ID NO: 29596 - DNA, 6255 bp, Gimesia maris DSM 8797
atgagtgacagttattttttatccctaatgacgagactcagagagcagacggctcgtgccacgatcagtgataaaaatccatcaaatgatgccttacggcagttcctgttaagaaactttgaggcactgcctggtaaagatgcgagtttgctgagtcaacctgtattcgaatcacttttcgaatatgaaaaaaacgcggatatactcagtgatatcgatttccttcatccgacgttgattaatttgcttgatgccccaccgaaagatcacgccgaacgccgcttcccgaggacggaacggccttataaacatcagattgcagcatggcaggcattgaaagagaatcccgcacgctctgtgattgtaagtaccggtacggccagtggtaaaacagaatgttttctgataccgatcctggatgacctggtgagagaatgggaagccactcgcaagaaacagctggtgggggttcgtgcattatttctctatcctctgaatgctcttattaattcccagcaggaacgactctctgcctggacagctggtctcaaaggcggggtaaggtattgtctgtacaacggtgcgacgccgacttcctgtaattccgccgatcaaagcgcgcgaccggagcaggttctttcaagaaagaacctgtgggattcaccaccaccaattctggtgacgaatgcgaccatgctggagtatatgttggttagaagtcaggatcgtcccatcattgacaagtcggagggcaaactccgctggattgttctcgatgaagctcatacttatctgggatcaaatgctgctgaaatttcattattattacggcgagtgatgaatgcgtttaatacggatccgcaaaatgtacggtttgtagctacgtcggcaacgattggaggatctggcaatgaaaaggcaaaaaatcagttacagaaatatctagcagacctcgcaggtattgatgtttcccaagtgaatgtgataggggggcgtcgaattactccgactctggaagtaccagaagcaaagcttcccctgcctaccatggaagagttgaagtccttggataattatgaagcccgatggtcaagattagcggcatcagcagaagttcggggattacggaataccctcggtaaaaaagcactaacactcccgcaggtatcggctgaactcaatattgagaatgatcctgactttactttgcagatacttgatgcctgttctgaatctcctgcaaaaaagaattcttcttcgacgcttttgccgcttcgtggtcattattttctgcggacgacaccgggagtctgggcctgttgtaatccggaatgtgaaggtcggagtgatgaactcgctgatgactcctggccttttggggcagtttatttcgatcatcgcaaagtatgtcagcactgcaattcgctggtatttgatgtcttattatgcaatgactgtggagaagtgtacctgggggctcatgagggagacgaaaaccagttgttcgcaaatccatggaacgatgaaaccgagtcggatgatttcgaaatcgaattaaatgatgaaccatccctcgaagatgaagctcaagaactagatgcagtatcggtttcacctgcgggatcaacagccaaacaactgttatgtagtagagctccaaacgatctgatgaccggtccagtgccctatgacactcaaaccgggaagctagctgacgatgatgcccggacggccagttttctatttgcattgccagagcccgatactggtagccttcgttgtgtggcatgtgggggaagggatagcgatcgctggcagcagttcagtaccattcgactgggaggcccattttatctcggtgtatcaataccgattttgttgtcacatgcaccagtccatcaggatcagacaaaaaagaagcccttcgagggcaggcaaatgatttcattcacagattctcgacaggggactgcaaggtttgcagtccggatgcaacgggagtcggaaatcaattatgttcggagctttatttatcacaaattgtggtcactggctaaatcggttgattctgctgagcttatcaggcttgaaggaactgttgccagtcttgagaaggtagcaagcacgagtccagaactgcagcaactttatcaggagaaactccagaagttgaaccagttaaagtctcaacaggatactccccaagcaactatcgcctggtctgatctttccagtgcattggctaaagaacctgcagttgaattctttatacgggaatcaacaaggcagcgttatctgagtgcgattcatgaaccgaacgaactggcagagatgtttctatttcgcgaatttttatccaggccacgtcgtaagaattccttagaaactttggggctggccagtatttggttccctgcgattgaagcatgtgatccaccagaagaatggctctcacggagacgcggaaaatccgaatggtgtgtatttctgaaactgtgcgtggactatctggttcggactaattactgttcggagattcgccgtgactacctgcgctggattggtgtgcgtttcaggcaacgtgagttggtaccaccagatcaggatattatctccagattacaggtgaggtggccgagtgtgcgacgtaacagggggcgtgcctctcggattatgatgctgcttcagctggtactcggacttaatctcgaaaatgatcatgataaaactttgattgatgttattttgcgcgcagcctggcggcagctgacgatgtctgatattttcaatcaaaccaccgaagggtaccagctaaactttaacaagagcgaaattcggatcgctacctctgggtatctgtgtccggtaacaagacggttcctggatgcatgcatcggaggaatctctccctaccatgatcgtcggtcacttgctacattcggtctggctgctgaagtcgtaatgccaaccctaccatttccattttcgcgtaaagatggccataccgtctcaccagatgaggtgtctgactggctggcaacagattcggttactcaggcagcaagaaacgcgggtgtctggtctcagttcaatgatcgaattgtatttctctctccttactttgagactgccgagcattctggacaactttcaaaatcacgtctgcagtttctggaaaaacgatttaggaagggaatgactaatttactgagctgctcgaccaccatggaaatgggcatcgacattggcggcttaacttctgttgctatgaataacgcgcctccaggaccggcaaactggttgcaacgggccggtcgggcgggacgtcgagggatcaccagagcatcgacgctgacattatgtcgagaattgccacatggtcaggctgtttttcgaaatcctctgtggccttttacaactcctatccatgttccgactgtgtccttgaatagtgacaggattgtccaaaggcatattaatgcgttattactgggcagttttattgctgccgagtcagataacgccacaaagctggagtgtaaatggttctttctacctgagcaagagcttccttctcgttgtcacaggtttgcatcgtggctggaggaaaccgctgaatcatgcgagcagatcgtgagggggatcgaaaggctgcaggcgcgaaccttactacaatcagactctgtacgacgcattctcgatcattccagtagaatgattcaagagatttccacacgctggtcacagcaacgcgaatcactttgggaacaactggagattgtgggaggtgcgccggagcagaacgagcaaattggatcggagcaggcagccgttctgcgtcagttgcgacggcatgaagaagaatatctgttgcgtgaattagtcggtggcggctttttgccatcacatggttttcccctacatgttttaccatttgttaataccagtgttgaatctatagaatcagaaagacaatcacatcttaatgctgattcacaggggcgggaagataatcaatttcagtacaggagctatccttcaagggaattggatgtggcaatcagggaatacgctcccggcaatcgagtcgtgattgatggactttcctaccagtcagctgggctgacattaaactggcagattccgccaaatgattctgctgtgaaagaaattcaggcacttcgctgggtgtggtggtgtcagtcatgtggttcttttgcgacttcaactcaacgacaggagacatgccattgcggttccaatgaaatcgtgaataaaaagtacatccagccttcagggtttgctgtcgatattcgtcggggaccgaattcagaagatgaagttcgaacatttgttcctcccactgatccgcgtgtgacatgtgaaagcccctgggtttccctttctaacccggagacaggacaaattcgctactcttcagatggcagagtatttcaccatagtaaaggggcaacagaatatggctatgcagtctgtctggagtgtggaagagcagcatcagaaacaggtgacgcaggagaaggtgctgcgataccgtttgatgtctccgggaaccatgaacgcttaagaacaggacggaaaaatgaaaatacgcatatctgtagtgggagcgatcgtgcgtttgcgattcaacgaaatctttggctcggtggtgaagatctaactgatgttgtgcaaattcgattacagcatccccatagagaacgcagactgatgacaacgagcgttgcgacttcgctggctatcgctttaaggaccagtctggctgaacatctgggggtagagtctcgggaaattggttgggcagtccaaagttcgattgaagacggagtcaattatcgtgatgtgtttctgtatgatgcagctgcagggggggcagggtatgttgctgcgataccgcactcctttgagggacttcttaatcgagtcagagagaatctgaattcttgtgactgcgattcagcgtgtcatttttgcttactggatttcgatacacaacgtagcgcggatgagctcgaccgaaatgcattgctgagctggctggatgatgatttgatgaatgctatcaaagtccctgactcttatcagtgctttggcactgctacccgatacgaatcaggatgtattgttgaagggatcatggcagagtctaaaagacctggtctgagccagatttgtgtatatctgaatggtcagcatgatgcatgggatttgtcagattggagtctgtatcgtcatttggcgaagctttcattatctaagcagggggctcatatttcaattattgttccaagttctatttgcaatcagttaccttggtcgacacttcacgctttaactcgaatcgcagaaacaaatgaaattgagctcatagaaatgccagattctatgtgtcgggttgagaacgggtacagagcggcagaagtctgttctgcaggtcgctatgtcgaatgggccgtatttgaaccaagcgtgttggaggctgggaaccggtggggcatcggccatccaaaatcaccctcagtccgggaatcacataatcgggaatcgcataatacagtcctcaaaaatgactcgcaatttcaggaagggagaaaactgtctcttagtctgatcgaatcacagaaacccaatcaatgtcaaatatataaagctggtggagaactcaacggtgaggttgaaaatctcggtgttgctttttggggacagatccaaaaggttgctccctggataactgaggcaatgaatgatggcccacctttaactgtagagtactcagaccgttatctcgtatctccattggctgtcagactactgtacgaagtgctgaaggagctgttagctgggagtcatggcagtagtaagctctctattcagaccatgaaggttgataatcatcctgttactggtcggtgtctccatcataactggcagaatgaacgtgctcaggaaagcactctcaaacatgtgttcaatcatgttgcgaaatcttctgtgaggctattgcgtaagaacaagctggcacatgccagaacaatgagaatcaagtggccgggtgatcgacttgctgtgattactctggatcaggggatgggcttcgctgagagtgaaagtcagatcccattctcttttcatgattcacctgagaaacaggctaactcgataatcagcaggcagtttaatgttaggcagtatgatcacgaagtgccgatttatgtggctggtgtagagtag

SEQ ID NO: 29597 - DNA, 3531 bp, Gimesia maris DSM 8797
atgcaacagaaatttaatacttgcgaagcttcttccaggttttctgatcagtcagcgttattaagtgaaatcttctttgcaacagaggaaagcatcttggcgagccaaattcagaatattctagaccatataatagagcggtctggcctcgatcctgtagataagcatccattgtacgcttataaagtgactcaagaggagcttttaatgctgcaggcagcgttaaaagacgcattgcaggttaatccagagttaagaaaaaaggagcaacaggctgccttctgtctgtttggggcagagtggtttcgtcggaatcacgatcaggggccatggagctgggatattattctagatgatggccttggtctcaaaggttcaacaaaaaaatcatttcgaaacaatagtgtgcgtcatacaactgcggcagggctcaattggtggaaagtgcctcttgtcgaaaccgagattgctacgcaatatctcgtaaccctggcatgtcaaggggggttgccgctgaagacattacgaaaccatgtcgctcctttgagacgatttctgaaaaagatgttacaacatcacgagcgctatccgcaggagcctatcaacggtgtgtttgaggagtacgcatttttgctgcccaagactctgaacaatagcggtgttcagacattaacctgtcgtattgttgattgtgtagcaaacctgagacggagttcgaaggcagtcgaagagaatgggcaggggcgacaggaatatcttgatcaaaatctatccggttggcgtgattcaatcccgttacgaattgacgattcagatgcgatggacctgattttagggctgctggatcaggaagtagcccgtgcattgccatctgaaggattctctgtaaccactttcctgactatgcaagatcaatcaatactgatttctcgtgacttgaactatgaatcagtgatcaatgaagaggacctctggcgatggcttgaattgtcttcagctaaagaacttcagcctagaatgaccctgtatttacagagtgatacacagcaagtgagagtggggactatcgctaaacgttctattgatgattcttatgtcattaccagtatctcatctactccactgaccggaagtgatgctgacgggacgattcgactggtggtgactgctggcaaccgtcaagtttcatctattgtcgtacctggtggtgaagcacttcctgaatcgccatgggtgttttctgatgcggatccagctgaactgatcggagttggctcagtaaagacgcgatattcgactgtgcttgtagcgattcctccaggagtcacatgggtcggttcgcctgaaatggaagttctgattgactcgaattcggatgataatcggatcgttatgagattgagtggagagttgtgtctgtgtcaggatgggaatgatgttcggatttgttcaagggcagaagaagaggcgacatctatttttaaattgagggggcgtggtggaacgttggggccgaacggatcaagcttttggtatggaatacctgagattatagagtatccggtcaatagctcgggaactgtctcggatgttccccaacacatgatcgaatggaaagggacaggtaatacctggcagaatctttcctcgaattgcgtcggagatgtctctttgcgggcagtgcggaatcatgaaacgatttttcagacccgtttaacgcttctacctgatggcttcagttatcgaatccgtccaaggcgtaataacaaagggacaattgaattaaaaaatcttggcatggctgctgtgtttccaggtgagatttcaggtgtagaaacgcaagtcgagagtcagaagtcagtcacccaactgcatgttacgttatgctcagggagcgatcggccagtaacaattccgatctcgattcattttcataacggcgtgcggtcatatttacaggcgacatgtccaacagatggcatatatatcgttaacgctgctggtttggccatttcaaaaaaccttccgattcccatggatcagctcgatggtctatttttacgcatcctcactcctaagagtcaggatttaatcctcatagaacgatcccgacatcgcttcttaggtaaacctacagagttcagaaatactggcacgcaagagtttgcactctcatcggtacaggaaatcattcaggggatcctagcacaatcagatgatccagatggaagcgttgagatacggcttgaacgtccaccatcctcaatcgacctgttttcttttaaagttgcgcgttatccaggctggctcgagaaagagccaaatgattactcagaaacagggactcaaccagattgcacagaggtttttgtgagtgaacagacattgcaagatcttcggatttctggagaagatattcggattgatgtctcaccactggggcaacctgatgcggtcatagaaacagctgccgttcaaagaattggagaggcgaagtggaagttatctcatgaaatgctggggacggggatttatctggtggtagcctggatcaatgaatttcgttgtctcagaccactcagagtttcggtaaatcttaatttaattgatccgatacgagtggaagatgcagaaccttcggatcagtttgacacggcattaaacacattaagtcacgatgttcgcagatttgagtgggaagccttcgtaaacagaattgcttgtgactcaggtcatcctggttgggcacggattgattcactgataaaatcaaatcaacgtctccctcttactacatatgaggctatttcgagtcttatcaggaactctgatgcgacagccatgctggcgatccgaatgcatcgactttcctggctatggcagcgacttgaagaattaccgtttctctgggcaacagtgccagttcgatcatgggtgactgcactgaggtgtcatgtcgaactactgcttcagcagctagattcacttgaagcagatatgtctagccagattatcgaaagtaaaatagagggcttttctcaggatcttgctctgcgctggggtgggggtgtctgtatcaattcatgtttgcatatatcaggtttcaaaatccctccgcaaaatataaatataaaggacttgatggtgaatgaacaagactcgttgctggagcgactgcagcaggaacgtagtcgacttattgctgaccatgatttatatgatacgcgaactgtttggccacaagtggacttgcggattccagagcgagtcaggggggttatttcagatatagaaattagtgatggacattctaatcaatgggaagtcctgaatgcgcctgccatcgctgcagcatattcagttcatgattttccgttacccccactcatcatcatgaaactgaaagagcttcgcagtgttgatccagtctggtttgatcgggcgaatgtgatcgcgatgcagattctagcggggcgtcgacttacacaaaatcacagatgttttgtaatggaagaaaaggtagaggtatga

SEQ ID NO: 29598 - DNA, 6435 bp, Grimontia indica
atgtctagtgcgattaactttacttccctataccaagatttgtcgtcggtgacctcccaagcggtcattaatcgattgcagctaaagtcgacgccattaaggaagtttcttgagcgagaatttcaagtcaagttcggaaaagggaatgacttctttgcgcagccagtgtttgaagcaacgtttggttgggaacctgcgccaaaaactgaaaatttaattgggctgaaagaagctggtttcttagccagttctctagtttcaaacttagcatatcctcctatgccaattcctgaaaacgaaaagcagcttgctgattataaagctcgaaacattgacgaaagccgttgggcgggtgatatacaagaagactacacttggcctgtcgataggcctccttatcagcatcagataaatgcgtggaggcatttgtcgaccgatgatgtcaagtctgtggtggtcacttcagggaccggctctggtaaaactgagtgctttcttattccattactgaacgatttagcaaaacaagcagcgttgtcttctgacccattggttggtacacaagctatttttctttatccactaaatgcgcttattaattctcaaaaggagaggttaagcgcttggacacgcggctttggtggaaaagttcgatttgctttatacaacggagaaacgccggaaacaccggagcctaaaaataaagaaaatgcgagtttttccggtgattctgcgccagaacttgttacctgtcgtcgcgatatttggtcttctccaccgcctattttggttactaacgcaaccatgcttgaatatatgcttgttcgtcaaaaagacgaagatgttcttgctaaatctcaaggcaaactgaaatggatagtccttgatgaggctcatacttatgtcggctctcaagcagctgagatttctttgcttcttcgtcgtgtgatgcatgcttatggtgttgagcctgaccaggtacgttttgttgcgacgtctgccaccatcggtgacaaaacaaaacaagaagagaccaatcaacagttgcaagagttccttgctaagcttgctggtgtaagtctgaatcaggttaaagtggttaacggtcgccgattaatcccggacattgacgaatcacaaaaagaagatcatttcctgtatgaacacgctaggtcgctcgaaagtggcaaactgttcgagtacttgtgtgcatttccaacattcagaacgttacgtggaaaactcacgtctgagcctctaactcttgaagagatagctgcaactatttggcctgagaaaagtgataacttaaaacaatcagatctcgagaatgctctcaagatcatggatcttgctgtgactgcatacccaaacggcgacgagaagtctgagcaagccttcctgcccgtaagggcacatatttttcatagagctcaacgaggtttctgggcttgtgttgatcctcagtgttgtaacaaaaaaggtaccgaactagagaatggttggaagttcggtatggtgtacacccatgaaaagactcattgcgatggggagtgtggtgcgcccgtttttgagctgactcactgcagtgattgtggtactccatcactttcagcggcaaaaaccaccgctgatgggggagtgaaactaatagagggacgtgagtcggatctgctagatgattacgcagatgaaatagaagatttagaagacgaaaatgaagaacttgaaactgagtttgaagccaatcttcagatctttgcgagagaagatgcaatggggaatgctcacgataaatcggggtgttctaaagtctttatcgacgctaaatccaatcgaatcagcgacacatacagtgacggtctactaagcattttttacaaccaaaacgagcgctcccaaggtgtgcgttgtgcttgttgtaacgctgttgaatacaaacctaacgtaatttttaagcgcggaatattaggcgccccgtttttaatggggacgcttgtgccggccatgctgcgccatgtcccgagtgaaaaccctgatgatatgaagggaaagcggcttattactttcacagatagccgccagggaaccgcacgcttttctgcgaaaatgcaattggattccgagcgcaactgggcgagaagtgtcatctacaaggagacgctaaaagctgctcggtcagaatctactccgctcgacatacaatctaagttagacgatattgagatgttaaaaaatttagatgcgcaagggaacgcatctgctatctcaatacttcagtcactcgtggatgctaagatagcttctttaaaaccaaaatctcttggctggattgagatgagagatgagctggcatctcgtgaagagattcagcttctatctggagaatatttggcttcactagaagatggcgcgttcaaaaaagaactggaaaaactacctggtgagtatgcaaaacgacagcagcgttttgagagtgcaaagaatgttgctcacttgtttttgcttagggagttttcgagaagagccaagacagctaacaacttagagtcgatgggccttgttcaacttcgttatcctgctattgattcgttgatcgaagatgacatcacgagctttgaatggcgtaatctcggtttttctcttcaagacctgaaagactatttgaagatctgtctagatttctatgtgagggaaaacacgctcatcaatatcgacagtgatgccattcactggatgggcgcaaaaattatgcctcggctactaaaagaaccaggctatgaattcaaagacagatatgaacgtaaagcgtgtttccgtttcccttcggtcaacaaggggatacaacatcgcttagttcgactgcttgaaattgcctctggccgagaagccaaagtcgaagaaggcacgttcaatgacatcttaaggttcgtttgggaaacacttaccagaaagctaaaggtacttactcctgcagcgccaaggcttgaaatgatctctggagccgaattaacgggctatgaattatcgttagacaaaagtgtagcgtttgcacccattgaaaaagcgtggctttgtccaattactaatcgttggctagatacgatttttaaaggcctatctccttatacaaaaggctcttcgacaagggaagatgttcaatgtagccctgctctttacttggatattgctcatcctgaattgtcattacttgatgaatcaccgacgaaaatacgcagttggttgaatcaaaatgaaacggtattggcacacaaggaatccggtcgttggtccgatatcagtgataaggtaattgcaggtgttcaattggttcgcgcagcagaacattcagcacagcaagagtcagaacaactaaaaaaattggaaagagcatttaagaaagatcacctgaacgttttgagttgttcaaccactatggagatgggcgttgatataggctctttaagcatggttgcaatgaataacgtgccccctagtacctcaaactaccttcaacgtgctggacgtgctgggcgaagaaaagagtcaacggcactggctttaacgttttgcaaatcaacaccacacggtgaacgggtctttgctgagccgaagtggccgtttacaacgccaattcgggttccaaaagtatctttggacagcactgtcatcgttcagcgtcatatcaatgctttcttactggcgcaatacctaaagatggagaagaaaaagtctcagaatttgatgacaatgcaggcaggtgctttttacttaggcgagccaggtttttgcccggttgatggctttgtggattggttgtatgacagcgcagagactaacgaatctgtttcatcaggcattagaaccctgaagtttgactctgcgtattcgagtttccctgatagctcgctcatcgaagatgctcggaagtgcatcgtaagtgcgaaagataaatggttgcttaagcatgaaaccttgaagcaccaattagacaacgcacaaggtagtgataatggcgcaacaaaaaaactggaacgtcagttgaagcgaatcgagcgagactatctattagctcaacttgcagatagcggttttttgcctggttacggatttccaactggtgttgttcagctgatcactgaaaaccgctccgaaaaatctacgcgggacgacaataagcaacaagcacgaaaagcttatcctagccgagggttggcagttgcgttgagggagtatgctccgggttcagagattgtaaaagatggcgccgtataccagtcacaaggtcttcagcttaactggaagatgcctttctcacaaaatgaaattcagcaagagcagcttcttcaatatcagtgggaatgtagtcactgtggctctcttggcattgaaccgtataaagaagaaggtaaaagtaaacgttgcccggactgtgactcagtttctttggtgtggagcgagtttatcatcccatccggttttgttgtcgattacaacaaacctcttcacaacaactatgtgcaaccaaactatgctggctatcgagaaggtaagcctgcaatcaaaggtgaagagtggcagccaatatcccacgagggacttggacgttttagagtttctaatgaggggaccatttttcattacaacgatggaaatggtggaggatatgcactctgttggtgttgtggtagagctgaagcgctagcggtagagaaaacatctcaaggcagttacagacttgctagtgagccaaaaatccacagtgagcataagcgtttgcagggactaaagattaaggggcaagttcactgtgatacgtggggtgttaaatacagtcaaattggcaaagcaagcaaagagattgaaacgccattcattctgggttacccacagaaaaccgcaatgtttgaacttcagttgaaagatccgcttagctttacatggattagtgatgaaaaactaatttatacactcggcgttgccattaggcagatgtacgccctagagcggggtataacgacgcaagagcttggcgttacggttaaaaagaaaaagaccgagttgggcgaggaagttacaagtctatttatttatgatttagcgactcaaggtgctggcttttcaagcgcgattccggagtacttaacgaaactttgggtgggtttgattgcttatcttgagaaatgtccttcaaagtgtgcggcagcttgccacagttgtttattggattacgatacacaacacagtgtaaagaaactggatcgaatgcacttattgtcatttctcaacgagtcttgcttattggaccttttgtcattggcagaggacaaaaagtactttggtagcagttcggcagctgagctcttgaacgcccaacaagccctaacaagaattggaactgcatgttcagatgcatctttcttcatccatgatactgattgggagtggggcgattggagtattaaagagcatcttctatccctcaaatcgaagggtatcccagttaaaatttatctaagtcaacaagctgcggaaagcatagactcagatcttgcatgggagatttgtagaactttacctatatcaaaagtagatatttataaacttgtcgagccagtccgtcttgaactcggtgcgttaccggtaatgaaggtggagttgagtggtggtgataaatggtttgctgtgagcaatgaaacttcagtgtcagctaatagccattggggcaaagatgccaatggctgcttagtgagtggcagaaacgttaatgttgaggttgttgctgagccttttgatattgaagcaattgctcgaaattcaggccttaacgaaaactctacgatcattgaagatctaaactctttgcgtggttcagttgatgagtttggtcgacggttctctgacttactagaaaatcatatttctgagttcaagagtaaagtatcagggagcatagactcgattgtctatagcgacaaatatgtagttagccctctaagtgttgttcttgtaaatcaggtgctttcggagtttaagaagcgatatgggacatttagtgctgaaattcacactgcacatcccaaccaaaatgctgattatagccctagatgtatcgcacataacttcccttctagcgatgaattaaacgaattcgtttatgaaagtgcaaaatcattcaatgcagaagtttacagtgagtgtttcgatagcaatgatttaccacatagtcgcattatggtagtgaagctcagcaacggagatgtaattaaacttcttcttgatcatggaatgggctactggtgtaagggaagagactactgggattacaggtttgactttagagatgtatattcagaagcagtatctgttggcacatggggtttcaacttagttgatgcagacaaagccacgtatattgcagtgaaaatgagctaa

SEQ ID NO: 29599 - DNA, 3519 bp, Grimontia indica
gtgactaatccatcctcagaaattcaccgttggtttgcggactttgaaaagcaccgacctgtacataagccaggtatgcctttgtggtcgttgaaagttaccgacgaggaactaaatcatcttcaaatcattctgaaggggattttttctgggaaggatccaagcgtaatttttaatcattactcttgcactggtgggaacagccgatttgaccaagtgtttacactatatttagccacttggattcaacgaaactttcgaggcgggcgggagcgttggcctgtagtattggctagcttgaacattaagcatgaaaatcgcttgaacccagcgatttacgagtctgtaaaagctgggcttaaatactggggaatagatctttactcaacatcttcagcaaatcagtactttgcgacgttatattgccaaggtggatttccacgttccggtttggttggtctggtagatggtccagtttcgagctacttggattctgttatcacgcaatttgggcttttttacaaaacatcgtcactatcgtctattgcggaaaagcggcttgaagtcctccctgaaacattgaagcaaattccctttgctactttggcatctgctcttatctctagcttgctgtctcttcgcgatcgttttcatttgtatgcggagaacgacccagttgccgcactaagtgttaaaaatccgggctggcgtgatgagttgccatttctgctttgtgacgaagaagcccatgagctcatggggcggttactcaagcgagcggcaacaattattaggcgagagcagaaccctgtccgtattcgacgctatcttacggtcagcatggattgttgggaggttgtcgcagagacgcatatcaaccataccattcacccggaagacctaaataatgtaatgggtgtgtctaatctaccgacttatttcgacctttacactcagacacagtcaggtgagcgagctcgttccgcctcttttaatcttaaaggccagcaaaatcgccgttggcaagtattaacaaaacacacttgtttctatggtgctgacgcaacgtctgctattggttatgagctatggaccgacggtagacttgttggttcggatcagtattaccgtggagaagagcttaacaatgaccttccatgggttttttcggcagaagggcagagattcttgttcgtgggtcagggcaatgtttccgcaaagcaagggagcgttttcgtcgtttttgagggggaactaaggccttccaatgcgctctctgaagtagaaaaggttgctgagataccgtctttgaacaaatctgttttcaaagtcactggtagagctgaggcgcttgttacttttggcaagttcacgatatcaacatttgcagacgaagcgaatgagttctcttgttggtttgatggaaagcgttgttctgaggcagtttcccacagaaatactttctatgggagaccaaacgtatttgtcagatatggtttagacaaaccttattccgttcccgaagacgagcttttctggaagtgtatcgattctgactctctatgctctttgatggctgaaaatgtgcagtttgggcttggcgttatcgtatggataaaagatgggaatgtgaaatggcagtcaaaatgtgcattacttcctgaaagtgcacattttaacgttttgcattatgaccgaggtgaagttgagctcaaagctactggctttaaaaatactgacttagggatattagacggtgaaactaactggcttcgtgatgtcgataaactagaagatatctactttgctgagcttcaattaccagcaaacatgcccgaatcttttcatccgattttagggtggaacaactctcttgataacaaaattgtatttgaattcgcctctatgcaggctggtatttgtcttctaacgccagaaggcacgccttataagttgcagaaaaatacactgactgtggaagagctttttacacataaactgaaagtaaaaatgccttctggctctgataataccttaagtatatctgcggcgctcttgggtaaaaataagagaatccgtgcgagcgtcactgagcgtatagtgtgcgaggattcaacaacgactatcagtagcaatattctcggtcgcatggcgcaagtgctttatgcccagtctgataatctatacgactttgtgacgttcaagttttatgctggccaggagttgttagattcccgtttgcctaaggttgaactattcaagcacccagttcaatgccgggaacaagacgaaagaatagtactaaaagttttgagctcgcgcagacataaaaacagagacgcaatcgttttatgtgcggctccgatttgggatttaggttgcgttcactacaagcttgagcgaacaacaaacagttttgatgatctactgtttttaatgcctgaaacagatctatccggcccttggtttgtatatgcgttaaatgacaataaagtacagcctcgtgcagtaatcgttgaggctgaatcagtcaaggaagtaacagcgtcacttactccactgcagcgtgcgattcgcgatctccctttcaacagagagactttccaatttgattacaccgatatggatgcatgtattgaggcgccaatggaatccctgcagcatgctgactggcgaactatgcaatcctttgttgatatgttggatttgtctacgccgaatacctttcatctgtttagacggttaattcttaagactgatgttttagcaacattgttgcttcaacaacaatcaccagagtcatttgagcgcctttggagtttggcaaatgaaatgccttttgagtggctatatgtcccggtaccgtattgggagaaagctattcagttggtgcttaaagacacgcttgggcaattggcgcatttggaaagcacaataagccaggagcaatttgattccatcaagcgttcggtggtcgaaagccgtttccaaatgctggctgacaaaggcaagtactttaaaacagtcgttgaacttgtattggaaaagcattttcaaatacccgcgccgtggagcacctcaccaattttttctaacggtgagaatgacagcaatacgcttctgtacgaattccatcaagaaaaggctgcatttttctcacgtcacgaagggcgtctaatgaaccatgttcagaataagcacaacgatcgtgaactgagagagcatatggaaatgtctatgtcgcgatcatttttgcctgcagaactgaaaggtttgctacaacactactccttagacaaaaacaaagcagatgctcgggcatttgctctcgatctaccagtgatggtttcgtttaagaatgctggtctttttgaaaattcagcgacaacagaaaatgaagattggcttgtgagcttcgcacttagccagcttcaaaaattcgaccgagtatggcttcagaattcgatgtcttgtgcgttaaaagccgcccatatccaaaaaacgaacacggtacaataa

SEQ ID NO: 29600 - DNA, 6141 bp, Hoeflea sp. BRH_c9
atgaagccgtttgcaacactctcagaaatacgtcgaaggtctgcagaggctgttattgcacagtccggcattaacaatgagagcctcgcccgacagctgcgcgaaatgctcagttcgcagaaagtcgcaactggctcattgcttcaagaaccggtcgtggaaggcgcgcacccgtttgaggcggccgagatacggatgcaggaagtctcagatgacgtcctgcatcccgcgttcatttctgtcttggatggattggaccccaccaatgagtatcgtttcccgaagacgcggaagcccttcaaacaccagctcgagacttggagggttctcgccgaaaagggggtgcctcagtctgttcttgtgacctcgggaacaggctccggcaaaacagaatgcttcctctttcccatcttgagcgaccttattcgccagtcgcagggacaacagcttccaattgagggagtgcaagcaataatgctctaccctctcaacgcgcttatcgaaagtcagcggtctcgtttatcggcttggacaaaaccgctagcaggaaagatcaggtattgcttgtacaacggggaccttcctcaggaagccttaccggaatccgaaagaaagcggtctccagaacagcaaattgataggcaccagctcagagagtctcctgccccaatcttagtgaccaatatcacgatgctggaatacatgttagcgcgtgctcaggaccaaccgataattgaaaaatccaaaggaaagttgcggtggatcgtcctcgacgaggcacattcactagtcggcgcggcagcagcagaaatagcccttttgctgcgacgtgttctgatcgcgttcgatacagacccgcaaaacgttcattttgtggccacatccgctactattggcaaagggtctgagacccacaatcaattaaagcagttccttgctgaggttgccggcatcccggatgctcaggtgcacgtcatcgagggtgggcgacgtctacccgaaacccccacgccccagacgagtaaagcaatcgattttgcgaaatgtagctcaaccgaattatacgaccggttaggcggacagccagaggtctggaagttcgtcacgacacttaaggaaactccccaaccaatttcagaatttgctcggctgggtgaaaagtatggacttggcgctgaagagttcatgacttcgttggccagggcagagcgagtaagtcccataaatggtgacatagagcgcttggcacccatgcgcatacacagtttcgagcgggcgataccgggcatttggggctgtattaacccaagctgctccaatgctccgcaagggtgggcattcgggcaactttatggagatcggctcgagacctgcttgtcatgcggagcgcccgttatggaagtcgtcagttgtactgagtgcggcgagccaatgctcgaagctgatgaacaaatggactctggccgactgttgccatcccgacggacgcaggagagagatgagttccagttcgaggcagatcgtgattttgagtcagatgatccgaacgaaggtgaagtaggagatattgatacagaaatactggaaaacccagcggcaaaaagaaccatactctttgcagcgaacccctcaaaaaacgcgagagaactttggatatctgatggtgagtggaaagtcctgtcaggaaagaccgatcagtcgcttaccttcaaatatgaggaaaagctcaatgacacgaccgaatgcccatgctgctcagcaaaggctctgaggggaatcgacaatctccttcgaccactgcggtttggcgcgccgtttttgattggtaacgcagcgccaattctgctggaaggtgttgatcccaaaagcgcagaccagcttccgttgcccgcatcgggacgttccttgctctcctttaccgacagtagacagggcactgctcggatgtcggcaaaaatacaggcggaggcagaacgcaattttgtccgctcatttatatatcattcggtccaagactcattgaatgcgcaatcagaagaccctgcgctcgtgaatctcaggggcttggttcaacaactagagtcgatgtattccgtcacaccatcaccagaaatccagcagatgatggatacccagaaaggcgaaatagagcgcctttcgaggggcaaggtattgggtatcaagtgggcggacctggaagatcgcctggcgcaccgcccggaggtcgaatattggataaaggatgtctgggaacccagagaccctgaacggttcagtagccctaacaaactagctgaatttctgctgctgcgggaattttcacgtcgcccgaggaaggcaaattccgttgagactttgggattggcgtgtttgcggttcgagagaattgaatcctgtgtgtcattgcctattccgttcgcaaggcgtggcaagacaatacagcaatggcgggagtttcttcatgccgtcgtaaaccatttcattcgggcaaattcggccgtcaacatcaatcgcgagacgatgagatggatttccaacgtcatgcagcctcggtcactcttaagtccaggtaccattggcggtgaaaaaaggcagctacattggccgtccgtccctaaaaacgcatccagcttgtcgatgccccaaagcatcttattgaggggtttgggtctcgatttatccgacacagaagacagggctgatctacaggactgcctagatcaggcatggcgtaatcttcagccaatattgggggacaatcctgagcatcgagccctcgacttcaggtcagcgcatgtttctcccatgctcgaagcctaccagtgtccagtaacacggcgcttgctggatacgacacccttcggtttgactccttatgcgcgcggcgaccttcagtctgaccgctttaggaccaaagttgtcacgatgccaaggcatccctcgccggtccttggtccgattgatgtagacctgaccaaacagggaatacgtcaatggttggaaagcgatgatgccgttcaaaatttgaagtcgattggagcttggagcgggatatctgaccgcatcgcgttttttgcgaattatgccagatcggcggaacactccgcacagcaggagaacaagcttcttcgccgatatgagactgatttcaaagatggccgtatcaacatcctgaattgttcaaccaccatggagatgggcgtcgacattggttctgtgtcgaccgtgatgatgacaaatgttcctccgtccatcgcaaattacagacaacgggtcggacgggcagggcgacgtgggcaggcgttctcacttgcatttacattctgccgtgatcgtcccctggatcgagaggctttttccgatccattggcttatctaaataggaatatcgccgccccaaaagtggcgctgaacagcagaccgatcgttcaacgtcacgtgaacgcatatctccttcgtcgtttcatgattgaggtggggggtgacgggctgaaaatgacaatcggctcccttatgggatgttctccaaagctgggtgaggcaagaagcgacccatcacctgtaaggacactttctgactggctgtccgagcccagcctcgaaaatagggtcgcatccgatctagagaagctcgtagctcgatccgttcttgaaggtgagacacgtttgatagaagtgtgtcgagatgatctggcctcgcttgaagaggatttcattaatgaatggacgggtttgcaggcgttagcacgtgacgaaggcgtgaaagaagcagggaaaaaccgtatggcggtggagttgaaacgcctatgcggagaattcctgctcagcgcgctggctgaccgtgggttcttgccaggacacggatttccaacaagcgttgtcaccttcattccacatcgtcccaagaggctcacgtcagattcagaggccaattcagtcgacggaaggcgtcatacccgactatcaggtccgcagcgttcgctggacctcgcaatccgagattatgctcccggctctgaagtggttctggatgggcttgtccacaggtcagcaggtgtcttgctgaactggaagcgcccagcgactgaggagaaagtccgggaagtccaaagcctgaagtaccactggacatgtggtgggtgcggagcaagcgaaactaccagggaattgatcagcgaatgccggaattgcagtggtcgcgtaatttgtaacgaatacctgcgtcccagtggattcgcggtcgattattggaagaaacctcacgccgatacggatagaatctcctatgtcgcgcccgaggaccccgctgttgcgcctggcaacgacgaatggattgggttgccaattcccgaacttgggcgataccgaggaagcagagaggggacggtctactattccaatcgtgggcctgatcgaaacggctacgcattatgtttgcactgtggccgcgcggaacccgattatccgcatgaagaatcagatgacccggcgacgctgacaccctcccctttggacggccaccgaccacttcggtcgaagttgaaagagaaccaactggtctgtgaagggctggataatccgtggaagataaagcggaatattgatttagggcacgaaataacgaccgacgtttttgaacttcagcccgcaaaaccgctgagcaagcccgcagccacggcgctgatcatcgcgatgcgcggagcattggctcgttcgcttggtatagaggccgacgaaatgggttactcaacacaccgatcgttaggcgaacttggcgggaattgcaggtcactcctggtctttgaccgtacctcgggtggtgcgggcttcgcagtttccatgggaggaaacattgctaaagtcatcactgacgcaaccgacatcttaaactgcccaaatcctggctgtacggaagcctgcgcatcatgcgttttgacgcctgatgcgcccttcgaggacggtggtctcgaccgtttggcagcgttggaattcattactgagcatctgaccttctcatcggttttaccagaggaagatcgcatatctgacgacgcagtcttgtccatatcgctggttgatgaactagaccgcgaacttcgaaataattcgaagccgcacgtgaaagtgtacctgcccgagactggcgaccttgcctccctgtccgcttggtcggcgactcagaacctggagacgtggcgatatcgagggtacgacgtatcggtcgttgtatccaaaaaacttctacaaagcctcgatccttcggctaagttggctttacatgcacttggccagaggctttcgggacaaaatagcgacttccccatacatcgtggcgatcagcctgcctgcgcaaacggtgctcgtgttttagcatccgtaagtgctggtaagactgttcaagtatgggcaactctagaggcatcgcctcagcagctaggtcccagctggggctttccacaggagcgtccaatcgttcgcggtactgggttcgctttgaacgactcccaggctttgaccgctgaggaactcttaccgattcccacggcaaagatgcggagtctcatcaaagaccttgatcgccctatgatcctgtttggaaatggcatggcagaaattctgaggtccctacttgccgatctcgggttcaaaaaagacttggaaatagacagcatctcttacagcgacccatacataaggtcaccgcttgtcgcccgcctcttcttggataccgtcgcagcactcttccggaaggcgaagtcaggtggagggcttcacttgacaacgcgaccgcctaatccaggtgcgttcccgccgccacgaatagcgagtgactggagcgatgctcaatctgccaacgatgtcatgatggcatatgcggcccttcagcacttgaacctcgccgtcaaatttggtgactgcgctcatggccgatatatgactatcgcatttgtcgatggcagttccgccaagatagtcttcgatcagggttttggcgcttggcgaccaacctcgcaagacaaggcttcacatttcgacttccgcgcctcacctgcgcgccaggcagatgccttgtcaaaggcaaatccaatgctgagcaaaaaaggcaactgggcaacctacgtcgtggtcacacgggaatga

SEQ ID NO: 29601 - DNA, 3450 bp, Hoeflea sp. BRH_c9
ttgggggaaagcggcgtgagcctacataaattggacaacgatgcgctcaggagggaatttgagcgcaatcgcgatcatcagcaaaaacttgaacagatcaacgaggtcttgaaaaaacggaattctgaccaagcaaacgaacttcagtttgacgtcataaacagattaagaattctacgccgaaatggccctgctccagtaacggcccacacgcatcaggaaaacgatgaacgatgggtagctgagttttttagagcgcggagcctgcgttactccgatgggaatccgctctatcgctatcgcatgacagatgccgagtatgtggaggcaaataaaatcatgcgctatttggctgcttgcgggaaactaatccccggcaaccgagctgcgtgcatggtgttcgtggcgttttgtgcggagtggtttagacgggaagcaaattcaactttccgaaagtgggatgaccttgctcctgatgtttttccctcgataccttggaatgtcaaaaccggaatgacgaaggcagggttaaatcattggaagaggccgctcctcaccactgatgatacgagcgagtatcttttgtcattggccctcgaaggaggcgttcctgtaaacgccatcatagatggttcaaaaggctggctgagagattatttgcgaacgctggtgcgtttcacttcaatctcggacgaccccacgaaaatcaggggattcgcacatgacgagtcctaccgagtcaagcctacgtatcgacgcgaacaattcatcgacctatgcgctgaaatcgcggtaactcttgcgaagtggcgcacggtggtagaatgcgaaacaccgggcggaatggacgcagtgtcatacttggatgcccgccatccgacatggaaagacacgattcctctttacatctctgacaaagaggactcgacagctcgccaacttctcgttggactcgtgaccgagaaattcgattccgtagctgcacaaggcgtcggagctaccagacatctcaaacttctagacggctcgtggcatccagcgatcagaattctagctcatggcgaactacccgtcggccgagttcccatgttaccgaggggaacacgctggaaagcggttccttcgggcgcactggctaattttctaccaagccaattcgctttgttcgaaccgcctaccgacgaggagcgcacatggcgggtgcgcccattgacggagctatcgaaaataatcgttgggtttccccttaccgcgagggtcacagcaaacctcgcgacatccaatgccaaccaccctgttgagtggcccgggggggaacgggtgacttccgacatgctggtcttcgttgaagaacaaccatccgattcaccgtcacagctcaagctcgttaagactggctccgcgagcctgccggcaaaacgcctctacgccctagttccaaaggactggacagcagagtctctgacagcacccgggagatcatggccttcttctgatggcatgtccgtcctttatgaaattgaaggcacatactatttcactgacgcagaagacggcgctcgataccgagttgaagccgacagtgatgaaagagaagcaaatctagagattcatgcaggtggtacggcatcgattcactcctctggagatttagatatcttcgagggtccggttagcgtccaaatcctcgacagcgggaccgtcagagatgccgaaccggggtcaatatttttacggcagcctggcggagtctggcgtcccttgcaaggccgcgagatacgagcatatgggtgtattgacgtttcttggcgtgacacaaaagcgaacattcagctcgaacgtaaacggattgcagtcattccaactggcgctaaaatccatggcgtcctccataacaatgcggaaggtcaggtaactctgacaaacctcgataactggagcctcgaattccttcataagaatgttgttaagacgcacgatgatgatgacgaaacaggcttccgttttgacggccgcccaacctatcggatcgaggccagtctcttgccgccgatgggagccgcaatcccgatatgtatttcagtgctggccagacaagccgctatcttaacatcggatggcagcgtggtttcaggtggacaaacactcgatttaacggctttgcgtggcagtcttgctatctcctcccacagaagccgcatggtcatcacacgtcaccattccaaagctcaggacatagtcgtttcagtagatcaagaatttccgatggccactttgaagtcggcgatcgaagagatatttgccagcttggaagatcaagatggcgaggttgacatcgagttcctcggagatttccaaccgcctgtgcggcttagacaataccgctgggagcgcgcaagctctgtcggggacacgatcttgttctctcagacctctgtatccgatcctgtagccaaaatggttcttgcacccgagctcgagcacaaattggacagagttgatgatgggacgttcagactaccctccgacctttatggtccgtgcctggtctattcgagagatgggccagacgttgtctccagaccactcgtcgtcattggtaaagccccggtacctagttttgcgccggagacgcttcagtggacatcgtgtattccaaattacatacagcgaaaggccttgctcgacctcagttttcagcgcctttcagacggaaatggcaacgccgatgaaatcgcatacctgctgtccatcattcgaaacctgaatggtctgccagcgaaagcgtttgatgcgctaaacgatttgtggcgttttccaaaggtcctgatccggctcctgattaaggcaacggatgatgccaccaggcaatctgtgtggcgtctccaatccaagcttccgttcatatggctgtcgcttccgcttgctgattggaaagacgtattggatcacgagcgactttcccttgatcaaacgctagcgcaactgccgattggggatgacaaacgtaccgaaattctggttagccatttcgcggcactgaacgcgggattgtgcgacatagaacccgcacttcagtacctattgcacgaacatggttttgtgggccaagcgacgcagattcgctcactaaaggacgctatcgagacgtttataaaagaccaacgaatgaaggaagatgccgaagatggtattccatctaagccgaccttgaatcctctcgctgcgaaggtggaacagcagggcctgcgccccccatcagagctatcgcggtttagcgctaatgaattcgatggtctgtttaccccgctgattcttgccgccagcgcgcgtggccttatcaaaatagatgccgatttagagataccgctaaggatttccctccgagaaagcgccgattacgtgaccgaatcttatggccatttctcgaatttttacaggaatatgtaa

SEQ ID NO: 29602 - DNA, 6300 bp, Idiomarina baltica OS145
atgaattttttccaggcattaattgaacaatctcaaaatcggattaaagaagcgacgttgggcgtattaggtatacgtaatgaaggccttcgccggcatattgaaaagcaatttagcgattgtttaggtgcagaaggtagttttttggccaatcctgtatttgaacatacatttggctggacgcctggaaagaagagttttgccgaattgagccccgaattattgcatccgcaattaattaaaacgttgcacgaagcacctaaatacgagttcgataaatcaatcaaaccatataaacaccaagttgaagcttggcaggtgttaaccgataaaaaaccgcgttcagcggtaattactacggggacaggctcaggtaaaaccgaatgctttatggtacccattctcgatgacttgattcgcgaacaaaaagcaacacagagcgcattaattggtgttcgagcactgtttctttatccgttaaatgcgctgattaactcacagcaagagcgactcgatgcgtggacacgccagtttgaaggcgatattcgcttttgcttatataatggtaaaactgagcacaaagccagcaaatctgaagtgcgtaaacgccaagcgatattgaagaaccaaatactatcgcgtgaattactacgaaaagagcctgctccgattctaatgactaactctaccatgcttgagtacatgctggtacgtcaagttgatagtcctattttggaaatttcaaagcagcagcagtcgctacgctggattgtattggacgaagctcacacctatgttggttcgcaagcagcggagctatcactgctattgaagcgggtggtgaatgcgtttgggcgtcagtcgaaagatattcgctttgtggcgacgtcggcaactattgctgatgctaatgcagaggaaaagcttcagcattatttggccgacttggccggtgttcctattgagcaggtttcggtcattacgggtcgtcgaattacccctcaattaagcggtgggtggctagagcagtcaaccccgtatacacttgatgacgtaaatgcaattgacagcgctgaggaggtatctgcgtcgcgtttcaaagctctatcgtcgagcgctatcgcgagtaaattacgtgcgacaattcttgatactgacaagcctcagcgactagatgacttagtggcgagtgtagcgcctttattggaaggaaaaacgttgcaacagcaacaagtcgaagttctgagttggttagacgtgatgacaggcacgaagggcgataagcaaggcgatccgtttttgaaggttcgagcacacttttttcaacggatgctgcatggcttatgggcttgcgttgaccatagctgcaatgtcaagccagccgagctcaatagttttccgtttggaaccgtttacgtaacagagcgctcacattgtgattgtggagcgccagtttttgaagtcgtattttgtaacgagtgcagtgaaccgcatttattagcagcagatcaacgcggaaaattaactcatcgagtttctcggggtgttgatgagttttcattgaacattgagcaagatgatggtgatgacactcctgccgacgatgaaaaagaaagcattttacgcggcgtaagctccaatgttgtgattggtgctgtgacctctgaaaacgaacattattgtttgcaaagccttaatagacaaacaagcgagttcgctgttattgacgatgagtacatttctataaaaataggggtaggcgagatagataactgttcggcttgcgctagtgagacggattcaaaaggtgacttttatcgtggcgcacatttaggtgcaccgttttacataaccaatgcggtgccgaccgttcttgagttttgccctgatgcggacaaaaaagattcaaacaagcgcagcccagaagagctgccaggccgtggtaggaagctcattacatttactgacagtcgtcaagggacagcacgaatggctgtgcgcatgcagcatgaggctgaacgctcgcgtattcgtggtctagtatttcaattacttcaacaaaagaacctagagttaataggtggacaaaaagctgctgaagtgaacgaaaaaattgaagatcttcgcatggttattgcgtacgcaaagcaatcaaagcagcatgacaaagcaagtaaaaaagagcaagagctcgagcgactacttaacgaacagcaagagcctcagacggtaaatgttttatataccgatttggagaatcgctttatagagcagcatgacattaaaagtgccatgttaaaatacaataggtatgcaaacccgcgattatttggggatgaaggtggaccacgtcgtcttactcagttgctgatgatgcgtgaattttctcgtcgtccaaaaaagcaaatcagtaccgaaaccttagggttagttgctgttggttatgagggtcttgagcaggttcgcagctgcccccaattctgggaagaaacctttgcgcataatgcaaccggtaatttgagagagcgctccaagcttacgctcgatgattggaagaactttctaaaagttgcattggatttctatgtgcgagaaaaccgcatgatgcgtatggacgatgacctacagaactggatgggcagcttgtcgacgcaaaagtttctgttttcgcctaacgctgatattcaagaaaacccgcgtataagaaaatggccgcaggtgcgaacagcgaataaaaaccgattggtgaaactacttgaattggcaactggcctttcaaccgctcacgctgaagacaaggacaaaattaacttatggctgatgcgggcgtggacggatctaactcagcatcaaatactcaagcaatctggcagtaacgggttccagttagaattatcatcgttgaatttttcgttgccacgtaaggcttggttgtgtccgaatacatatcggctaattgacaccacgtttagaggattaacaccctacctaccgcgcaagcttacggatgctgattaccgctgtgaactggttaagatgcccgattttaccgagttatcttctcttgagtctggtattgcgcaaattagggaaatacgcgagaagttaaatagtcatccgacagtgcgcgaattgcgcagtaaaggggtgtggaataatctaagtgatcgtattgtcgaagggggcttttactatcgtacagctgaacattcggctcagcagtcgacaaaaacattgtcaaactatgaaaatttgttcaagttaggtgatgtcaacgttttaaactgttcaacaaccatggaaatgggcgtcgatattggtggcatatcagctgttgtgatgaataatttgccgccgcacccagccaattatttgcagcgagctggtcgtgctggtcgacgcaaagagtcacgggcaatcgcttatactttgtgtaaggccgacccgcataaccagcgtgcttttcttaacccaatgtggccttttgtgacagctattccagccccaaaagtgattctgagttcgcgttcaattgttcagcgccacgtgaatgcggtgctgttagccgcgttcttaagaacgttacctgatgagggtgatcgtacgcggttatcggcagagtcattttttgggggcgaaccatcagaatgcgaaacaatgttggcatggatggattattcacgcgacgagtttgccgatgccgttaagtcagtgattaatcaaactagcctagcaggtgagtcattaagtcaattaattctagccgcgaaagataaattaactgatattaaaaccgactggttggaggagcgtcaacgcattcaagcgttgtatgatacctcgacggatgagccgtacaagcgtgcacttgcgtttgaattaagtgcacataacagtcagtttttattgaaggaattgattagcagcacgtttttacctggacatggcttcccaaccaatgtggtcgaactagatcataaaaacattgaagactttaaagaaagcaaacgacaaaaagaattcaaagagcgcgaagacaatgtatttgtaaacaaagaaaaaccttcgcgcagtctcaacattgcgttacgtgaatatgctcctggcgcaacgttagttattgatgggcgtgcttatcgttctgagggaattgtgataaaagatttcacaaatccaggcaataatgatgacattcattttgcggtagcttggcgttgtgataagtgcggtacaacaggagttcgtgaaaatgcttatgccaatagccgcgatctgtgctgttcgaatatgcaatgtcgcgcgttaattcccgagcgtgaaaaggtgagcaccctgcgccccacaggttttttaaccgacttctggaagccgacaagcaacgatattcttactcagaagtttattccggtggctgaacctcgggtgagcctaataggcgaacaagttacgctgcctaacaaagactgcggctttgtgcggtttggccacaacgggcaaattttccatcacaccaaaggagagtatggctacggctttgctgtatgtttagcatgtggccgcgcagcctcaatgaccgcgacagatacaattcctagtgaactggacgtgctgagagaccaccgtccattaggtggggccgttgccggtgatttaaaggaatcttgctcgggaggacatgttaaatcgaatattgcgctggggtatcaagtacgcacggacgtgcttgaaatatgcttgcgtaatccgctgcaacaacagtggttaacaaccagtgatgagcaccatatggtggccgatacgttggcggttgccatgcgcgaggtgctggctgagcaattaggtatttcgccaagtgaaattggcttttctacgcgcgaagaactggatttagagaatggtgcgccccgaatggtaattcaattgtttgatgaagcaagcggtggggctggtttcgttattactgccatagatgacttggtcggtctattacgcgcaactcgcaaacagcttgaatgtccgagccagtgtgacacggtctgttctcattgtttagccggcaatgattcaagtgtcgagcgttttgaactagaccgtcgggctgctattgcttggcttgacgagagtcaaattcttgaacaccttgagttaccacaagagtttacgcaaattcctgatgcggcgttttgctcatctggtgttttacgtgcgttccatatgttgaaaaatcgcgccaaacacacgaacgaatccattcgcgtcgttttaccaatgaatggcgatactgagcgttgggatctcagtgcagatgcgtttcgttcctttattttaaatctaattaccatcgataaggttagtgtaactttagctttgaatagcaggcaggtattggttaatgatttgaaacgcactttaaaaaaccttgagtatttaggtgtagaaataagttacggagagacggctggtctgctcaaagacgtcaccctaggatttcaattaatagcaggcgacaaaacattcagcttgttaagtaactcggaacgtacgactgaaattaacgacgattggttaaccgatgagcatgcagtttgggttagttcaatcgagttccccaaattacagctaacgccttgtaatacatctgattggggtaattatgaaggcgctgttactaccaaaatcgtatatgttaagcaggagcttgatggtgccttattgcagttgccacttcgcatggttggcttacttcaacgcgagttcccgttattattggagttaataaaaaacgatacactgctctcaataagctattccgatcgctatttgaaaagcccatgggcagtgatgatgcttatgagttttattaagttgtttagtaggtgtgagccgaagtcaattgatattacagcattaaaatctgaagcgaacatagaaggtcgtttagtatttcatgactggagcttcgattatgagcagcgagaatttatggaacaactaatcagcagagcttgccctagtgtaaatggcacaaccattacactgaaagataatgcgcaggaactgcaacattctcgcaagcttgaattgaaatggacctccggccgaatcattgaagtgatatttgatcaaggttttggttattggaaagctttcagcaaaagttatgaagcgcgtcagttccctttcgaaggtgactctataatccaagtagatacctctatgaaactaaatgaacacttagaaatgcgacactcgggcaattggcctacaattattacattcaatgaggttctatcgagctag

SEQ ID NO: 29603 - DNA, 3342 bp, Idiomarina baltica OS145
atggataactgcaaagcatggatcaacgagtttctttttactcgagagctatttcaaggtccgcaaggcgaaccgttatattcttaccaagttacagctgacgaatttcagaagcttatctctcttttaactcatgcaaatctcattaaacaccctccgaaaggactgccacactatacgggcgcagcattttgtcttttggttgcggagtattatcgtcgacagtacaccggtgaatattcaaccaagcctattgaagacttgatttcacagaaaatatctcaacagaatcgtgctcagctcacgctaggtggattagctttttggcgtcgtgagcccataaaaaccgagaaccggatatcgtatttaggttcattgtttgctgaaggagggttgccatggcctctcttaaatagtgatactcatggttttggtcgggcaattcgtcgtggtattggtgcttattataaaattgccgcaatggataagtcgctaacgtcattgatgttagataatcaggaagaattaccgcaagtattccgtactattcatactgctaagttactctcaggtattgtcgaacgcttaactaagcttactgaggcttacccgctgcgagaggtgaaaaacccagctgaatatttggatgagcatgctaaggggtggaataaagattttcctataccgttagatattgaaaatgggcgacgcttgattaacgattggttaatacaagcagagaagagccgtcatcaaagtgcacttgagaagaagcgccaagctgagctgttatctgaattcacatcagacaattattttcaattatcaaaccgtggtgtcgatgtgacttccgaagtggttatcccgcgggagttaaaaattaagcgcagtgagcaagagataatatctactcgatttgagccgttaatttatgaaggcaaccgacttatttttcgtggctcaccgatatatgctagcctcgatcagaagcaagactgcattcagttaactttcaaacgaacacgagttgaggttaagcgcagtgccagtgccgagccacttacttttaaattagtttcacatggtagtgttgtttttaatcgcacaattgaaaatagtttgcttgatttggatgcttcgcctttggttcttactgagcaggctgatcgctggtacatcgctggttctgagtcctgttctatcgccgaaacgagtgcccgtttatggttaccgaagcagtgccaatttggtaaaggtgaatcggctgcgaatttgattaaggtctatgatttcggcacattgtatgaattgtcgtcgaatgcattgattacaaacgccgataatgatgaatttgagatccaactttgtaaagcgcaaccacgttcatttattcgagtgatagggcatgaaaccaattggtcgactttaccgattaccacctattttgaatttcctaaattgaacttaagtgatgacgcaaactttgcacttgaagatttgcgcatattcgtcaatgacaggcgtgttttgaacctgaaccatttgtctaatatttatggtcgtgttcagttggttataaaagacaatttcgataaaacactatttcgacggaccttcggtgtcgttcctcacgatttaaagattcgtacacggccagctcgatcagcaaccccagcatttattcagtttatgacctcggctcgttgccaagtaacgcctaatgttgccaatggcgcagccaactatgttgtcattgatgaattggatgccggcaaattcagtttgaccacgtgcgataacaaagctccagtttcttttaacgtggatgtttgcagtgacaaatgttctaaaccagtaacacttcgtgtgccatttccggtcgctggagcacgaattattacccccatgggtgacgcgtttgagggtacatcactgctgcttgatggcttgttagggcatcggattcaattaaccaatagtagtgacaaaagacagcgttttaatattgccttaaacgttatgtcgagagggcaggttaagtacgtcaaagatgatgtcgtatttgttgatcatttgccgattgaaattagtttgtttggcatgcatcgagaaattaccaagttgcttggtaatttaagcgatcaagatgcggctgtgcagttagttattcagctaggtcaaacggttttaaagcgggtaatcatacagcgttataacgcgtatttggaacgtgatggctatgaccttgttattaaagactatgaatgtaatgacattcgtgctcccattaatttacgagcaattaatataattaaccctgaacagcatccgctaattattgagccaattttatcggctgaaacacccactggacgttatgcaatcgataaactgatcagttcgaatacaacatggatcgttcattcagatgccgatgctgaattgaaagttcggccctatgttcagccgggcgacgaggtggaaaccttggtggaatcggctgatttaggcgctttaacatcattacactcagcttgtaatttctttcacccaatagagcgcccgaaccttattcgcgaacagatcgaaaaaatggcagtggattataatcactcaggttggaactatttaagtattttaaagcggaaatacggccatcttccgctctcaagtttcgaagcctggcgcgcgttagggtgcaatagtgatgcgcttgctttagctgtattccggcttgaacttgattcaatgttttgtgaacgcattagcgatgagctggcggttgtctgggagtttattcctgtggatacttggcgatcagcgcgaacgttatttgctaatgcgataatgaagttaggcgttcctgaaagttacgcggacattacggtccgagagcgcgaagttgcacttaaagatatcgtctcggcgtttgagtacttgactgactatatacagaccggtgatgtacaagccgttcgtcaatatccgtacgagaggattattccatgctggtatcaagaactgcggcgtttttttgctgaaaacgataattggccgattgatttgtcacatgagttaaaagcatttgtgatggcgtcgagtttaggtgatggcttcaagcaagtatctagtattggttacaccgatgcggtggtttatttgccgatgtttgttgcctgtattacagccggtctagctagtccgaaaagtttaggtgtgccaacatcgcaattgaaatttgcagtgacaaatctgtctgattttggtcgtgaaatgtggtttaggccagtacatgcagctaccaccgcttatttaatcgctaataataataacccaaattaa

SEQ ID NO: 29604 - DNA, 6300 bp, Idiomarina sp. T82-3
atgaattttttccaggcattaattgaacaatctcaaaatcggattaaagaagcgacgttgggcgtattaggtatacgtaatgaaggccttcgccggcatattgaaaagcaatttagcgattgtttaggtgcagaaggtagttttttggccaatcctgtatttgaacatacatttggctggacgcctggaaagaagagttttgccgaattgagccccgaattattgcatccgcaattaattaaaacgttgcacgaagcacctaaatacgagttcgataaatcaatcaaaccatataaacaccaagttgaagcttggcaggtgttaaccgataaaaaaccgcgttcagcggtaattactacggggacaggctcaggtaaaaccgaatgctttatggtacccattctcgatgacttgattcgcgaacaaaaagcaacacagagcgcattaattggtgttcgagcactgtttctttatccgttaaatgcgctgattaactcacagcaagagcgactcgatgcgtggacacgccagtttgaaggcgatattcgcttttgcttatataatggtaaaactgagcacaaggccagcaaatctgaagtgcgtaaacgccaagcgatattgaagaaccaaatactatcgcgtgaattactacgaaaagagcctgctccgattctaatgactaactctaccatgcttgagtacatgctggtacgtcaagttgatagtcctattttggaaatttcaaagcagcagcagtcgctacgctggattgtattggacgaagctcacacctatgttggttcgcaagcagcggagctatcactgctattgaagcgggtggtgaatgcgtttgggcgtcagtcgaaagatattcgctttgtggcgacgtcggcaactattgctgatgctaatgcagaggaaaagcttcagcattatttggccgacttggccggtgttcctattgagcaggtttcggtcattacgggtcgtcgaattacccctcaattaagcggtgggtggctagagcagtcaaccccgtatacacttgatgacgtcaatgcaattgacagcgctgaggaggtatctgcgtcgcgtttcaaagctctatcgtcgagcgctatcgcgagtaaattacgtgcgacaattcttgatactgacaagcctcagcgactagatgacttagtggcgagtgtagcgcctttattggaaggaaaaacgttgcaacagcaacaagtcgaagttctgagttggttagacgtgatgacaggcacgaagggcgataagcaaggcgatccgtttttgaaggttcgagcacacttttttcaacggatgctgcatggcttatgggcttgcgttgaccatagctgcaatgtcaagccagccgagctcaatagttttccgtttggaaccgtttacgtaacagagcgctcacattgtgattgtggagcgccagtttttgaagtcgtattttgtaacgagtgcagtgaaccgcatttattagcagcagatcaacgcggaaaattaactcatcgagtttctcggggtgtagatgagttttcattgaacattgagcaagatgatggtgatgacactcctgccgacgatgaaaaagaaagcattttacgcggcgtaagctccaatgttgtgattggtgctgtgacctctgaaaacgaacattattgtttgcaaagccttaatagacaaacaagcgagttcgctgttattgacgatgagtacatttctataaaaataggggtaggcgagatagataactgttcggcttgcgctagtgagacggattcaaaaggtgacttttatcgtggcgcacatttaggtgcaccgttttacataaccaatgcggtgccgaccgttcttgagttttgccctgatgcggacaaaaaagattcaaacaagcgcagcccagaagagctgccaggccgtggtaggaagctcattacatttactgacagtcgtcaagggacagcacgaatggctgtgcgcatgcagcatgaggctgaacgctcgcgtattcgtggtctagtatttcaattacttcaacaaaagaacctagagttaataggtggacaaaaagctgctgaagtgaacgaaaaaattgaagatcttcgcatggttattgcgtacgcaaagcaatcaaagcagcatgacaaagcaagtaaaaaagagcaagagctcgagcgactacttaacgaacagcaagagcctcagacggtaaatgttttatataccgatttggagaatcgctttatagagcagcatgacattaaaagtgccatgttaaaatacaataagtatgcaaacccgcgattatttggggatgaaggtggaccacgtcgtcttactcagttgctgatgatgcgtgaattttctcgtcgtccaaaaaagcaaatcagtaccgaaaccttagggttagttgctgttggttatgagggtcttgagcaggttcgcagctgcccccaattctgggaagaaacctatgcgcataatgcaaccgataatttgagagagcgctccaagcttacgctcgatgactggaagaactttctaaaagttgcattggatttctatgtgcgagaaaaccgcatgatgcgtatggacgatgatctacagaactggatgggcagcttgtcgacgcaaaagtttctgttttcgcctaacgctgatattcaagaaaacccgcgtataagaaaatggccgcaggtgcgaacggcgaataaaaatcgcttggtcaaactacttgaattggcaactggtctttcggccgatcgcgctgaagacaaggataaaattaacttatggctgatgcgggcgtggaaggatttaacgcagcatcaaatactcaagcaatctggcagtaacgggttccagttggaattatcttcgttaaatttttcgttgccacgtaaagcttggttgtgtccgaatacatataggcttatcgataccacgtttagaggattaacgccgtacctcccgcgcaagcttacggatgctgattaccgctgtgaactggttacgatgcccgactttaccgagctatcttctcttgagtctggtattgcgaaaattagggaagtacgcgagaagttacatactcatccgacagtgcgcgaattgcgcgtgaaaggggtatggaataatctaagtgatcgtattgtagaagggggcttctactatcgtacagctgaacactcggcacagcagtcggcaaaaacattgtcaaactatgaaaatttattcaagttaggtgatatcaacgttttaaactgttcaacaaccatggaaatgggcgtcgatattggaggtgtatcagccgttgtgatgaacaatttgccgccgcacccagccaattatttgcagcgagcaggccgtgctggtcgacgcaaagagtcgcgggcaattgcttatactttgtgtaaagccgacccgcataaccaacgtgctttccgtaacccaatgtggccttttgtgacagctattcctgccccaaaagtgattctgagttcgcgctcaattgttcagcgccacgttaatgcggtgctgttagcggcgttcttaagaacgttacctgatgagggtgatcgtacgcggttatcggcagaatcattttttggtggcgaaccatcagcatgtgaaacgatgttggcatggatggatgattcgcgcgacgagtttaccgatgccgttaagtcggtgattaatcaaactagcctagcaggtgaatcattaaatcaattaattctagcctcgaaagacaaattagctgatattcaaaccgaatggttggaggagcggcagcgcattcaagccttgcatgacaccgcgacggatgagccctacaagcgggcactagcgtttgaattaagcgcacataacagtcagtttttattgaaggggctgattagcagcacgtttttacccggacatgggttcccaacgaatgtggtcgaactggatcacaaaaacattgaagactttaaagaaagcaaacgacaaaaagaattcaaagaacgcgaagacaatgtgtttgtaaacaaagaaaaaccttcgcgcagcctcaatattgcgttacgtgaatatgcacctggcgcaacgttagttattgatgggcgcgcttatcgttcagagggtattgtgataaaagatttcacgaatccaggtaataatgatgacattcattttgcggtagcttggcgttgtgaaaagtgcggtactacaggtgttcgtgaaaatgcttatgccaatagtcgcgatctgtgctgttcgaatccgcaatgtcgcgcgctaattcccgagcgtgaaaaggtgagcaccctacgtcccacagggtttttaaccgacttttggaagccaacaagcaacgatattcttactcagaagtttattccggtggctgaacctcgagttagcctagtaggcgaacaggttacgttgcctaacaaagattgcggctttgtaaggttcggccacaatgggcaaattttccatcacaccaaaggtgaatatggctatggctttgcagtatgtttagcatgtggtcgtgcagcatcaatgaccgcggcagatacgattcctagtgaactggatgtgttgaaagatcaccgtccattaggtggggctgttgccggtgattttaaggaatcttgctcgggtgggcatgttaaatcaaatattgcgcttgggtatcaagtacgcaccgacgtgcttgaagtatgcttgcgtaatccgcttcaacaacagtggttaacaacgagtgatgagcaccatgtggtggccgatacgttggcgattgcaatgcgcgaggtgctggctgagcaattaggtatttcgccaacagaaattggcttttctacgcgcgaagaactggatttagagaatggtgcgccacgaatggtaattcaattgtttgatgaagcaagcggtggtgctggtttcgtcattactgccatagatgacttggtcggcttattacgcgcaacccaaaagcagcttgaatgtccaagccagtgtgacacggtctgttctcattgtttagccggcaatgactcaagtgtcgagcgttttgaactagaccgtcgggcagctatcgcttggcttgacgagagtcaaattcttgaacaccttgagttaccacaagaatttaagcaaattcctgatgcagcgttttgctcatctggtgtcttacgtgcgttccatatgttgaaaaatcgcgccaaacacacgaacgaatccattcgcgtcattttaccaatgaatggcgatactgagcgctgggatctcagtgcagatacgtttcgttcctttattttaaatctaattaccatcgataaggttagtgtaactttagctttgaatggcaggcaggtattggctaatgatttgaaacgcactttaaaaaaccttgagtatttaggtgtagaaataagttatggagagaaaactggtctgtccaaaggcgtcgccctgggttttcagttaatagcaggcgacaaaacattcagcttgttaagtaactcggaatgtacaactgaaattaatggcgattggttaaccgatgatgatgcagtttgggttagttcaagtgagtttccaacattacagctagcaccttgtaatacatctgattggggtaattacgaaggcgcagttactacgaaaatcgtatatgttaagcaggagcttgatggcgctttattgcagttgccactccgcatggttggcttacttcaacgcgagttcccgttattattagagttaataaaaaacgacacattgctttctataagctattccgatcgctatttgaaaagcccatgggcagtgatgatgcttatgagttttattaagttgttcaataggtgcgagccgaaatcaatttctattacagcattaaaatctgaagcgaacatagtaggtcatttggtattccacgactggagccttgattacgagcagcgagaatttatggaacagctaatcagcagaacttgcccaagtgcaaattgcacaacaattacactgaaagataatccgcaggagctgcaacattctcgcaaacttgaattgaaatgggcttccgggcgaaccatcgaagtgatatttgatcaaggttttggctactggaaagctttcagcacaagttatgcagcgcgtcagttccctttcgaaggcgattctacattgcaagtagatacctctatgaaagtaaacgaacacttagaaatgcggcattcgggcaattggcttacaattattacattgaatgaggtgttacaaaactag

SEQ ID NO: 29605 - DNA, 3342 bp, Idiomarina sp. T82-3
atggataactgcaaagcatggatgaacgagttcctttttactcgagaactatttcaaggtccgcaaggcgatccgttatattcttaccaagttacagctgacgaatttcagaagcttatcgctcttttaactcatgcaaatctcattaaacaccctccgaaaggactgccacactatacgggcgcagcattttgtcttttggttgcggagtattatcgtcgacagtacaccggtgaatattcaaccaagcctattgaagacttgatttcacagaaaatatctcaacagaatcgtgctcagctcacgctaagcggattagctttttggcgtcgtgagcccataaaaaccgagaaccggatatcgtatttaggttcattgtttgctgaaggagggttgccatggcctctcttaaatagtgatactcatggttttggtcgggcaattcgtcgtggtattggtgcttattataaaattgccgcaatggataagtcgctaacgtcattgatgttagataatcaggaagaattaccgcaagtattccgtactattcatactgctaagttactctcaggtattgtcgaacgcttaactaagcttactgaggcttacccgctgcgagaggtgaaaaacccagctgaatatttggatgagcatgctaaggggtggaataaagattttcctataccgttagatattgaaaatgggcgacgcttgattaacgattggttaatacaagcagagaagagccgtcatcaaagtgcacttgagaagaagcgccaagctgagctgttatctgaattcacatcagacaattattttcaattatcaaaccgtggtgtcgatgtgacttccgaagtggttatcccgcgggagttaaaaattaagcgcagtgagcaagagataatatctactcgatttgagccgttaatttatgaaggcaaccgacttatttttcgtggctcaccgatatatgctagcctcgatcagaagcaagactgcattcagttaactttcaaacgaacacgagttgaggttaagcgcagtgccagtgccgagccacttacttttaaattagtttcacatggtagtgttgtttttaatcgcacaattgaaaatagtttgcttgatttggatgcttcgcctttggttcttactgagcaggctgatcgctggtacatcgctggttctgagtcctgttctatcgccgaaacgagtgcccgtttatggttaccgaagcagtgccaatttggtaaaggtgaatcggctgcgaatttgattaaggtctatgatttcggcacattgtatgaattgtcgtcgaatgcattgattacaaacgccgataatgatgaatttgagatccaactttgtaaagcgcaaccacgttcatttattcgagtgatagggcatgaaaccaattggtcgactttaccgattaccacctattttgaatttcctaaattgaacttaagtgatgacgcaaactttgcacttgaagatttgcgcatattcgtcaatgacaggcgtgttttgaacctgaaccatttgtctaatatttatggtcgtgttcagttggttataaaagacaatttcgataaaacactatttcgacggaccttcggtgtcgttcctcacgatttaaagattcgtacacggccagctcgatcagcaaccccagcatttattcagtttatgacctcggctcgttgccaagtaacgcctaatgttgccaatggcgcagccaactatgttgtcattgatgaattggatgccggcaaattcagtttgaccacgtgcgataacaaagctccagtttcttttaacgtggatgtttgcagtgacaaatgttctaaaccagtaacacttcgtgtgccatttccggtcgctggagcacgaattattacccccatgggtgacgcgtttgaggggacatcactgctgcttgatggcttgttagggcatcggattcaattaaccaatagtagtgacaaaagacagcgttttaatattgccttaaacgttatgtcgagagggcaggttaagtacgtcaaagatgatgtcgtatttgttgatcatttgccgattgaaattagtttgtttggcatgcatcgagaaattaccaagttgcttggtaatttaagcgatcaagatgcggctgtgcagttagttattcagctaggtcaaacggttttaaagcgggtaatcatacagcgttataacgcgtatttggaacgtgatggctatgaccttgttattaaagactatgaatgtaatgacattcgtgctcccattaatttacgagcaattaatataattaaccctgaacagcatccgctaattattgagccaattttatcggctgaaacacccactggacgttatgcaatggataaactgatcagttcgaatacaacatggatcgttcattcagatgccgatgctgaattgaaagttcggccctatgttcagccgggcgacgaggtggaaaccttggtggaatcggctgatttaggcgctttaacatcattacactcagcttgtaatttctttcacccaatagagcgcccgaaccttattcgcgaacagatcgaaaaaatggcagtggattataatcactcaggttggaactatttaagtattttaaagcggaaatacggccatcttccgctctcaagtttcgaagcctggcgcgcgttagggtgcaatagtgatgcgcttgctttagctgtattccggcttgaacttgattcaatgttttgtgaacgcattagcgatgagctggcggttgtctgggaatttattcctgtggatacttggcgatcagcgcgaacgttatttgctaatgcgataatgaagttaggcgttcctgaaagttacgcggacattacggtccgagagcgcgaagttgcacttaaagatatcgtctcggcgtttgagtacttgactgactatatacagaccggtgatgtacaagccgttcgtcaatatccgtacgagaggattattccatgctggtatcaagaactgcggcgtttttttgctgaaaacgataattggccgattgatttgtcacatgagttaaaagcatttgtgatggcgtcgagtttaggtgatggcttcaagcaagtatctagtattggttacaccgatgcggtggtttatttgccgatgtttgttgcctgtattacagccggtctagctagtccgaaaagtttaggtgtgccaacatcgcaattgaaatttgcagtgacaaatctgtctgattttggtcgtgaaatgtggtttaggccagtacatgcagctaccaccgcttatttaatcgctaataataataacccaaattaa

SEQ ID NO: 29606 - DNA, 6321 bp, Janthinobacterium agaricidamnosum NBRC 102515 = DSM 9628
atgaagccattttattattcgaaactattgcccgacatggcagagcgtactaaatacgcaacggtaagccgccttgccttcagcaatccagccttgcgcaggtatctgctgaaacaatttactgcaccgttcggtcagtctggtagtttcctgggcgatcctgtcttcgaagcgacgttcggttgggaagcatccaccgcaaccatgggtgatttggctggcaacttactatcgtcggcactggttgacgctatggatgctccgcccgacgagttgcgtgacgattatcgcttccccagaagcgcaacaccttacgtgcaccagctgcaagcatggcgtttgctggccagcgacttgccgcagtcagtggtggtcaccagtggcactggttctggaaagacagaatgcttcatggttccgattctcgatcgactgtgtcgtgagcagcaagccgctcggcgtccgctggtcggtgtgcgcgcactgtttttatatccgcttaacgcgctgattaatagtcaacgcgaccgactgcatgcgtggacccatgcctttggcgattcgctgcgcttttgcctatataacggcaataccgagcacaaggtaccccaacgcgaacgtgaccaagtgccaaaccaagtgctcgaccgcgaaacgctcagggaggtcccgcctccaatcctagtgaccaacgcaactatgctggagtacatgctagtacgcgcccaagatgcgtcgattcttgagaaatctaagggtacgctcgaatggatcgtgttggatgaggcgcatagttacatcggttcgcaagcagcagagctggccctgctgttacggcgcgtattgcacggctttggggtcgacgcgagtaaagttcgattcgtcgcaacttcggcaactattggtgatccatctggcgaggcaggcattaagctacgcacttttctggctgatctggctggggtgggagttgagcaagtgcatgtagtggcggggcagcgatcggtgccagtgctgccgccggccgatgatcgtcaccggcagtcttctttgcaaactttgcaggaattagctggcgaaacggacagtggggagcgcctgttcgccgcgctagccggcaacgatactgcaatgaaattgcgcaataggtttgctcagccgccggatcgtaagcctgtggcgcagctatctgaactatgcgaactcttaattccggcagcagtggacacgtcaacgaaacaaacacaaagcctgctgtggctggacctgctgagcggcacaacacgagtcctgccatcgggacgactcgaaccatttcttccactgcgtgcgcacttgtttcaccaagtgcttgctggcctgtgggcgtgcgctgattcacagtgtccctgcaaggcgaatagtctgctggatgttcccgaatggccgttcggtaagatctatatggagcagcgcaaacgctgcgagtgcggtgtgccggtgttcgaaatcaattcatgcagcgagtgtggcgaaagctttttgccagctatgcttggcctcacagagcatggctactttttagaagcaaccgatagtgatgccgtcgacgaattctctctcgatgttgagccgagcgacgacgaaggcggagaagatgacgttggagtggttgtccatgttagccgaaccaaggtcattatcgcgaatcggatccttggtgccactactggaactagggtcgataggctaacgctgcaagtcgaaccggatgatagtgtggcctgcttgcgtctcgacatccgcgatgaagaggcacaaaaggacggtcgcatggcgcttcgttgtccatgttgtaatgaagtcgaaagcgctaagtcgccgttggcacgccgcgccatattgggatcaccgtttttgctaggacagattattcctacgttactcgaattttgcgaggacggagaacaaccgcttactaagccttatcgcggtaagagaatgatcacatttaccgacagccgacagggaaccgctcggattgctgcgaagatccagcaggattctgagcggaatcggattcggggacttgtgttggctagggtcgctagcttggccaatgggcctgagaaccctgtcatcaggcagaaacaggagcagatttcgacgctccagagtgcgctcgttgcaggcccgaatgcaggcttggaaaatctgatacgcacattcgaaaaggagattgtcgaggctagcgtctttaagcctgtgggcttcaacgatatggccgagcacctcactaccaacgagccggacgttaagcgcatgtacgagttctacttgggcttggacccagagctgtttagtggccctcacgggttacgcgaattcgcaaaaatgttactcgctcgagaatttgctcgccgtccgcggcgagtaaacagcagcgaaaccatgggactcgtggcggtacactaccccaaattggaagcgatccaagcgaagccggttttgggaggcatgtcacttgaagagtggaagtcgttcttgaaaatctcactcgacttcttcgtgcgtgaaaacacctgcattgatttgccaacctcgtggatgaagtggggaggaaataaggtacctcgtaagtacctacttgggccacaatctaaagaaaaggccggccatcctttcctgaaatggccgcaggtatctggagcccgccgggacccacgcttggcacggttgctggcatatggcttgaagatcgatgcacgcactccggacggtcgcgatgcaattgattcgctgttacgaaatgcatgggacgacttgattggttgcggcatcttgcagggcagtgtgagtggcggctattacttgaccttcgatgccattgggttcgttccaatcactcgtgcttggatttgtccagtaacacggcgtatattggacacaacatttcggagcattacgccgtacttgccgcgcgacaatcctagtcccgccacggcggagtgttatccgattaccctgccatcttatgccctgctatcgcagagttttacctcagaaagcgaacgcctggaagcaatccgatcttggctgatgacggcaccggagatcacgacctttcgagaggaaggcatatggtctgatctaagcgaccgtatcgttgagggggcggcttatttccgggcagccgagcattccgcgcaacagccagcacgtcgcttggggaactacgagcgcgacttcaagaacggttatctaaacctactgagttgctcgaccaccatggaaatgggtgttgatattggtggcatttcagtggtcgcgatgaataatgtgccaccgcacccggctaactatttacaacgagcaggtcgcgccggccgccgcagcgaaactaggtcggtagcacttactgtttgcaagaataacccccatgatcagtccgtattcgacaatacgcgttggccgtttgacactagtttgcccttgccagccatttcgttgtcgagtagcgcgatagtgcagcgtcacgtcaattcgatgctactttcaaattttctgcgtgttagagccggtacaggcggaatggacctgaacaaactcgattgtgcttggttcttccttccgcacgatgcagcgctggtggatcagttttgcaactgggccgaaaatttcctgggaaagaataatgcggcactgtcaaagggcttgcgctcgctaattcgtaacacctgtttcgatggtactactgctctcaccggattaacgcagatcgctgcggccgagatgctgcgggtacgcaatgcatggtacgaagagtacgctagcatagacgcgcgaatttccgagttttcgtcaccagcaatgcagaaggaggctgcatgcaaggccctcagcattcaacgtagtcgactagcttcggaatatcttttgtcggaactggcatcggaaggtttcctgccgggatatggattcccgtcccatattgcgtccttcgatacgcttaatatcgaggaaattaagcgcaataagcagcaggcagcacaccgagaagacaaccgtatgcgtcatcgcgatttgcccagccgcgaccttgtcaccgcgctacgtgagtatgccccaggttccgacgtggtcatggatggtatggtttaccggagtgctggtattacgctcaactggcatgcacctgcagcacagcagcagattcgcgaaatccagagcatccgaactgcttggcggtgtcgatcatgtggtgcgaacggcacagagccaaacgtcgattcaacccttcactgcgctgagtgcgcaaagcccatacctccagatggtatccgcaagtatcttgaaccggcagggtttgccgttgacctatatgcagacattcataacgatgtgacgcatcaacagtttataaagccgcagtctccttggattcacgtctccgcagagtggacctcgttgccgaacgcgcggctcggacgtttccgtgcgagcccagagggggccgcctatttccattcgtctggtgcgcatgaccttggatatgcagtttgcctcaagtgtggcagggccgaacccatgggggacgacagttcggccacgacatctttaaaaggtcatttgcccgctatttttcgccatccacataagcctttgcgaggtaagcgcggtggtgaaagtgcagtttgctcaggcagtgatgagccgtggtcgattatgccgcacctacacttgggacacgaggtgcgtactgatgtacttgagctgcagcttcaaactgtagacggcgattacctgcaagacgaagcagcggctttctccttggcggttgcgattcgctcggcgattgcagacatgctgggaattcaatctgatgaactgggatgtagtactaaggaagtgcgcgcagatggcgggaccatttgccgttctattttggtctacgacaataatgcaagtgggtatgtgagtaccgtcagcgaccgcatcgatgctgtgttgcgcaaggccgcgcatgctctgcactgccccaagtcatgcgacagcgcgtgccagcattgcctggataattacgacacccgtttccagaacgagttattaaatcggcacgcggcgctggctttccttaccgaagcttggatccgtgacatgcagctgccagttgagtatgcgttttttggagcagcgaatagtcaggctgaataccagccgttagcggaagcaatttggcgtgaactaacagctccaactaataccgcgctgtatctttacttgcacggtgatgttacagactgggacctgccggcgtcgactctgcgaagctacctataccgctggattggtgttggtaagccgattacctttgtgctttcagaggcggctctgcaaacgatctcaatgccaaaccgtcaaatgctcaatgcgtgggcaaaccttgagacagtgagtattggaacctgcaagaagagcccattaattggggcgggtgttttgctggcgcagatcgctagtttaggtggaactatatcttgggcgatgacgaatgaattggcggggtgtgtcggtcctcagtggggagcaagcgcggggcaaactttggtacgggggcttggaattgaacctgcatctgttaaagaggttccggtgggagaactgatgcctgccaaccaagcgaacagctatcaactccaggtcacagatcaatggaacggaagtctacagggttttggtgaacgcttctggcgcgacctgttcgaagcttacccagatctggcatcgccattaagtcggggaaataataacgttgtcggagtatcgtatcgcgatcgttatcttaatgcgcccctgccggttgcattgctgcttgaagtcatcaatggtttgaagcggcgttatgaggatcagtggaatccgcagcagattgtaatcgaaacagtctcactaagtaccacatcccagattgcgtcggcaccacgacccgtctggatggattggaccaatgaggcacttcgccaagcagctattgaggaagcattcgcctattgtggcatgtatgaaatcgagttttcgctgataaaaaaatatgatgccgagcacgcgaggactctggaaatcgaattccaagatggatcgggaatcgtagttaggctggaccaagggctgtcctattggaaggcaaatcgaaaggggtcacgcgtcggtggcacacacgacagagacaacgagttcgatttttcgctgcctacatcactgcaaggagagaaaatcgcggagcttcgtactgaagtcgtttgcccaagctacccgacattcttatatgcaaatctacgttaa

SEQ ID NO: 29607 - DNA, 3273 bp, Janthinobacterium agaricidamnosum NBRC 102515 = DSM 9628
  modified_base (4)..(8): a, c, t, g, unknown or other
gtgnnnnnagccgcatggtggcaacgcgagtacgcaggcggtgcttggagatgggatgacgttattggttctttcggcagtgatcccgatagctggcccgctcaatttcgaaccgaatgcgtccagattggattgcaatattggaggcagcagatcccaacctccggcaaaagatatttcggcgttctggttgagcaagggggcctgccacgggttttgctggcgaaatccaaaggcaacatctacggtcttattcgggctgttctcaaacgagccgcgcggctaggtgccgaggttggagaaatagccgtgatggtggctgattaccaggacaagctgcctaagagcctgcagaacgatgccgtgcatttgctgattgcgcaagtcgtcggtaccgtgcttgacctcaagcgggaattcaagttgaacaagggcgacaacgcggtcgcccgacttgatagtctagccccgcaatggcgccaacgcttccctgtagccctagatgatcatgctgcgattgccttgctaagcgatctcgtcggggacgctgccgcgattgaaaccgaaacgcgcgccgcgccagtggttgctgagcgtttactggtggaagaatcaggcgtatacacgctagtttcacgcgtggagtttcctaaactgctgctggccgaacctctggctggcatactaaatattgatgaaagcactttgccatttcggttcgcagtcgatctccagttagataagcagtactctgcggcggatgttcgtaagacgcttggaacaggtcctgcacgttttcagttcgcggtcttatgctcgcagtggcgcggagatgccgcattgcgagagcacttgttatgcagtgcgttgcctggtcgcgcgtcgatcagcataccggtaccaggcggtatggaaatggacgtggcgtcgccttgggtttttacgtcaaacggagaggaatgccggctggttgcccaaggtagcgcgggtattcgtcaggactttgcttatttggtcattgacgatacgtggaacatttctagcgagggccccgatagtttagtcgagcgtttgggccgtttctctagcgactccctcgcgaaatcggtattcaaggtcgttggtgtggcagctgtgttcgacggcatacacacatatcgagttcataccgggcaggctggcgcggaaaccgagcgaccggtgtgggagggccgccgtttgggttttgcatcttccccgaccctagccttttatggtgccccaaagctttgtcgctataccccagatggtgcgcgcgaggttgttcctgttcagcagcttgaatggcgcgttgccgggactacgcgcgttgtaagtgccgcagctgctcgcggaccggtcgatgttctgtggcgagtcaatggcgaacttcgtctacgcaacaggatggtgatccttgatcgccagccgttacgatttcaatcggggacatctgtgactgagggatgcattaatgttccgtccgtttgggcagtggatgcagttaccttggaggatcgagcgctagccttacgttgcgaacggactatcgactggttatcgatcaatgtggatgcaactaatcatccaccagaatcacttcggcttaccttggattggaagacatgtccggtaccattctttctaacggtgccgtttcctgcctcgggtgggcgatttgttgaccgaaatgacaatcggcttgaagtagactccacgatcactctcgatcaactacttggtgtccgcctgcgcttgtttgattccaacccggaccatccggtacaacataaactggttttctcgttgcgttacactggcctcgaccgcctcgccgcagtcccttcaattgagcatattctcgagctagaagacaaccgtgccgaagtgcggctgattgaccaccagagcgatatcaactcattgctgagccatactgacgtgcttgacgccgtcgtcactgtcgcgttgtgggccggcaggaagcaggctgcttcgcttttggttaaacgttacgaattcgctttaattccagacggggccagtgtcgggatatcaccttcggacctgccgcgcttgccgatcgctgcgctttcagggatagagttgtttgcggttccaatcggatcgatgcataaagatcccggcatccggttggtgcagcagcagtcagagggcgttccgtcgggtaggtggagcctgcctgtaaatgcccccgatcatcaatggttgatttatccggcttccggttcgagctacagttttcgagccgtgatgattgacgtcgcccagccccaggttactatgccgaccggctatattctagccccggagtcaatctatgatgtgttgcagataagcgatccgattcgacggcgcgcgatcctggcgcgtcggcttaacacgctagcagatgattacgcccaccctgattggcagctcattgaagggatctggtgcaatattggacacctcacgctaccgactttggatatctggcgagccttcgccatgaacccatccgcgctggctgcatttgcatgccgttgctgggaaagtgcttcgctcgaccatgtgatgtccatgtgttggcggttccacagcgaacttggggtactttgggaaaccgtaccgctccgaacttggtacgatgcctgcgtcaagatcggcatccaataccaagccttaatgccaatggtggacagctctgcgagagcggccttaatcatcgacagggtcggagaaacgctgcgcagcatccggctacatttccctgcgctcaacacccttcttgcgttcatctcattccaacacaccggccaggaggtggaaatcgtggcaccgctgatgcatgccaagttgcaggacttgaaggcgcggctgtggcatggtccagatgcggcgatccaaaccatcgtcttacgcaattcggctgaccgacatcctccatccttaccattgtatggcgacctcatcgctaaactgaagctacctgacgcgattgccagcacggcattcactctgctctgggatccaacgaacccgaaggcttgtgtggccaacatgcctgtgctacttgcgctctgcagttgcacaggagcgttatgccattggtggagcgacccggcgcgcttgacggagctgcgtcaatatcgagatttcgaccgcgactggttttcccatgcattcgaccaagccgtggcgatgtgtatcgtgtctggagccgtgccggccatcccaataacaacgaactga

SEQ ID NO: 29608 - DNA, 6321 bp, Klebsiella oxytoca
atgactacacgctatttttcgtcacttattgaacaatcgttgtctcgttcaactgaagcaacactgagtatcatgggggtcacaaacccgcagttgcgtgagcacctcgcgcaacaaatgggcgccgattgtgggaaatcaggctcattccttgcttctcccgttttccaacaaatgtttggctggaaagcgtcaaacaaaacgatgcgtagcctgacggaaggcaaggcattgctcagtaaagctgtggttgattcgctggatgatcagaacaatggacgctatcgttttggtgctgactggaaaccctttactcaccagctagccagttggaaggctctgctggaaaaaaaacattctgtggtagtgaccagcggtacgggttcaggcaaaaccgaatgttttatggtgccggtgctggaagacctctaccgggaattacatgaaaatggcaacaacccacttatcggcgtcagggcccttttcctctatccacttaacgccttaattaattcgcaacgtgagcgcctggacgcttggacacgtggttttggttccggaatccgatactgcctctacaacggaaataccgaaaatctacacgccgcagtgaaaagcgaacaggtaaaaagaccgaatgaagtactctcgcgcgaaaaaatgcgtgaagaacccgctccaattctagtgaccaacggcacaatgctggaatatatgatggtccgccagatcgacgctccaattatccagcaatctaaatcacaaaaatcattacgctggatcgtattggatgaagcgcatacctatgtcggctcgcaggccgctgaactggcgctgcagttacgccgcgtgatgacggcctttggtgtgactccagatgatgttcgctttgtagcaacctctgcaaccattgccggaagcgatgccgaaaagcaattaaaaaaattcctctctgaattatccggtataccgcaagagcgcattgacgtactggacggaagccgggttattccggaactggaaccatgcaaacacgtttttattccgttagaagaaattgagcaaatccctgatacagacatgaagggcgtaagcccagagcgctttgatgcacttacgcattcacctgaagcgtattacttgcgcgacatgctagttactcaaccgaatccaatgaagttggatgatatgacgcagcggttgaactcgctaacaaaacagcattatagccagcaggatgtgttgcgctggattgacgtctgctctggcacacaacccaatactaaggatcccgcatttcttaaggtcagggcgcacatattccaacgcaatacccagggggtgtgggcctgtgttgataaagaatgcagattaaagcacggtaccccgctggaaaagggttggccttttggctatgtgtatgtgaacaaacgccaaaattgcgattgtggaagcccggtttacgagctggcattctgtaatgaatgtaatgagccacatcttctggcgcgggacaaaaagggaaaacttgtccaatgggaaaataaaggcggtgatgagttctctttgcaagatgatgtgcatattgaaaatgatgccgcagaagaaaaagttgataaagagagtcgttttcagcccccactcattatcgccgcagagaagaccagcgaggcgggttataccctacagcgtctggaccgtcagacacgtcgtattggtgttattaacaatgacagcatcccgctggttattaacgacattgaacaagtatgtagtgccagtagctgtggctacagaggcgcgagcggaaaacaaccgttccgccgagccttattaggtgggccattttacgtcaccaatattgtgccaaccgttctggaatattgtcaggattttattagtgaagaaggaaaagagggcgtcggacctgattcgttaccaggtcgaggccgtcgacttattacctttaccgacagccggcaaggaacggcccgaatggcggtgcgcatgcagcaagaagctgagcgcagccgcttacgcggtagtgtggtcgaaatcctgagctggcatcaacgaacacagacttctgcaacaccgaatgccaatgccgatctggaaaagttagcgacgagggcaaaacaggcccgccatgaggcgaaagaatatagaagctggggaatgccggaacaagcaaaactggctgaagcgcaagccgaacagcttgaacaggctattcaggccgcgaccggtggcaaagctgcgactattctggtttcgcggacctggattgaaatggttaatgaacttaaagagaaagccgatattcgcggtcctattctgcaatataaccactatctgaagcctgaaattttcaatgaaaatggcgggccgctgaagctttctgaaatgttgttattccgggagtttatgcgccggcccaaacgaactaacagcctggaaacgcagggattagttcaggttggttatcaggggctggagaagatccataagatgccggtgcattggcaagagaaagggctgacgctggatgactggaaggattttcttaaggttacgctggatctctacgtacgtgaaagcaacttcacacaactggacgatgagttgaaaaactggattggtagccgtttttcatcgaaattcgtccgtaacccggacacaaaagatcccgaagataatcagaacagacgctggccgcaaattcgtaatggcaatatatcccatcgtttagtgaagttattaatgcttggcgcaggattcaaaaccgtaaatacggcgacgatggatattatcaatacgtggctgaaagaagcgtggacccaacttactgggccacttgcagtgctgaaacctgatggtaaccgtttctatctgccaaaagagcacatgactttttctttaatcacagatgcctggatttgtccggtaaccaataagattctggatacggcctttaaaggcttaaccccttatctgcccacccacatttcgtttgaacaccttaccaagacacaatatgacgcttttgtcgcacaaaaggtcaccatgccggaaatctggaagctggatcgttcgcaagaagactacgctccgggtctggcgaaggtacgtgactgggttagtaaagaaccactgatcgcacaattacgttcggaaaacgtctggacggatatcaacgatcgtgtcgttgaaggtggcttctactaccgcactgcagagcactctgcccagcagtcttcagaacgtttgcaaagctacgaaaagatgttcaagaacgggcagcttaatgttcttaactgttctaccaccatggaaatgggggttgatatcggtggcattaccgccgtagtgatgaacaacgtaccgccccatccggctaactatttacagcgtgccgggcgagccgggcgtagtcaggaatcgcgtgcgatctcttacacactatgtaaagggaacccgcacgatcaacaggtttttgccaacccactctggccatttgagaccatgatccccgcgccaatggtggcaatgaattccgcccggctggtgcaacgccacgttaatgcgctattactgtccgactttttatgtcacgtcattggcgaaacggataaagaaaaaaccagtctcgatagcctctggtttttcggtgaagacgacgggcaatcaaagtgtgaacgctttaaagtctggctcgagcgtccggttcttgatatcgacgcggcgctggaacggctggtgaaaggcacagcattacatggtgccagacccgacctgttgcgagataaaacaatccatgcgattacgttcatgcagcagcgatggctttccgtctaccgcgatcttgtagcccaggagcgagagtcgcagccacaaacaccttatcgcaagcgcatagaactggagaaaaaacgacactgtggcgagtatttgctgcgtgacctggcggccaggactttcctgccgggatacggcttcccgacagatgtggtgacgtttgataacttcactatggaagactatatccgtgaaaaatcacagaaaaaccgggataaaaaagatcgcgaagataatgtgtcacgttataagggacttccctcgcgtaacctgggcgttgccatccgtgaatatgcaccaggtgcagagatcatactggatggccgggtcttccgctctgctggcgtctcactgcactggcacaatattaatgccgataccaatgaagcccagcgtctggattgcgcctggcgctgtcacaaatgcgggaccataggctatgaagaggggttgagcagttccgggacgctattttgcaccaacagcgcctgtggtgaaaaaatcatcatggataatcgtcgccaggtgctgcagccagccgggtttgtaactgatgcgcacgcgccggtgacgaacaatattgaaaccatgaaatttatcccggttgtccctgcctgggtatttgttaaagcagaacccgcatcgctacctaacccgataatggggtatatggcatctggcgctgatgggcatgttttccagcaaagccttggagaaggtgggcatggttacgcactttgcctgagctgcggtcgcgcagagtcgatgttgaacgcaaacgatgcgccgaaaagtatggaagcccactacccgccgcgtccgggaaaagcggatcgcgacagccagaatcaacgtctaatttgccccggctcgacggcgctcatgaagaacgtcacgctgggggcattggcacgaacggatgtctttgaaatggttctacgcaagccgcaaaacggtgaatatctcccggatagcacggaagaaggccggattgttgccatgactctggcggttgccctacgtcaggcgctggccggggttttgggtatctccgcggcagaactgggctacgccgtgcgtccggtcagactggaagatggacaatcagtattagccgttcaactctacgatgtgattagcggtggtgcaggttttgcatccagtgcgccaatgcacattgaggccattctgttgggaatggtgaagcagttgggttgccaccactgcgatacggcatgcagtgaatgcctcctcgactcccagactcgccacgatcacgatttgctggatcgtaaagcagcacaggcatggcttggtgatgacttctcgtactacatcggtttgccggatgatgaaacattctcgctaccggatgcccgatattgcccgggagccattggcgatacccttcgtcgggcgattaacgagggtgctgaaaaactcacactgtggatgaatgggccactcaatgagtgggatctttatgcccgtcaattccgggcggctattcagaactaccggattaaagacaatgttgcggtcgaccttgtcattcctgctggcgtcgatgatccggagctgttgcatgagctttcgcagtttactgctttgggcgtgcgtttgtgtcatagcgaacaggctctggaattgccgattgttgcgcaagtcgcctttgccgatcgcgtaatgacgctggcttcacgcagccagcaggcaactatcccagggccaggctggcacctgaatgacgaactggtcgttcgcagcctcggctataacacggtaaaactgaacgagtttgttttgccggggaaagcagcgaacgcggttgagcgtgtcaaagacatagagattcataaacagttaaatggtccactttcgcagttcggacaacgcttctgggatttgctgtgtaacaaccatgaagaagcacagtcactgatgaaaaaccagcgaatcaccagcgttcactataccgatcgctatctgcaaaacccggttgcgctggcactgctgggggcgatcctgaaaccgctaaaaacaaagctgaccgatgatgctgaactggcgttggatacgttgtttaaatctaaagaacgttcaggaaatcgcccctctcatgactggatgagcgaagcggattttcaggatttcgccgaccagtggtttacagcggcaatgggcagagcggtagaactgacggtgttcgattcgccacgtgatattccgcatcatcgtaagctgacggtggcctttgagaatggtcagacgttgaagattcgcttcgatcagggaatgggatactggcgtatcgacttcccaaatgcatggcgtaactttgactttactgacgatgtgacttatcagctagtaaaaatggcgcaagcctgccaggagggcaaagtccttaatagcgaggacagctgggcaacggatgtgctggtagaggtgatgacatcttaa

SEQ ID NO: 29609 - DNA, 3288 bp, Klebsiella oxytoca
ttgagtcaatcagaatgcatttcttgggtaaaatgtacttcctggctaagtaactttcttaatcgtagaggattgagacaacctgatagccgtcccctatatgaatatcatgcgaccaatgatgaatacaataatctaacacaactacttcgtgcagttggtcaagtacagagtaatatcgatgataaaggttacgctgcctgttttgtccttttttgctctgaatggtatcgcagagattatgagcgccattgtggttggatgtgggaccctatatatagagcattgggagtatcattaacgtcgactgaattaaggattattatccctaaagggatggaaggttactggaaccgcccaatccgattttacgaatcggaacgacgtaattttctcggaacattgttcagtgaggggggattaccattccgcttactgaaagaatcggatagccattttcagaatgtattctcccggattctcaatcaatatgggcaggcacaactggcaggattttccatactttctctagtaagaactgtcatagaaaaatcagccctgccaactgtttttagcgaagacacttctgtagaactcatcagccatatagcggaaaaactcagctcgctggttctaatgtacaacctgagcaatcataccgaacccgtgaagcagcttgataaagtgcatccaaaatggcgtgatgagttccctatgcctttggatgatgaaacaggtactcgctttcttaatgggttgctatgtactgcctccgtagaggctaaatcccacttacaaaaaaataagggttccggttgtcaattctattggtcggaaaaccatcccaatcaaatccaggcgataatttcgctgcctgatgaactcaccttcccaatcatcagcactccctcaacgacgcgatttgaacttgccatttatgaagatggtgaagaagtcacctgtctcggccccgcctatgcatccctggagaacgcccatgccaaagttcgcctgcgtaaaagtgagtcgagatttgtcagacgccagccagctgcgagcttaacgattgttgcacgaactggaggaatgattgttggcaccataaaacttgaagatagtgaaatcgccgttggcgaggtaccacttacttttgttgatgatgaggaacgctggttattgcaagggcaagcttcttgtactgtacgtaatagcaatgttcttattgccttacctcaagaaaaaaccactatttcagggtgtgaaggctctccaggtacagcgtcgttattaggactcagaacactgtccgtaaaaggacgccaagatataaccatttccggagatgaaacatacaggatccgcaccgggagggaacaatctaatcagagcggatttgatttttatggaaaacatgttacctggaattgccatcctgatgaaacattccttggtgtacctaaagttacggcgaaaaacctgaatgctgaagatatacaattcaaacgttacctgagtggcatatcgttagatgaatgtcaggtacaagagatgatgggtacgcaatatgtttctgtcagaaatactcacaatgaaactctactgcgtcgaaaaattgggatcttgccggcagattttaacattgaaataaagggtggtgagctagccaatgaaggttccattgttatctcaacgcaacatccctgcatgtctgtcttaaaagataaaacactagaggttgctcgcaaacgctcagcaggacaaacagaaatattacttaaagcagaaggaatacctcctgcgtttgtctctttgcagatttacccaaatttgggtgcagccccagtagagatgactctacctttccctgcaaaaggttgcctggcccttgatgcaaatggatgcactctggataaaaatattactctgcatgatttgctgggttcgagagcctttttatttggtaaaaatggcgatccgacacgtttttcactggaattacatttacgttccaaaagtgggttacaggcatggcatgaatggtgttataccgcgggggaacaccccgtcgaactcaatttatacagcctgagagagcatattgaaaacttactgtctcttgagacaggaattgaccaggttgttgagatgcaaatcaaaggcgcaggtgctgtaatgagctggcagattcgccgctataaatacagtttacgctatgattatgaaagagaacttctcatcagccagtcaacccattatcgtaccgggcaaatgtcttcacctgacatcatgttattgagtgagccggagagaaaaatcaccccattatcatcaagaatgagcgaaggtgtaccgacaggtgaatatgaactgagttcggttattaacaaaaatgggccgtggttagtcgtccccaaacagggtgaggaaatggcgtttcgcccctgcttcattcgtggggaaccgtcgttacctgtggatgaaagtagtattcgttcattgcaaaaagcgacccagctttttaatccccagtctgaagttaataccattacactggtacttgaacagatggctaacgatcccgctcattccggctggcaatttatgcgttgcctgtacgaccaatttggttatctgccgctggcaacctttgaagtttggcgtgcgctagtacagcatccacgagcactggcgatgtcgctatttaaatttgagatgtcagctgagtatctgagccgcattgaaaatgagttccctattttatgggagttcttccccatcttcgaaatcaaaactgcagccgatcgatttaaattgttcctgagccaaaagggtgcaccggaagaaacccagaatttactggtgaagagcttgtatcagcgattggggctcgtttttccgacatatgccgacgaaattgagaaatggttaagttatggacaattccctccgcccattccagagttcttcattcgcgagtggtatcaggagcttttacgtgagcatagtgaagctcgctggccagagtacggcagcaagcggctgcatagctggatgacatcacaaaaaaatccagtgatcagcattaatcctgacgcagaataccgctattccgttgcctggttacccgtcttcgccgcagctgtagcaagcggcaatacctcttttgaagccgtatttgaccgtaaaccgggtgccgtatttttcctgagacaggtcagggacttcgattcccgctggtttaaggccatcttccagtgcagcctgttgcgttattttgctcaaaaataa

SEQ ID NO: 29610 - DNA, 6327 bp, Klebsiella oxytoca 10-5249
atgaacgttcagcaactgcattatgcgccacttctaaatcagcttcatcagcgtgcggtgaggtcggtggtaagtcagctggcattgcggagcaagtcgttgagtcaatatctggaatctcaatatttccagcctccaggtctgggggggtcactgcttgcagatccggtattcgaaagtacgtttggctggatgcctgcggatgaaacaatggaggatttgcgtgacaaactgatctccagcccgctggttgatgctttgagcaatgcgccagtgccgtttcgtcatcagctaactgcgtggcgaacgattcttgaagacaagcagtccctattagtgagcagtggtacagggtcaggaaaaacagaatgttttatggtgccggtgctggaagatcttattcgtcagcaaaatttgacccggcagtcactaacagggacgcaggctattttcttgtatccgttgaatgcgctaataaatagtcagcaagagcggcttcgcgagtggactcgcgggtttaaagggaagatacgctttgcgctatataatggcgaaacccggcataccaaatatgaagttcaggaagaccagctcaaagtacctgaacaggcattgagtcgggaagccatttatgaagccccaccgtccatcatggtgacgaataccacgatgctggaatatatgctgattcgtcgcaaagatgcccctgtcattgaaaagtcccagggaatgctgaagtatatcgtccttgatgaggctcacagttatattggctctcaggcagctgaattagcgctgcttttacgtcgcgtcatgcaggccttcaatgttggacctggtacagataaacctgtgcaaatcattgctacctcggccactattggtgaagattctcctgaaggtaataaagaacttgctaaatttgttgccgatctcgcgggggtcacagaacgtgatgtaaaagtagttcgcggctatcgacaaataccgccgatatcggagtctcttattcgtcatgaatatcccacatctttagcatctcttaactcactaagttctcaggaactttaccaacagctgtgccattaccgtgtggcccagcaattgcgtcaggcgttaactcgccccggacgcctggcggtacgtttgagtgaattgctcaatgttgccagaagaacctggccagacattaatcaccgtgagctgctgcagcttctcgatctgatggcgaaatcgcgagagggtgaatctaaattttcactagcttttacgccattacgtatgcatgggtttatccgaacactcgcgggcctatgggcatgttcaaataaacaatgcgcacataaagcgagtgaattaggtgagagtgactggccatttggtcaggtatggtttgaacaacgccaatattgtgactgtggtgcgcctgtatttgaaatcttacgttgctccgggtgtggttcagcttatttgtctgccaaggaggaagtgcgcggtgatggaacgagctggttggtggcgcaacctgctgctgccgaagaggatgagtttgctcttgatctcgatgtttattctgaagatgaagataacaacgaattagaaaataactcccaatttgatcgtcttatagcgagcgatggtgaaaaatatatcatttcactggaggaagcgacggcgggtaaaatcgaccgcgaggcgcaaaagcactatgagataaatctgctaagacctgaatctcgaggtgagggacgcaataattcctttgcttgtgtttgttgtggtgacacccaacggaaaaataatcctttgttccgtccgcttcgactcggtgcacccttttttttaaatgaaattattcctactctgcttgaattttcgcctttaccgcaaacaagagaagagcagttaggaccgtttaatggtcgacgtttgctcacctttacggattcacgtcagggaaccgcccgtatctctgcccgattacagcaggacgcagataaagctacgttacgaaccctttgttatcaggaactggcaaatattaatgagccatcagtaaagctcagtccggcacattgtgcattgttagagagttttattacccagttttctatccctccgttaaaaaattccatcgacgcactgagaaaagcgatggtttcgaatgagaagcttagcccagcagacgttcaggcgcttagaattatcgagccgatggttagttccttaagtcaggaacatgctgaagcaatgcaaatactcctcgtcaattcaggcaatcagcagaagaaaaccatgtcgtggcaaactctgtctgaacaacttgttggcagtgtggaccttgcggacagaatgagaggcagttttaaagacttgtctggacttgagcttactaaacaacagtttgctgatttttgtttatacagtgagtttggtcgccgccctaaaaatgcctggaccctcgaaagtctggggctggtggccattcactatccatttattgataaagtcacaacctgcccgcaggactggaagacattattacccgaccccgataagcaattaccggaatggcgtaatttattgaagattacccttgatttctttatacgtgaaaacagtgccgttttttacgaaaacgaggagtaccctcgctggatgggagctcgtttcccggtaaaaatgctgcaggggccagataaaaaatacaaagggcagaaacgtgatcaactttggccacaaatacgcgatcgtcattataaccgggtcattaagctattaattgctgtctttccggcaatacagcctgagcaggctcactggaaagcgctggttaattacttaatgaatgaggtctgggaagctattcgaccatgcctgcgtcagtttgaatcgggttatcaattggacattaaacaacaagctgaattttacagtccaaagcaagtctggcgttgcccctatactcgccgtgcgttagatgtcactttattgggttattctccgtatttaccaggtagcaaagagatagcacctgaaaaagctgtattgattgaaatgcctgagcttcctgcgcgtcactggcgtttatctggtggtggagaaatggcgcgagaagagcgcctgcactggctggaatgtaatgaacgcattcaacatgctcgggaggagggggtatggtctactcgcagtgatcgattggccctgaaagatagctggtatcgtctggaggaacactcagcgcagcgaacaccagagaagaaccagtttaatgaaaaacaatttaaagcagggaaagtcaatgtgttgaactgttccacgaccatggaaatgggcgtggatattggtggtatgagtttggtcgcgatgaataacgttcctccggctccggcgaattatttgcagcgtgctggccgtgctggccgtcgcggtgaaagcgcatctgccgccattacgttatgtaaaaacaccgcgcatggaatggaggtattcaaagaccctctctgggcgttcaacaccgttgcgagtgccccacgggttcgttttggtagcagtagtattgttcagcggcatgttaacgcattggttttaggtgcgtttttacgagctgaagttcctgatgcgacaaaactgagttgtaaatggttctttgaaggtgatgagagccagtgtcttcgttttctccattggttaaatcatcaggccgatcagctggcggataaacttaaacgccttacccagggaactgtactgatgtcattgacgccgccacagctcttgactcgtacgcaaacgatgatgcagctggttgatactcgttggagaagccaacttgccatactgttggaaaacatcgaagcgttgaaaacagataacagcgcgtgggaagaaacgccagcaggcaaagcaatcacttatcagcttcgtgattatcgcggtgcttatctgttttctaaactcatcagtgaagcgttcctgccgggtcatggtttcccggttggcgtggtcaatttcaattatctgaccgcggatgaactggaaagacgtcgcgcaataaaagccactcaggctgaccctaatgaagggggagaaaacttttctcgccgcattgaaaaactgcccagccgtgacctgcccacagcattacgtgaatatgctcctggtgctgatgtggtattgggcggaaaagtatatcgttcctcgggtattatgcttggtaaagtacttgccagcgggcaggagctgtctggcgatcatcatattccgtggttctggcattgccgtaaatgcggcgcgggagcgaccagcgccacccggcctgtcgaatgttgccactgcaaggcagatatacagcagcttgatgtgaagcggtatttacagcctgtcggtttcgcgacagacattcgttatcaggcacataatgatgtatccatgcctgcgcaacttccctggaaagatcctcgtgttcttgtaccttcttcggtatgggtctccttacccgatgctggactcggacgttaccgttttagtcatagcggggaattgttccactttagtgagggtgaatttggtcatggctacgcaatttgtctttcctgtggccgggcagaatctcaaacccagccccagcgtactccggagaatctaaagaacccggagaaggaaaatacacactacctgttgagaggcggtagtaatgatcggcaggggaacaataaattgtgccacggtcatgttcataaagatctgtggttgggatatagcagccgtacagatatggttgagctgcaactcagtgatgatagtggcttactgatcagggatgatgttgccgcgcgttcccttgcggttgctttgcgtgaaggattagcgcataaattgggtatcgaaaatactgagctgggcgtgacgacacagcaagcgcgcgatatcgatggcttcactggatattctatctttatttacgataataatgctggtggtgcgggttatgcagtgcaattgatcgataattggtcggatgtctttaattacgccagaaaattgctcgattgcagctgtgataaattctgccaccactgcttgctcagctacgacagtcagcattatgtcggcaaattagatcgtcaccaggcattaaccctgctcactaatcttcgtctacagcggcttaatctcgcgccagaatatcagtacttcggagaaagtagtcgggttgaaaccaacccactcagtttgcgtattgcgcaatgcctgaacagcgaggtttatgattcttgctcgttggttcttgctgggtcgcaggaacagtggagttttgcgcaatggccattatttaaagagttactccagtttgcttcctctgggggcaatgttgagttgctgattgccacgcagctggaaaacttagctgatagcaccagacatcagctttccgcgctagcggcgataccgggtgaatgcttgcaagtgaaatctatagacactgcgcaacttgtgcaagggaatgggcacttactggcacaggtcactcgtgaggggcaaacccaacagtgggccgctgccgacagtgccaccgtttcgcccggtgaattatggggacaaagctcggcatcgccggtagtgacgattaaaggggcgtccagaaaaacattctcgggtcagactttgagtgcagaagacttactgccagcattgcccgccggggcggtacgcatcaatctcagccaacaacttgacggtcaggtggaaggttttggttcgcgtttctgggcactgatagctcagcagcatgctggctggaagaaggtttttactaatggacgcgaaattactcacgtccattatagtgatcgttatctcaatagcccatttactgtacgtttgttaggtgaaattttgacggaattggttgaacaggggctggcagaacgtgccgaactcactgtttcagttaaaaagttagagtacagttctcgccaacacgattcactctataacgcatggcttgatgagcaggatcgccagcaagttatgaccacgttgctggaagagggctaccttgggccagcctggtcagggaaaatctcatggttagcaggagataatcagaacaccgatcacggacgtgaactgaccgtgaccttcagcgatggcagtgaacattatgtgttgctcgatatgggactgagttactggcgttgtacaggtgacacattcttcgatttttcaggacgaataccgaatcaggtcgagcgcctggcaacatgccgggcattggttatagccccggataatggattgaagagttatatcatcgcaggctaa

SEQ ID NO: 29611 - DNA, 3354 bp, Klebsiella oxytoca 10-5249
gtgaaaactccagttaacccacttttgcgatggctcaatgcgttttttagcagtcgttcattacccggagctgatgggagggcgctgtatgcttaccgttgtcatgatgcagagtatgaaagtttggctgctcttcttcgtgcccatgttccacgtaactaccccaaaaccatattcatttcttacagtgatgttttgttcagcatatacgccgctgagtttatccgccgtaaccatactgcaggacatccaagatgggacgttattttagaatcgattggctggaaggtaccttacgcacatcggcaaaagctggtaaatgatgggattcgttactggaaaagaaaggtgagaagtctgggtcaagcatcgggttatctgcatactctggcttgcgaaggcggtttgcccatccggatgattgaaaatgaaagtggctatttaataacctatttcaaacgagtttatcaggcactacgtgggcaatcgtcaaggcgtcctgcggaaataatcgcacaagaactgggcgacactattcctgcgacaatgcaaaatgaactcgtctatgaaatagctggtgaattttgcgagacacttcatacgttactcaatgagcatcccactcatggtcaggaccccgtttcctcactacgcaaacaatatcctgactggcatcttcaacttccgttggtactcccggaagagaatgcctcagagattgtaagacgattactttctcaatcttcagagccccgtatatcaagcaatgtgctggttgaaaggatatgggttgatgttgatgacagttggtattgcgatgcccggtttcgatttccggccacaatgcgtactgaacagttaatatccctgtttgaaagcaatattcagccggaacagacacgactcatcatttctgcaaaatggagaaatggtggggcccggttggcaatgctaagccgttatgaacagcaagattggcgagtagagttattacccttcgctatgcaaaaactctctggggcagatgcgatgaccgaaatatcgttgtcgctccatgaagggccgattctgctaggtcacgtaattcccaaagggggttatgagcttaccgaagatttaccatgggtttttgaagcgatgaatgagagcgagtcgcagttaaaacttgtcggcatgggctctgttagttccaggcaaaactctctttttatttcgctaccgacaaatagtcatttggatattagtggagaaggtgagtttgatatcccgaggttgctgaaaaatagtgaacgtagcttaactaaaataagcggagtattcagcgttgttttacatgatggcgcagtttgtacgattcgcacgcagcaactttatgattctgcgattgagtattatataaaaccgacagagatcgatctggtaaaatctgattatcctgtccatcgtgcctggccaaagatcggctggaaaaaggatatgcagcatggcattgtcccagagaacgaacttttttggcgatccattcgttcaggtaacaactcctggttttctgtcgcatcagtaatgccgaaagggcagatagaagtcaggcgaatagtcaatggtgaggttttatttagcggtaaagttgtgattttgccagcagatttcgatattcaaattattcccgagactgctcagcaaggagttattgtactctctggtataacggatgcaagggttgataaatattcaaacagtgaaaaagtaacacttaaatcagattatttgcaaaacgagtgtgttattgattgtaattcatcacagatgctagagaacaccatcaatttacgagtatcctggaaagatggttctaatcttaaattgttattacctaagcccgttagcggtggacggtttgtaagtaatgatggttctgttcattttgacggtgttgcatctatagcacatttgcatggcgtggacgctgagctgttaacaatatcttgtgccgggaaaggatatcttaatatcgagttgttggatgaaaacccgatgtctgaaaaatttcattatttacatgcggatattccattgttatctggccgtaatgaaaaattgcaacagatttcactttatgagaattataatctgctgaacgccatgcttgtatgtgcatggaaaaatgatagtacattacgtgttgatttttactctgacagatttggtaaggacaaaacaacactcaatattaaacgctacgatggccgttttattgagggtgatgaaagattgctggttgatataaaagattctattgtttttccttaccataaaatagacgacatggttgttgaagccatttctcttaatactcctgacttatacacagtcctgctgaaaaaagatgagtctggttatgatttctcgacgttgaataatcaaggtggcccatggttaattgtgggtaaaattgatggtgcaattcgtattgcaccagtgattaaatggatgctacctacattacagacagatgatttatttctaaatgctatatgcaacgcatcgccagaacaacgcaaggaatattgtaatgcgctgtttttggaaatgaaaaataatcctttgcaaaactcttgttatttgttggttgagtacattaaaaaatataagttgaataatagcttgcctttgctggaactggatttatttagagaaatttcgagtaattattgcgtgattgttcagttgttaatatcatcatgtctttctggggatagtgatgctatttatgatatacaggaagaattacccttctcatggggatggattcctgtttcaatatggaaagatgtctttgaacagtgttggtattctctggaaaaacagattaatgataaggcatttgcattaaatatactacagccatttattgcatttataaatcatcaagcgcatatcgatcgtcgattagttcccatcgctaatatgttgcttacacatagtgagatattacctgcaggttgcactgtattgccatctgtaagccgcgagcagtttaatgatgccaaacagatgttattaagaaacccagatagttttggacgtgtcagcattttttctaaagagctttgggatagtgctattactccagaccttaaatctgtttttaataaattttggatcgaaaacacatatcacactcgttttgaaaaacgttttaatttgatgttagtcgcggcgctgctttcccaaagaaacaataaacttatgcatcagctaactgcactttttgaatttcactatcagcaagccccgcagcaattgggggttatctatcagtattattttgaacaagcaggagtatgtcattga

SEQ ID NO: 29612 - DNA, 6327 bp, Klebsiella oxytoca G54
atgaacgttcagcaactgcattatgcgccacttctaaatcagcttcatcagcgtgcggtgaggtcggtggtaagtcagctggcattgcggagcaagtcgttgagtcaatatctggaatctcaatatttccagcctccaggtctgggggggtcactgcttgcagatccggtattcgaaagtacgtttggctggatgcctgcggatgaaacaatggaggatttgcgtgacaaactgatctccagcccgctggttgatgctttgagcaatgcgccagtgccgtttcgtcatcagctaactgcgtggcgaacgattcttgaagacaagcagtccctattagtgagcagtggtacagggtcaggaaaaacagaatgttttatggtgccggtgctggaagatcttattcgtcagcaaaatttgacccggcagtcactaacagggacgcaggctattttcttgtatccgttgaatgcgctaataaatagtcagcaagagcggcttcgcgagtggactcgcgggtttaaagggaagatacgctttgcgctatataatggcgaaacccggcataccaaatatgaagttcaggaagaccagctcaaagtacctgaacaggcattgagtcgggaagccatttatgaagccccaccgtccatcatggtgacgaataccacgatgctggaatatatgctgattcgtcgcaaagatgcccctgtcattgaaaagtcccagggaatgctgaagtatatcgtccttgatgaggctcacagttatattggctctcaggcagctgaattagcgctgcttttacgtcgcgtcatgcaggccttcaatgttggacctggtacagataaacctgtgcaaatcattgctacctcggccactattggtgaagattctcctgaaggtaataaagaacttgctaaatttgttgccgatctcgcgggggtcacagaacgtgatgtaaaagtagttcgcggctatcgacaaataccgccgatatcggagtctcttattcgtcatgaatatcccacatctttagcatctcttaactcactaagttctcaggaactttaccaacagctgtgccattaccgtgtggcccagcaattgcgtcaggcgttaactcgccccggacgcctggcggtacgtttgagtgaattgctcaatgttgccagaagaacctggccagacattaatcaccgtgagctgctgcagcttctcgatctgatggcgaaatcgcgagagggtgaatctaaattttcactagcttttacgccattacgtatgcatgggtttatccgaacactcgcgggcctatgggcatgttcaaataaacaatgcgcacataaagcgagtgaattaggtgagagtgactggccatttggtcaggtatggtttgaacaacgccaatattgtgactgtggtgcgcctgtatttgaaatcttacgttgctccgggtgtggttcagcttatttgtctgccaaggaggaagtgcgcggtgatggaacgagctggttggtggcgcaacctgctgctgccgaagaggatgagtttgctcttgatctcgatgtttattctgaagatgaagataacaacgaattagaaaataactcccaatttgatcgtcttatagcgagcgatggtgaaaaatatatcatttcactggaggaagcgacggcgggtaaaatcgaccgcgaggcgcaaaagcactatgagataaatctgctaagacctgaatctcgaggtgagggacgcaataattcctttgcttgtgtttgttgtggtgacacccaacggaaaaataatcctttgttccgtccgcttcgactcggtgcacccttttttttaaatgaaattattcctactctgcttgaattttcgcctttaccgcaaacaagagaagagcagttaggaccgtttaatggtcgacgtttgctcacctttacggattcacgtcagggaaccgcccgtatctctgcccgattacagcaggacgcagataaagctacgttacgaaccctttgttatcaggaactggcaaatattaatgagccatcagtaaagctcagtccggcacattgtgcattgttagagagttttattacccagttttctatccctccgttaaaaaattccatcgacgcactgagaaaagcgatggtttcgaatgagaagcttagcccagcagacgttcaggcgcttagaattatcgagccgatggttagttccttaagtcaggaacatgctgaagcaatgcaaatactcctcgtcaattcaggcaatcagcagaagaaaaccatgtcgtggcaaactctgtctgaacaacttgttggcagtgtggaccttgcggacagaatgagaggcagttttaaagacttgtctggacttgagcttactaaacaacagtttgctgatttttgtttatacagtgagtttggtcgccgccctaaaaatgcctggaccctcgaaagtctggggctggtggccattcactatccatttattgataaagtcacaacctgcccgcaggactggaagacattattacccgaccccgataagcaattaccggaatggcgtaatttattgaagattacccttgatttctttatacgtgaaaacagtgccgttttttacgaaaacgaggagtaccctcgctggatgggagctcgtttcccggtaaaaatgctgcaggggccagataaaaaatacaaagggcagaaacgtgatcaactttggccacaaatacgcgatcgtcattataaccgggtcattaagctattaattgctgtctttccggcaatacagcctgagcaggctcactggaaagcgctggttaattacttaatgaatgaggtctgggaagctattcgaccatgcctgcgtcagtttgaatcgggttatcaattggacattaaacaacaagctgaattttacagtccaaagcaagtctggcgttgcccctatactcgccgtgcgttagatgtcactttattgggttattctccgtatttaccaggtagcaaagagatagcacctgaaaaagctgtattgattgaaatgcctgagcttcctgcgcgtcactggcgtttatctggtggtggagaaatggcgcgagaagagcgcctgcactggctggaatgtaatgaacgcattcaacatgctcgggaggagggggtatggtctactcgcagtgatcgattggccctgaaagatagctggtatcgtctggaggaacactcagcgcagcgaacaccagagaagaaccagtttaatgaaaaacaatttaaagcagggaaagtcaatgtgttgaactgttccacgaccatggaaatgggcgtggatattggtggtatgagtttggtcgcgatgaataacgttcctccggctccggcgaattatttgcagcgtgctggccgtgctggccgtcgcggtgaaagcgcatctgccgccattacgttatgtaaaaacaccgcgcatggaatggaggtattcaaagaccctctctgggcgttcaacaccgttgcgagtgccccacgggttcgttttggtagcagtagtattgttcagcggcatgttaacgcattggttttaggtgcgtttttacgagctgaagttcctgatgcgacaaaactgagttgtaaatggttctttgaaggtgatgagagccagtgtcttcgttttctccattggttaaatcatcaggccgatcagctggcggataaacttaaacgccttacccagggaactgtactgatgtcattgacgccgccacagctcttgactcgtacgcaaacgataatgcagctggttgatactcgttggagaagccaacttgccatactgttggaaaacatcgaagcgttgaaaacagataacagcgcgtgggaagaaacgccagcaggcaaagcaatcacttatcagcttcgtgattatcgcggtgcttatctgttttctaaactcatcagtgaagcgttcctgccgggtcatggtttcccggttggcgtggtcaatttcaattatctgaccgcggatgaactggaaagacgtcgcgcaataaaagccactcaggctgaccctaatgaagggggagaaaacttttctcgccgcattgaaaaactgcccagccgtgacctgcccacagcattacgtgaatatgctcctggtgctgatgtggtattgggcggaaaagtatatcgttcctcgggtattatgcttggtaaagtacttgccagcgggcaggagctgtctggcgatcatcatattccgtggttctggcattgccgtaaatgcggcgcgggagcgaccagcgccacccggcctgtcgaatgttgccactgcaaggcagatatacagcagcttgatgtgaagcggtatttacagcctgtcggtttcgcgacagacattcgttatcaggcacataatgatgtatccatgcctgcgcaacttccctggaaagatcctcgtgttcttgtaccttcttcggtatgggtctccttacccgatgctggactcggacgttaccgttttagtcatagcggggaattgttccactttagtgagggtgaatttggtcatggctacgcaatttgtctttcctgtggccgggcagaatctcaaacccagccccagcgtactccggagaatctaaagaacccggagaaggaaaatacacactacctgttgagaggcggtagtaatgatcggcaggggaacaataaattgtgccacggtcatgttcataaagatctgtggttgggatatagcagccgtacagatatggttgagctgcaactcagtgatgatagtggcttactgatcagggatgatgttgccgcgcgttcccttgcggttgctttgcgtgaaggattagcgcataaattgggtatcgaaaatactgagctgggcgtgacgacacagcaagcgcgcgatatcgatggcttcactggatattctatctttatttacgataataatgctggtggtgcgggttatgcagtgcaattgatcgataattggtcggatgtctttaattacgccagaaaattgctcgattgcagctgtgataaattctgccaccactgcttgctcagctacgacagtcagcattatgtcggcaaattagatcgtcaccaggcattaaccctgctcactaatcttcgtctacagcggcttaatctcgcgccagaatatcagtacttcggagaaagtagtcgggttgaaaccaacccactcagtttgcgtattgcgcaatgcctgaacagcgaggtttatgattcttgctcgttggttcttgctgggtcgcaggaacagtggagttttgcgcaatggccattatttaaagagttactccagtttgcttcctctgggggcaatgttgagttgctgattgccacgcagctggaaaacttagctgatagcaccagacatcagctttccgcgctagcggcgataccgggtgaatgcttgcaagtgaaatctatagacactgcgcaacttgtgcaagggaatgggcacttactggcacaggtcactcgtgaggggcaaacccaacagtgggccgctgccgacagtgccaccgtttcgcccggtgaattatggggacaaagctcggcatcgccggtagtgacgattaaaggggcgtccagaaaaacattctcgggtcagactttgagtgcagaagacttactgccagcattgcccgccggggcggtacgcatcaatctcagccaacaacttgacggtcaggtggaaggttttggttcgcgtttctgggcactgatagctcagcagcatgctggctggaagaaggtttttactaatggacgcgaaattactcacgtccattatagtgatcgttatctcaatagcccatttactgtacgtttgttaggtgaaattttgacggaattggttgaacaggggctggcagaacgtgccgaactcactgtttcagttaaaaagttagagtacagttctcgccaacacgattcactctataacgcatggcttgatgagcaggatcgccagcaagttatgaccacgttgctggaagagggctaccttgggccagcctggtcagggaaaatctcatggttagcaggagataatcagaacaccgatcacggacgtgaactgaccgtgaccttcagcgatggcagtgaacattatgtgttgctcgatatgggactgagttactggcgttgtacaggtgacacattcttcgatttttcaggacgaataccgaatcaggtcgagcgcctggcaacatgccgggcattggttatagccccggataatggattgaagagttatatcatcgcaggctaa

SEQ ID NO: 29613 - DNA, 3354 bp, Klebsiella oxytoca G54
gtgaaaactccagttaacccacttttgcgatggctcaatgcgttttttagcagtcgttcattacccggagctgatgggagggcgctgtatgcttaccgttgtcatgatgcagagtatgaaagtttggctgctcttcttcgtgcccatgttccacgtaactaccccaaaaccatattcatttcttacagtgatgttttgttcagcatatacgccgctgagtttatccgccgtaaccatactgcaggacatccaagatgggacgttattttagaatcgattggctggaaggtaccttacgcacatcggcaaaagctggtaaatgatgggattcgttactggaaaagaaaggtgagaagtctgggtcaagcatcgggttatctgcatactctggcttgcgaaggcggtttgcccatccggatgattgaaaatgaaagtggctatttaataacctatttcaaacgagtttatcaggcactacgtgggcaatcgtcaaggcgtcctgcggaaataatcgcacaagaactgggcgacactattcctgcgacaatgcaaaatgaactcgtctatgaaatagctggtgaattttgcgagacacttcatacgttactcaatgagcatcccactcatggtcaggaccccgtttcctcactacgcaaacaatatcctgactggcatcttcaacttccgttggtactcccggaagagaatgcctcagagattgtaagacgattactttctcaatcttcagagccccgtatatcaagcaatgtgctggttgaaaggatatgggttgatgttgatgacagttggtattgcgatgcccggtttcgatttccggccacaatgcgtactgaacagttaatatccctgtttgaaagcaatattcagccggaacagacacgactcatcatttctgcaaaatggagaaatggtggggcccggttggcaatgctaagccgttatgaacagcaagattggcgagtagagttattacccttcgctatgcaaaaactctctggggcagatgcgatgaccgaaatatcgttgtcgctccatgaagggccgattctgctaggtcacgtaattcccaaagggggttatgagcttaccgaagatttaccatgggtttttgaagcgatgaatgagagcgagtcgcagttaaaacttgtcggcatgggctctgttagttccaggcaaaactctctttttatttcgctaccgacaaatagtcatttggatattagtggagaaggtgagtttgatatcccgaggttgctgaaaaatagtgaacgtagcttaactaaaataagcggagtattcagcgttgttttacatgatggcgcagtttgtacgattcgcacgcagcaactttatgattctgcgattgagtattatataaaaccgacagagatcgatctggtaaaatctgattatcctgtccatcgtgcctggccaaagatcggctggaaaaaggatatgcagcatggcattgtcccagagaacgaacttttttggcgatccattcgttcaggtaacaactcctggttttctgtcgcatcagtaatgccgaaagggcagatagaagtcaggcgaatagtcaatggtgaggttttatttagcggtaaagttgtgattttgccagcagatttcgatattcaaattattcccgagactgctcagcaaggagttattgtactctctggtataacggatgcaagggttgataaatattcaaacaatgaaaaagtaacacttaaatcagattatttgcaaaacgagtgtgttattgattgtaattcatcacagatgctagagaacaccatcaatttacgagtatcctggaaagatggttctaatcttaaattgttattacctaagcccgttagcggtggacggtttgtaagtaatgatggttctgttcattttgacggtgttgcatctatagcacatttgcatggcgtggacgctgagctgttaacaatatcttgtgccgggaaaggatatcttaatatcgagttgttggatgaaaacccgatgtctgaaaaatttcattatttacatgcggatattccattgttatctggccgtaatgaaaaattgcaacagatttcactttataagaattataatctgctgaacgccatgcttgtatgtgcatggaaaaatgatagtacattacgtgttgatttttactctgacagatttggtaaggacaaaacaacactcaatattaaacgctacgatggccgttttattgagggtgatgaaagattgctggttgatataaaagattctattgtttttccttaccataaaatagacgacatggttgttgaagccatttctcttaatactcctgacttatgcacagtcctgctgaaaaaagatgagtctggttatgatttctcgacgttgaataatcaaggtggcccatggttaattgtgggtaaaattgatggtgcaattcgtattgcaccagtgattaaatggatgctacctacattacagacagatgatttatttctaaatgctatatgcaacgcatcgccagaacaacgcaaggaatattgtaatgcgctgtttttggaaatgaaaaataatcctttgcaaaactcttgttatttgttggttgagtacattaaaaaatataagttgaataatagcttgcctttgctggaactggatttatttagagaaatttcgagtaattattgcgtggttgttcagttgttaatatcatcatgtctttctggggatagtgatgctatttatgatatacaggaggaattacccttctcatggggatggattcctgtttcaatatggaaagatgtctttgaacagtgttggtattctctggaaaaacagattaatgataaggcatttgcattaaatatactacagccatttattgcatttataaatcatcaagcgcatatcgatcgtcgattagttcccatcgctaatatgttgcttacacatagtgagatattacctgcaggttgcactgtattgccatctgtaagccgcgagcagtttaatgatgccaaacagatgttattaagaaacccagatagttttggacgtgtcagcattttttctaaagagctttgggatagtgctattactccagaccttaaatctgtttttaataaattttggatcgaaaacacatatcacactcgttttgaaaaacgttttaatttgatgttagtcgcggcgctgctttcccaaagaaacaataaacttatgcatcagctaactgcactttttgaatttcactatcagcaagccccgcagcaattgggggttatctatcagtattattttgaacaagcaggagtatgtcattga

SEQ ID NO: 29614 - DNA, 6321 bp, Klebsiella pneumoniae
atgactacacgctatttttcgtcacttattgaacaatcgttgtctcgttcaactgaagcaacactgagtatcatgggggtcacaaacccgcagttgcgtgagcacctcgcgcaacaaatgggcgccgattgtgggaaatcaggctcattccttgcttctcccgttttccaacaaatgtttggctggaaagcgtcaaacaaaacgatgcgtagcctgacggaaggcaaggcattgctcagtaaagctgtggttgattcgctggatgatcagaacaatggacgctatcgttttggtgctgactggaaaccctttactcaccagctagccagttggaaggctctgctggaaaaaaaacattctgtggtagtgaccagcggtacgggttcaggcaaaaccgaatgttttatggtgccggtgctggaagacctctaccgggaattacatgaaaatggcaacaacccacttatcggcgtcagggcccttttcctctatccacttaacgccttaattaattcgcaacgtgagcgcctggacgcctggacacgtggttttggttccggaatccgatactgcctctacaacggaaataccgaaaatctacacgccgcagtgaaaagcgaacaggtaaaaagaccgaatgaagtactctcgcgcgaaaaaatgcgtgaagaacccgctccaattctggtgaccaacggcacaatgctggaatatatgatggtccgccagatcgacgctccaattatccagcaatctaaatcacaaaaatcattacgctggatcgtattggatgaagcgcatacctatgtcggctcgcaggccgctgaactggcgctgcagttacgccgcgtgatgacggcctttggtgtgactccagatgatgttcgctttgtagcaacctctgcaaccattgccggaagcgatgccgaaaagcaattaaaaaaattcctctctgaattatccggtataccgcaagagcgcattgacgtactggacggaagccgggttattccggaactggaaccatgcaaacacgtttttattccgttagaagaaattgagcaaatccctgatacagacatgaaaggcgtaagcccagagcgctttgatgcacttacgcattcacctgaagcgtattacttgcgcgacatgctagttactcaaccgaatccaatgaagttggatgatatgacgcagcggttgaactcgctaacaaaacagcattatagccagcaggatgtgttgcgctggattgacgtctgctctggcacacaacccaatactaaggatcccgcatttcttaaggtcagggcgcacatattccaacgcaatacccagggggtgtgggcctgtgttgataaagaatgcagattaaagcacggtaccccgctggaaaagggttggccttttggctatgtgtatgtgaacaaacgccaaaattgcgattgtggaagcccggtttacgagctggcattctgtaatgaatgtaatgagccacatcttctggcgcgggacaaaaagggaaaacttgtccaatgggaaaataaaggcggtgatgagttctctttgcaagatgatgtgcatattgaacatgatgccgcagaagaaaaagttgataaagagagtcgttttcagcccccactcattatcgccgcagagaagaccagcgcggcgggttatacccaacagcgtctggaccgtcagacgcgtcgtattggtgttattaacaatgacagcatcccgctaattattaacgacattgaacaagtatgtagtgccagtagctgtggctacagaggcacgagcggaaaacaaccgttccgccgtgccttattaggtgggccattttacgtcaccaatattgtgccaaccgttctggaatattgtcaggattttattagtgaagaaggaaaagagggcgtcggacctgattcgttaccaggtcgaggccgtcgacttattacctttaccgacagccggcaaggaacggcccgaatggcggtgcgcatgcagcaagaagctgagcgcagccgcttacgcggtagtgtggtcgaaatcctgagctggcatcaacgaacacagacttctgcaacaccgaatgccaatgccgatctggaaaagttagcgacgagggcaaaacaggcccgccatgaggcgaaagaatatagaagctggggaatgccggaacaagcaaaactggctgaagcgcaagccgaacagcttgaacaggctattcaggccgcgaccggtggcaaagctgcgactattctggtttcgcggacctggattgaaatggttaatgaacttaaagaaaaagccgatattcgcggccctattctgcaatataaccactatctgaagcctgaaattttcaatgagaatggcgggccgctaaagctttctgaaatgttgttattccgggagtttatgcgccggcccaaacgaactaacagcctggaaacgcagggattagttcaggttggttatcaggggctggagaagagccataagatgccggtgcattggcaagagaaagggctgacgctggatgactggaaggattttcttaaggttacgctggatctgtacgtacgtgaaagcaacttcacacaactggacgatgagttgaaaaactggattggtagccgtttttcatcgaaattcgtccgtaacccggacacaaaagatcccgaagataatcagaacagacgctggccacaaattcgtaatggcaatatatcccatcgtttagtgaagatattaatgcttggcgcaggattcaaaaccgtaaatacggcgacgatggatattatcaatacgtggctgaaagaagcgtggacccaacttaccggcccacttgcagtgctgaaacctgatggtaaccgtttctatctaccaaaagagcacatgactttttctttaatcacagatgcctggatttgtccggtaaccaataagattctggatacggcctttaaaggcttaaccccttatctgcccacccacatttcgtttgaacaccttaccaagacacaatatgacgcttttgtcgcgcaaaaggtcaccatgccggaaatctggaagctggatcgttcgcaagaagactacgctccgggtctggcgaaggtacgtgactgggttagtaaagagccactaatcgcacaattacgttcggaaaacgtctggacggatattaacgatcgtgtcgtggaaggcggattttactaccgcacagccgagcactctgctcagcaatcgtcagaacgtttgcaaagctacgaaaagatgttcaaaaacggacagcttaatgttctcaactgttccaccaccatggaaatgggggttgatatcggtggcattaccgccgtggtgatgaacaacgtaccgccacatccggcaaactatttacagcgtgccgggcgagccgggcgtagtcaggaatcacgtgcgatttcttatactctgtgcaaaggaaacccgcacgaccagcaggttttttccaacccactctggccgtttgagaccatgatccccgcgccgatggtggcaatgaattccgcccggttggtgcaacgccacgtcaatgcgttattactgtccgactttttatgtcacgtcattggcgaaacagataaagaaaaaaccagtcttgatagcctctggtttttcggtgaagacgacgggcaatcaaaatgtgaacactttaaagtctggctcgagcgtccggttcttgatatcgacgcggcgctggaacggctggtgaaaggtacagcattacatggcgccagacccgacctgttgcgggataaaacaatccatgcgattacgttcctgcaacagcgatggctttccgtctaccgcgatcttgtagcccaggaacgagaatcgcagccgcaaacgccttatcgcaagcgcatagaactggagaaaaaacgacactgtggcgagtatttgctgcgtgacctggcggccaggactttcctgccgggatacggcttcccgacagatgtggtgacgtttgataacttcactatggaagactatatccgtgaaaaatcacagaaaagccgggataaaaaagatcgcgaagataatgtgtcacgttataagggacttccctcgcgtaacctgggggttgccatccgtgaatatgcaccaggtgcagagatcatactggatggccgggtcttccgctctgctggcgtctcactgcactggcacaatattaatgccgataccaatgaagcccagcgtctggattgcgcctggcgctgtcacaaatgcgggaccataggctatgaagaggggttgagcagttccgggacgctattttgcaccaacagcgcctgtggtgaaaaaatcatcatggataatcgtcgccaggtgctgcagccagccgggtttgtaactgatgcacacgcgccggtgacgaacaatattgaaaccatgaaatttatcccggttgtccctgcctgggtatttgttaaagcagaacccgtatcgctacctaacccgataatggggtatatggcatctggcgctgatgggcatgttttccagcaaagccttggagaaggtgggcatggttacgcactttgtctgagctgcggtcgcgcagagtcgatgttgaacgcaaacgatgcgccgaaaagtatggaagcccactacccgccgcgtccgggaaaagcagatcgcgacagccagaatcaacgtctaatttgccccggctcgacggcgctcatgaagaacgtcacgctgggggcattggcacgaacggatgtctttgaaatggttctacgcaagccgcaaaacggtgaatatctcccggatagcacggaagaagggcggattgttgccatgactctggcggtagcactacgtcaggcgctggccggggttttgggtatctccgcggcagaactgggctacgccgtgcgtccggtcagactggaagatggacaatcagtattagccgttcaactctacgatgtgattagcggtggtgcaggttttgcatccagtgcgccaatgcacattgaggccattctgttgggaatggtgaagcagttgggttgccaccactgcgatacggcatgcagtgaatgcctcctcgactcccagactcgccacgatcacgatttgctggatcgtaaagcagcacaggcatggcttggtgatgacttctcgtactacatcggtttgccggatgatgaaacattctcgctaccggatgcccgatattgcccgggagccattggcgatacccttcgtcgggcgattaacgagggtgctgaaaaactcacactgtggatgaatgggccactcaatgagtgggatctttatgcccgtcaattccgggcggctattcagaactaccggattaaagacaatgttgcggtcgaccttgtcattcctgctggcgtcgatgatccggagctgttgcatgagctttcgcagtttactgctttgggcgtgcgtttgtgtcatagcgaacaggctctggaattgccgattgttgcgcaagtcgcctttgccgatcgcgtaatgacgctggcttcacgcagccagcaggcaactatcccagggccaggctggcacctgaatgacgaactggtcgttcgcagcctcggctataacacggtaaaactgaacgagtttgttttgccggggaaagcagcgaacgcggttgagcgtgtcaaagacatagagattcataaacagttaaatggtccactttcgcagttcggacaacgcttctgggatttgctgtgtaacaaccatgaagaagcacagtcactgatgaaaaaccagcgaatcacaagcgttcactataccgatcgctatctgcaaaacccggttgcgctggcactgctgggggcgatactgaaaccgctaaaaacaaagctgaccgatgacgcggagcttgagcttgatactctgtttaagcccaaagatcgttcaggaaatcgcccctctcatgactggatgagcgaagcggattttcaggatttcgccgaccagtggtttactgcggcaatgggcagagcggtagaactgacggtgttcgattcgccacgtgatattccacatcatcgtaagctgacggtgacctttgaagatagtcagatgttgaagattcgcttcgaccagggaatgggatactggcgtatcgacttcccgtatgcatggcgtaactttgactttactgatgatgtgacttatcagctagtaaaactggcgcaagcctgccaggagggcaaagtccttaatagcgaggaaagctgggcaacggatgtgctggtagaggtgatgccgtcttaa

SEQ ID NO: 29615 - DNA, 3288 bp, Klebsiella pneumoniae
ttgagtcaatcagaatgcatttcttgggtaaaatgtacttcctggctaagtaactttcttaatcgtagaggattgagacaacctgatagccgtcccctatatgaatatcatgcgaccaatgatgaatacaataatctaacacaactacttcgtgcagttggtcaagtacagagttatatcgatgataaaggttacgctgcctgttttgtccttttttgctctgaatggtatcgcagagattatgagcgccattgtggttggatgtgggaccctatatatagagcattgggagtatcattaacgtcgactgaattaaggattattatccctaaagggatggaaggttactggaaccgcccaatccgattttacgaatcggaacgacgtaattttctcggaacattgttcagtgaggggggattaccattccgcttactgaaagaatcggatagccattttcagaatgtattctcccggattctcaatcaatatgggcaggcacaactggcaggattttccatactttctctagtaagaactgtcatagaaaaatcagccctgccaactgtttttagcgaagacacttctgtagaactcatcagccatatagcggaaaaactcagctcgctggttctaatgtacaacctgagcaatcataccgaacccgtgaagcagcttgataaagtgcatccaaaatggcgtgatgagttccctatgcctttggatgatgaaacaggtactcgctttcttaatgggttgctatgtactgcctccgtagaggctaaatcccacttacaaaaaaataagggttccggttgtcaattctattggtcggaaaaccatcccaatcaaatccaggcgataatttcgctgcctgatgaactcaccttcccaatcatcagcactccctcaacgacgcgatttgaacttgccatttatgaagatggtgaagaagtcacctgtctcggccccgcctatgcatccctggagaacgcccatgccaaagttcgcctgcgtaaaagtgagtcgagatttgtcagacgccagccagctgcgagcttaacgattgttgcacgaactggaggaatgattgttggcaccataaaacttgaagatagtgaaatcgccgttggcgaggtaccacttacttttgttgatgatgaggaacgctggttattgcaagggcaagcttcttgtactgtacgtaatagcaatgttcttattgccttacctcaagaaaaaaccactatttcagggtgtgaaggctctccaggtacagcgtcgttattaggactcagaacactgtccgtaaaaggacgccaagatataaccatttccggagatgaaacatacaggatccgcaccgggagggaacaatctaatcagagcggatttgattttgatggaaaacatgttacctggaattgccatcctgatgaaacattccttggtgtacctaaagttacggcgaaaaacctgaatgctgaagatatacaattcaaacgttacctgagtggcatatcgttagatgaatgtcaggtacaagagatgatgggtacgcaatatgtttctgtcagaaatactcacaatgaaactctactgcgtcgaaaaattgggatcttgccggcagattttaacattgaaataaagggtggtgagctagccaatgaaggttccattgttatctcaacgcaacatccctgcatgtctgtcttaaaagataaaacattagaggttgctcgcaaacgctcagcaggacaaacagaaatattacttaaagcagaaggaatacctcctgcgtttgtctctttgcagatttacccaaatttgggtgcagccccagtagagatgactctacctttccctgcaaaaggttgcctggcccttgatgcaaatggatgcactctggataaaaatattactctgcatgatttgctgggttcgagagcctttttatttggtaaaaatggcgatccgacacgtttttcactggaattacatttacgttccaaaagtgggttacaggcatggcatgaatggtgttataccgcgggggaacaccccgtcgaactcaatttatacagcctgagagagcatattgaaaacttactgtctcttgagacaggaattgaccaggttgttgagatgcaaatcaaaggcgcaggtgctgtaatgagctggcagattcgccgctataaatacagtttacgctatgattatgaaagagaacttctcgtcagccagtcaacccattatcgtaccgagcaaatgtcttcacctgtcatcatgttattgagtgagccggagagaaaaatcaccccattatcatcaagaatgagcgaaggtgtaccgacaggtgaatatgaactgagttcggttattaacaaaaatgggccgtggttagtcgtccccaaacagggtgaggaaatggcgtttcgcccctgcttcattcgtggggaaccgtcgttacctgtggatgaaagtagtattcgttcattgcagaaagcgacccagctttttaatccccagtctgaagttaataccattacactggtacttgaacagatggctaacgatcccgctcattccggctggcaatttatgcgttgcctgtacgaccaatttggttatctgccgctggcaacctttgaagtttggcgtgcgctagtacagcatccacgagcactggcgatgtcgctatttaaatttgagatgtcagctgagtatctgagccgcattgaaaatgagttccctattttatgggagttcttccccatcttcgaaatcaaaactgcagccgatcgatttaaattgttcctgagccaaaagggtgcaccggaagaaacccagaatttactggtgaagagcttgtatcagcgattggggctcgtttttccgacatatgccgacgaaattgagaaatggttaagttatggacaattccctccgcccattccagagttcttcattcgcgagtggtatcaggagcttttacgtgagcatagtgaagctcgctggccagagtacggcagcaagcggctgcatagctggatgacatcacaaaaaaatccagtgatcagcattaatcctgacgcagaataccgctattccgttgcctggttacccgtcttcgccgcagctgtagcaagcggcaatacctcttttgaagccgtatttgaccgtaaaccgggtgccgtatttttcctgagacaggtcagggacttcgattcccgctggtttaaggccatcttccagtgcagcctgttgcgttattttgctcaaaaataa

SEQ ID NO: 29616 - DNA, 6321 bp, Klebsiella pneumoniae
atgactacacgctatttttcttcgttgattgagcagtcgttatctcgttcgacggaagctacgctgagcattatgggcgtaaccaacccacatctacgcgagcaccttgcgcatcaaatggcggctgaatgtggaaaggacggaacttttctggcttcacctgtgtttgaacaaacatttggatggaaagagtcaaatttcacgatgagggatcttgctacaaagcaaacgttactgagtaaggaggttgttgattctctcgataacgaagaaaacggacgttatcgctttggctcaacctggaaaccgttcacacatcagttagccagctggcaagcattacttgataaaaaacattcggtggttgtgaccagcggcacgggatcgggtaaaaccgagtgttttatggttccggtgcttgaggatctatatcgcgaactacgggacaacgggaaaaaaccactcataggcgttcgagcccttttcctttatcccctaaatgccctgatcaattcacagcgtgaacgtttagatgcctggacccaaggttttggaaccgggattcggtactgtctgtataacggtaatactgaagagctgcatgcctcagtaaaaagtgagcaggcaaatcggccaaatgaggtgctttcgcgtgagaaaatgcgcgaggaacctgcccctgttctggtcacaaacggtaccatgctggaatacatgatggtgcgtcaggttgatgcacctatcattcagaaatcaaaagcggaaaaatcattacgctggatcgttctggacgaagcccatacctacgtaggttcccaggctgctgaactggctttacaacttcgtcgtgtcatgacggcgtttggcgttacgcctgatgatgttcgctttgttgcaacgtccgctactattgccgggagtgatgctgaaaagcagctgaaaaaattcttgtctgagttgtccggtgtgccgcaggaacgtattgatgttctgggcggtagccgcgtcattcctgacctggagccgtgccagcatctttctctatccctggatgagcttgagcgtattcctgattctgatgggaaaggtattagccttgagcgctacaccgcgctgacccactcaccgcaagcgcgtcatctccgcgaaatgcttgtgagtcaacccagaccgatgaagcttgatacgctgtcccggcgtttgaatgagctaacaaaacaccagtacactcagcaggacactttgcgctggatcgatctctgtaccggtacgcttcccaatgcgcaagaaccggcgtttcttaaagtcagagtgcatatttttcagcgtaatacccagggaatatgggcctgcgtagataaacattgctccgctaaacataatactgcgctggagaaggggtggccttttggcaatgtgtatgtgaatcagcggcaaaactgtgagtgtggtagccccgtatatgaacttgcgttctgtaatgagtgtaatgaaccgcatttgcttgcccgggacaaaaaaggaaaacttgtacagtgggataataaaggtggggatgagttttcgctgcaggatgaagcacctgatgattttgactcttcgagcgaaaaaattcaaaaagaacaggtatttcagccaccacatattattgccgcggaatgtaatactgaaatgggctatatcgtacagcgcctcgatcgtcaaactcgaagtattggcgtagtcaacccggatagtattccgttggcgatgaatgatattgagcaggtttgtagcgccagcaactgtagttatagaggggggaaaggtaaacatcctttccggcgagcactgttaggcgggcctttttatgtgacgaatatcgtgcctaccgtgctggaatattgtcaggactttatcagtgatgaaggtaaagagggggttggtccgctttctttgcctggtcgagggcgccgattgataaccttcactgatagccgtcagggaacggcacggatggcggtgcggatgcagcaggaagcggagcgcagccgtttgcgcggtagcgtgatggatattcttggatggcaccaacgtaaacagtcaacacatgcgccaaatgcccaagctgacgtaacgaagttgactgagatggcagcgcaggcacgtgaagaagcgaaaaatcttcatgattgggggatgccagaagaagcgatccgtcgtgaagaacaagctgagcgcttagagcacgctattcaggtcgccagtggcggaaaagttgatgctgctttgatttctctttcctggcctgaaatggtcaaggaattgaaagataaagcggatatcaaaggccctatcctgcagtataaccactatcttaaacccgaaatattcactgaaaatggtggtcctttaaaactcgctgaaatgctgcttttccgtgaatttatgcggcgcccgaaacgcactaatagcctggaaacacaagggctggttcaggtgggttatctggggctggagaagttgcatagcatccctgctcattggcaggaaaaaggattaactctggatgactggcgcgattttcttaaggtcacactggatttctatgtcagggaaagcaactacacccagctggacgaagatctaaaaaactggatcggtagccgtttctcttcaaagtttgtccgtaaccccgattcgaaagagcctgatgacaaccaggttaaacgctggccacaaattcgtcacggtaacgtcacgcagcgtctggtcaaacttttgatcctcggtgctaaattcagcagcgtaaatacggtcacaatcgatatcgttaatgcgtggctaaaagaggcctggcttcagttgacggggtcattagcgatattgaaatccgacggcaaccgtttttatttacctaaggagcatctgacattctctctggtacaaaaagcttatatttgcccggtaaccaataaattactggcgacggctttcagaggtctgacgccttatctgccaatgcatattcagtttgaacggctgaccagtgcacaatatgacgcctttgtcgccaagtcggtgacgctgcctgagatttggcagcacgatcgttctcaggatgattatgtcgatgggttaagaaaagttcgtgactggctgggtcaggaccctctggtggcgcaattacgttcgcaaaacctctggacggacattaacgatcgcgtcgttgaaggtggattttactaccgcacggcagagcattccgcccagcaatcatccgaacgtctacaaagttatgaacgtatgtttaaaaacggacagctcaacgttcttaactgttcaaccaccatggaaatgggcgtggatattggcgggatttctgctgtggtgatgaataacgtcccgccgcaccccgctaactatttgcagcgtgccgggcgtgccgggcgtagcaaagagtcccgcgctatttcttacacgttgtgcaaaggcaacccgcacgataggcaggtttttgctaaccctctctggccttttgaaacggtgatccctgcgccgatggtggcaatgaattctgagcgtctggtacagcgccacgtcaattctctgctgctgtcagattatttgtgccatgtcatcggtgaaaccgaaaaagaacgcaccagccttaatagtcagtggttcttcggcgaagagcttgatcagtcggtgtgtaaccgcttcaaagcttggctggagcgtccgacgctgagcattgacgcggctttggttcgtttggttaaaggcaccgcgcttcatggcgttgcggctgaaaagctgcgggataaaacgtgcgatgcgattgcggcgctgcagaagcgctggctgggaatttatcgcgatcttgttaagcaggaaagtgaatcacatcccaatacgccgtatcgcaaacgtctggaactggagaaaaaacggcactgcggcgagtatctgctgcgcgatttggcggccagaaccttcctgcctggatatggcttcccaacggatgttgtcacttttgataacttcactatggaagattatatccgcgagaaaacgtacaaagtccgtgataagagcgatcgtgaagataacgtctcgcgttataaaggcttgccttcacgcaacctttccgtggcgatccgtgagtatgcgccgggcgcggagattatcctggatggtcgggtcttccgctccgctggggtgtctctgcactggcataatctcaatgctgataccaatgaagctcagcgtctggatagcgcctggcgttgtcacaaatgcggtacgttaggctatgaagaaggtattggcggttcgggagatttgttctgtaccaatgatgcgtgcggtgagcgcatcacggcggaaaaccgacgtcaggttttacagcctgcgggttttgtgacggatgcgcacgatccggtgaccaataacattgagaccatgaaattcattccggttgtgccggcctgggtatttgttaaggctgagcgtgtaccgctgcctaacccgttgatgggctttatggcttccggggcggacggtaatgtgttccagcaaagtatgggggaaggcggccacggctatgcgctgtgcctgagctgcggccgtgcggagtcgatgctcaaccccacggatgcgccgaaatccatggaagcacactatccgccccgtcctggaaaggccgaccgggatagtcagaatcagcggattatctgcccgggttcaacggcgctgaataaaaatgtcacgctgggagcgctggccagaacggatgtcttcgagctgattgtccgtcgcccgcaggacggagagtatattgctgataatacggaggaaggtcgcattgttgcaatgacgctggccgtggcgctgcggcgttcgctggcgagcgtgctgggcgtttccgccgcggagctgggctacgcggtgcgtccagtcaggctggagaacgagcaatccgttctggcggtgcagctgtacgatattatcagcggcggtgcgggctttgcttccagcgcgccattgcatattgaggccgtgctgaagggaatggtgaagcagctgggctgccatcactgcgataccgcctgtagcgagtgcctgctcgattcacagacccgccacgatcatgatctgctggatcgtaaagcggcactggcctggctgggggcggatttcagccactatattggtttgccggatgaggagaaattctctctggctgatgcgcaatattgcccagggagcattgaagatactctgcgacgggccatcaacgatggtggtcgaaagctcacgctgtggatgggtgggccgttgaatgagtgggatctgtatgcccgccagttccgcaccgcgatccagaactaccggctaaaagatgatgttgaggtggtgctggttatcccgcgaaacattgacgatccggagatccttctggaactcgcgcagttcgcggcgataggcgtgcagctgtgccagtctgagctggatacggatacgccgctcgttgcgcaggtggcgtttgacgatcgcctgatgacattaatttcacgcagccatgaagctaccatccctgggccgaactggcatctgaatagtcagatggttattcgcagccatctgcaggggccgatagcgctttataaagccgagttgccatccgaggatgcgggcagtaaaggcctggttaacgatattgaaatccataagcagcttaacggcccggtttctcagtttggccaacgcttctggaacctgctgaccgagtctcaggatgatattcagcgcctgctgacggaatgccgggtgacgcgtatccactatagcgatcgctatctgcaaaaccctgtagcgctggcgttgttaggcgggttgttgaagacgttgaaaccgatgctgacacaagaggcggaagtgacgattgatacgttgttcaggagtaaagagcgtccggggaacaaaccgttccatgactggatgagtgaagcagactttcaggatttcgccgaccagtggtttgcggcatccatgggacgagccgtggagattcaggcgttcaactctggccgcgacattccgcaccaccgtaagctgatggtgagttttgataatggccaggcgctgaaaatccgctttgatcaggggatgggatactggcgtattaactttgcgcgagcctggcgtgattttaactttaatgttgatgtctctttccagctggggaatatggagcaagcctgcgcagaaggcctggtagtgaacagcgaggagagctgggcaactgatgtgctggtgcaggttatcgcaccttaa

SEQ ID NO: 29617 - DNA, 3300 bp, Klebsiella pneumoniae
ttgagttatcatgaacatatatcaatacttaagtgtactccttggttagtcaagtttctaactcgtagaggtttaagaaaacctgataatcgtcctctttatgaataccacgcaacgagcgatgaatatgatgaattgaaacggctattgcgagctgtagggctacctgatggttacaaaagtgataaaggatacgcagcctgctttacgttgttctgctcagagtggtatcgaagagattatgaaagggagtgtggatgggcatgggagccaatttataaaacgataggcatatcagcatcttcttcggaaatggggaagataatccctaaaggcctggatggatactgggggcgcccggtgcggttctatgatacagaaagacggaattttttaggctctttatttagtgaaggcggtttacctttcaggttactaaaggaatctaatagccgttttcagtcgatgttctctctcattcttaatcaatacgaacaggcccaattatctaacatttctacgttcatgttagttcattcagcggtagagaaatcatctctgccagtcgttttcaaagaggatacttcagttgagcttataagtcggatggctgaacagttagtatctcttgttcaaatttatgatctgagtaaccacaccgaacctgtaaaagaacttgaacgtgttcatccgaagtggcgggacagttttcctgttcctctcgatgatgatacgggcaccagtttccttaatggacttttacaaacagcttctattgaatccaaaccccgcctccaaaagaataaagcgactctctgccagtttttatggtcagaaaatcatcctgaagccgtccagaccgtcattgcgttgcctgaagaactgaactttttacttgaaagcgagccttcaacaactcgcttcgagcttgctatctacgaagatggtaacgagattgctagtctgggccctgcctatgcaacgctaaataactcgcaagcaaaaataagggttcgtaagcgcgaaattaaattttatcgaaaaacgcctaatgtaagtttgttcattgtcgcgagagctggggggatgcttgtcggctctaagctgttggagggaagtgaaattgcagcgggagatgtgccgttaatttttgtttctgatcatgatgaatggttgctacagggacaagcctcttgctgcgtacgcggcagtcgtgtgcttattattctaccaaaggatggttgtctggcttcaaaacatgaggcttgtgatgttggcctttcggctttgggatgtagggcttttactatcgaaggtcgacaggatataattattgaaggcgatgaaacatatcggataaagacaggaagagataagattattcaggctgggttctcattccaggggaagcagttaaattggacaagctacccggatgaggtctttcttggtattcccggaattaccaaagatcctgatgatatatcagaacatcattataggcgatttttcaacggtacatttatagatgattgtgatttacatgagaaaatgggtgcacagtttctttcagtacgtaacaataataatgaaacgttattgcgtaaaaaaataggtattcttcccaatgattttagccttgaaataaaaaatggagaacaagcaaatgaaggttctattattatttcaaccaagcattcttgctggtatagtttgaaagaaaaaacattggaggttgataggaagcgatcacccggcagcacagaaataatgatgaaaactgagggcgttccccctgcatcgattttactacaaataacgccaaaccttgctgctaaccccattgttgtttctctccctttccctgctcgaggttgccttgcctttgataaagacgaaaagcccctacccaaaaatttaacgattcacgatcttctgggagccagagcataccttttcggaaaaaatggtgaacctacgcgataccaacttgagctacgtttacgctcccgtagcggaatgcaggcatggtatgagtggcgttatagtgcgggcgaaagcccggtagagattacgttatacagcttaagagaacatattgacaatttactttccctggaggaaggcattgatcaaacggtggatatgcgtattgagggcggaggtagctctttcacctggcaaatcaggcgctataaatatagccttgagtatgaccgggaaaggcagcttcttcttgctaattcagtgagcaatcgtacggggcagatcccttcacccgttataatgttactcagtgagcccgaaagaaaggcaatatcgcttgtgtcgagaacaagcgaaggtgtaccggttggtgagttcgaattaagttcgacgatacaaaataatggcccatggctagttgttcccaagcaaggtgatgaagcttcgtttcggccttgctacattgcaggcgagccggtgatccaaagcgatactacgacaatacagtctctgcaaaaggcaacgcagcatttcaatccccggtcggatgtaaataccattacgttagttctggaacaaatggcgagcgaccctgcacactcgggctggcagttcttacgtaacttatacaatcagtttggatatttaccgctggctacctttgaggtatggcgtgccttggtcctgcatccacgggcattggcaatgtcattgtttaaattcgagatgtccattgattatctcagccgtattgaaagcgagtttcctgttttctgggagtttttgcctattaccgaggttaaatatgctgcgatgcgttttcgagcatttatgactcataaaggtgccccggaggaaatgcagaacaagtcattgggtcgaatgtttcagaaattaggaactgtatttccaacctatgccagcgaggtgcaaacctggttagaccaggggaaattaccaccgacttttccggcacaaatgatagaaggtatcattcatgagtggtatcaggagctcttacgtgaacatggtgaatcacgttggccagagtttggtgggccgggtctttttcgttggtacgcctcgcaaaaggatcccattatagaagttttgcctgatactagttatcgatattccgtcactttgctcccaatatttgctgctgctgttacatgcggcaaaacaacttttgacagcgtttttgagaataaacctggtgccgtatttttcttaaggcaagtgagagattttgactcgcgatggtttaatgccattttccagtattgcttattgcgtaatgtggctgaaaaataa

SEQ ID NO: 29618 - DNA, 6321 bp, Klebsiella pneumoniae; identical to SEQ ID NO: 29614

SEQ ID NO: 29619 - DNA, 3288 bp, Klebsiella pneumoniae; identical to SEQ ID NO: 29615

SEQ ID NO: 29620 - DNA, 6321 bp, Klebsiella pneumoniae
atgactacacgctatttttcgtcacttattgaacaatcgttgtctcgttcaactgaagcaacactgagtatcatgggggtcacaaacccgcagttgcgtgagcacctcgcgcaacaaatgggcgccgattgtgggaaatcaggctcattccttgcttctcccgttttccaacaaatgtttggctggaaagcgtcaaacaaaacgatgcgtagcctgacggaaggcaaggcattgctcagtaaagctgtggttgattcgctggatgatcagaacaatggacgctatcgttttggtgctgactggaaaccctttactcaccagctagccagttggaaggctctgctggaaaaaaaacattctgtggtagtgaccagcggtacgggttcaggcaaaaccgaatgttttatggtgccggtgctggaagacctctaccgggaattacatgaaaatggcaacaacccacttatcggcgtcagggcccttttcctctatccacttaacgccttaattaattcgcaacgtgagcgcctggacgcctggacacgtggttttggttccggaatccgatactgcctctacaacggaaataccgaaaatctacacgccgcagtgaaaagcgaacaggtaaaaagaccgaatgaagtactctcgcgcgaaaaaatgcgtgaagaacccgctccaattctggtgaccaacggcacaatgctggaatatatgatggtccgccagatcgacgctccaattatccagcaatctaaatcacaaaaatcattacgctggatcgtattggatgaagcgcatacctatgtcggctcgcaggccgctgaactggcgctgcagttacgccgcgtgatgacggcctttggtgtgactccagatgatgttcgctttgtagcaacctctgcaaccattgccggaagcgatgccgaaaagcaattaaaaaaattcctctctgaattatccggtataccgcaagagcgcattgacgtactggacggaagccgggttattccggaactggaaccatgcaaacacgtttttattccgttagaagaaattgagcaaatccctgatacagacatgaagggcgtaagcccagagcgctttgatgcacttacgcattcacctgaagcgtattacttgcgcgacatgctagttactcaaccgaatccaatgaagttggatgatatgacgcagcggttgaactcgctaacaaaacagcattatagccagcaggatgtgttgcgctggattgacgtctgctctggcacacaacccaatactaaggatcccgcatttcttaaggtcagggcgcacatattccaacgcaatacccagggggtgtgggcctgcgttgataaagaatgcagattaaagcacggtaccccgctggaaaagggttggccttttggctatgtgtatgtgaacaaacgccaaaattgcgattgtggaagcccggtttacgagctggcattctgtaatgaatgtaatgagccacatcttctggcgcgggacaaaaagggaaaacttgtccaatgggaaaataaaggcggtgatgagttctctttgcaagatgatgtgcatattgaacatgatgccgcagaagaaaaagttgataaagagagtcgttttcagcccgcactcattatcgccgcagagaagaccagcgcggcgggttatacccaacagcgtctggaccgtcagacgcgtcgtattggtgttattaacaatgacagcatcccgctagttattaacgacattgaacaagtatgtagtgccagtagctgtggctacagaggcacgagcggaaaacaaccgttccgccgtgccttattaggtgggccattttacgtcaccaatattgtgccaaccgttctggaatattgtcaggattttattagtgaagaaggaaaagagggcgtcggacctgattcgttaccaggtcgaggccgtcgacttattacctttaccgacagccggcaaggaacggcccgcatggcagtgcgcatgcagcaagaagctgagcgcagccgcttacgcggcagtgtggtggaaatcctgagctggcatcaacgaacacagacttctgcaacaccgaatgccaatgccgatctggaaaagttagcgacgagggcaaaacaggcccacaatgaggcgaaagagtatagaagctggggaatgccggaacaagcaaaactggctgaagcgcaagccgaacagcttgaacaggctattcaggccgcgaccggtggcaaagctgcgaccattctgttttcgcggacctggattgaaatggttaatgaacttaaagagaaagccgatattcgcggccctattctgcaatataaccactatctgaagcctgaaattttcaatgagaatggcgggccgctaaagctttctgagatgttgttattccgggagtttatgcgccggcccaaacgaactaacagcctggaaacgcagggattagttcaggttggttatcaggggctggagaagatccataagatgccggtgcattggcaagagaaagggctgacgctggatgactggaaggattttcttaaggttacgctggatctgtacgtacgtgaaagcaacttcacacaactggacgatgagttgaaaaactggattggtagccgtttttcatcgaaattcgtccgtaacccggacacaaaagatcccgaagataatcagaacagacgctggccacaaattcgtaatggcaatatatcccatcgtttagtgaagttattaatgcttggcgcaggattcaaaaccgtaaatacggcgacgatggatattatcaatacgtggctgaaagaagcgtggacccaacttaccggcccacttgcagtgctgaaacctgatggtaaccgtttctatctgccaaaagagcacatgactttttctttaatcacagatgcctggatttgtccggtaaccaataagattctggatacggcctttaaaggcttaaccccttatctgcccacccacatttcgtttgaacaccttaccaagacacaatatgacgcttttgtcgcgcaaaaggtcaccatgccggaaatctggaagctggatcgttcgcaagaagactacgctccgggtctggcgaaggtacgtgactgggttagtaaagagccactaatcgcacaattacgttcggaaaacgtctggacggatattaacgatcgtgtcgtggaaggcggattttactaccgcacagccgagcactctgctcagcaatcgtcagaacgtttgcaaagctacgaaaagatgttcaaaaacgggcagcttaatgttcttaactgttctaccaccatggaaatgggggttgatatcggtggcattaccgccgtagtgatgaacaacgtaccgccccatccggctaactatttacagcgtgccgggcgagccgggcgtagtcaggaatcgcgtgcgatctcttacacactatgtaaagggaacccgcacgatcaacaggtttttgccaacccactctggccatttgagaccatgatccccgcgccaatggtggcaatgaattccgcccggctggtgcaacgccacgtcaatgcgttattactgtccgactttttatgtcacgtcattggcgaaacagataaagaaaaaaccagtcttgatagcctctggtttttcggtgaagacgacgggcaatcaaaatgtgaacactttaaagtctggctcgagcgtccggttcttgatatcgacgcggcgctggaacggctggtgaaaggtacagcattacatggcgccagacccgacctgttgcgggataaaacaatccatgcgattacgttcctgcaacagcgatggctttccgtctaccgcgatcttgtagcccaggaacgagaatcgcagccgcaaacgccttatcgcaagcgcatagaactggagaaaaaacgacactgtggcgagtatttgctgcgtgacctggcggccaggactttcctgccgggatacggcttcccgacagatgtggtgacgtttgataacttcactatggaagactatatccgtgaaaaatcacagaaaagccgggataaaaaagatcgcgaagataatgtgtcacgttataagggacttccctcacgtaacttgggggttgccatccgtgaatatgcaccaggtgcagagatcatactggatggccgggtcttccgctctgctggcgtctcactgcactggcacaatattaatgccgataccaatgaagcccagcgtctggattgcgcctggcgctgtcacaaatgcgggaccataggctatgaagaggggttgagcagttccgggacgctattttgcaccaacagcgcctgtggtgaaaaaatcatcatggataatcgtcgccaggtgctgcagccagccgggtttgtaactgatgcacacgcgccggtgacgaacaatattgaaaccatgaaatttatcccggttgtccctgcctgggtatttgttaaagcagaacccgtatcgctacctaacccgataatggggtatatggcatctggcgctgatgggcatgttttccagcaaagccttggagaaggtgggcatggttacgcactttgtctgagctgcggtcgcgcagagtcgatgttgaacgcaaacgatgcgccgaaaagtatggaagcccactacccgccgcgtccgggaaaagcagatcgcgacagccagaatcaacgtctaatttgccccggctcgacggcgctcatgaagaacgtcacgctgggggcattggcacgaacggatgtctttgaaatggttctacgcaagccgcaaaacggtgaatatctcccggatagcacggaagaagggcggattgttgccatgactctggcggtagcactacgtcaggcgctggccggggttttgggtatctccgcggcagaactgggctacgccgtgcgtccggtcagactggaagatggacaatcagtattagccgttcaactctacgatgtgattagcggtggtgcaggttttgcatccagtgcgccaatgcacattgaggccattctgttgggaatggtgaagcagttgggttgccaccactgcgatacggcatgcagtgaatgcctcctcgactcccagactcgccacgatcacgatttgctggatcgtaaagcagcacaggcatggcttggtgatgacttctcgtactacatcggtttgccggatgatgaaacattctcgctaccggatgcccgatattgcccgggagccattggcgatacccttcgtcgggcgattaacgagggtgctgaaaaactcacactgtggatgaatgggccactcaatgagtgggatctttatgcccgtcaattccgggcggctattcagaactaccggattaaggacaatgttgcggtcgaccttgtcattcctgctggcgtcgatgatccggagctgttgcatgagctttcgcagtttactgctttgggcgtgcgtttgtgtcatagcgaacaggctctggaattgccgattgttgcgcaagtcgcctttgccgatcgcgtaatgacgctggcttcacgcagccagcaggcaactatcccagggccaggctggcacctgaatgacgaactggtcgttcgcagcctcggctataacacggtaaaactgaacgagtttgttttgccggggaaagcagcgaactctgttgagcgtgtcaaagacatagagattcataaacagttaaatggtgcactttcgcagttcggacaacgcttctgggacacgctgtttaacagccatgaagaagcacaatcgctgatgaaaaaccagcgaatcaccagcgttcactataccgatcgctatctgcaaaacccggttgcgctggcactgctgggggcgatactgaaaccgctaaaaacaaagctgaccgatgacgcggagcttgagcttgatactctgtttaagcccaaggatcgtcccggcaaccggccgttccatgactggatgagcgatgcggattttcaggatttcgccgaccagtggtttactgcggcaatgggcagagcggtagaactgacggtgttcgattcgccacgtgatattccacatcatcgtaagctgacggtgacctttgaagatggtcagacgttgaagattcgattcgaccagggaatgggatactggcgtatcgacttcccaaatgcatggcgtaactttgactttactgacgatgtgacttatcagctagtaaaaatggcgcaagcctgccaggagggcaaagtccttaatagcgaggacagctgggcaacggatgtgctggtagaggtgatgtcgtcttaa

SEQ ID NO: 29621 - DNA, 3288 bp, Klebsiella pneumoniae
ttgagtcaatcagaatgcatttcttgggtaaaatgtacttcctggctaagtaactttcttaatcgtagaggattgagacaacctgatagccgtcccctatatgaatatcatgcgaccaatgatgaatacaataatctaacacaactacttcgtgcagttggtcaagtacagagtaatatcgatgataaaggttacgctgcctgttttgtccttttttgctctgaatggtatcgcagagattatgagcgccattgtggttggatgtgggaccctatatatagagcattgggagtatcattaacgtcgactgaattaaggattattatccctaaagggatggaaggttactggaaccgcccaatccgattttacgaatcggaacgacgtaattttctcggaacattgttcagtgaggggggattaccattccgcttactgaaagaatcggatagccattttcagaatgtattctcccggattctcaatcaatatgggcaggcacaactggcaggattttccatactttctctagtaagaactgtcatagaaaaatcagccctgccaactgtttttagcgaagacacttctgtagaactcatcagccatatagcggaaaaactcagctcgctggttctaatgtacaacctgagcaatcataccgaacccgtgaagcagcttgataaagtgcatccaaaatggcgtgatgagttccctatgcctttggatgatgaaacaggtactcgctttcttaatgggttgctatgtactgcctccgtagaggctaaatcccacttacaaaaaaataagggttccggttgtcaattctattggtcggaaaaccatcccaatcaaatccaggcgataatttcgctgcctgatgaactcaccttcccaatcatcagcactccctcaacgacgcgatttgaacttgccatttatgaagatggtgaagaagtcacctgtctcggccccgcctatgcatccctggagaacgcccatgccaaagttcgcctgcgtaaaagtgagtcgagatttgtcagacgccagccagctgcgagcttaacgattgttgcacgaactggaggaatgattgttggcaccataaaacttgaagatagtgaaatcgccgttggcgaggtaccacttacttttgttgatgatgaggaacgctggttattgcaagggcaagcttcttgtactgtacgtaatagcaatgttcttattgccttacctcaagaaaaaaccactatttcagggtgtgaaggctctccaggtacagcgtcgttattaggactcagaacactgtccgtaaaaggacgccaagatataaccatttccggagatgaaacatacaggatccgcaccgggagggaacaatctaatcagagcggatttgattttgatggaaaacatgttacctggaattgccatcctgatgaaacattccttggtgtacctaaagttacggcgaaaaacctgaatgctgaagatatacaattcaaacgttacctgagtggcatatcgttagatgaatgtcaggtacaagagatgatgggtacgcaatatgtttctgtcagaaatactcacaatgaaactctactgcgtcgaaaaattgggatcttgccggcagattttaacattgaaataaagggtggtgagctagccaatgaaggttccattgttatctcaacgcaacatccctgcatgtctgtcttaaaagataaaacattagaggttgctcgcaaacgctcagcaggacaaacagaaatattacttaaagcagaaggaatacctcctgcgtttgtctctttgcagatttacccaaatttgggtgcagccccagtagagatgactctacctttccctgcaaaaggttgcctggcccttgatgcaaatggatgcactctggataaaaatattactctgcatgatttgctgggttcgagagcctttttatttggtaaaaatggcgatccgacacgtttttcactggaattacatttacgttccaaaagtgggttacaggcatggcatgaatggtgttataccgcgggggaacaccccgtcgaactcaatttatacagcctgagagagcatattgaaaacttactgtctcttgagacaggaattgaccaggttgttgagatgcaaatcaaaggcgcaggtgctgtaatgagctggcagattcgccgctataaatacagtttacgctatgattatgaaagagaacttctcgtcagccagtcaacccattatcgtaccgagcaaatgtcttcacctgtcatcatgttattgagtgagccggagagaaaaatcaccccattatcatcaagaatgagcgaaggtgtaccgacaggtgaatatgaactgagttcggttattaacaaaaatgggccgtggttagtcgtccccaaacagggtgaggaaatggcgtttcgcccctgcttcattcgtggggaaccgtcgttacctgtggatgaaagtagtattcgttcattgcagaaagcgacccagctttttaatccccagtctgaagttaataccattacactggtacttgaacagatggctaacgatcccgctcattccggctggcaatttatgcgttgcctgtacgaccaatttggttatctgccgctggcaacctttgaagtttggcgtgcgctagtacagcatccacgagcactggcgatgtcgctatttaaatttgagatgtcagctgagtatctgagccgcattgaaaatgagttccctattttatgggagttcttccccatcttcgaaatcaaaactgcagccgatcgatttaaattgttcctgagccaaaagggtgcaccggaagaaacccagaatttactggtgaagagcttgtatcagcgattggggctcgtttttccgacatatgccgacgaaattgagaaatggttaagttatggacaattccctccgcccattccagagttcttcattcgcgagtggtatcaggagcttttacgtgagcatagtgaagctcgctggccagagtacggcagcaagcggctgcatagctggatgacatcacaaaaaaatccagtgatcagcattaatcctgacgcagaataccgctattccgttgcctggttacccgtcttcgccgcagctgtagcaagcggcaatacctcttttgaagccgtatttgaccgtaaaccgggtgccgtatttttcctgagacaggtcagggacttcgattcccgctggtttaaggccatcttccagtgcagcctgttgcgttattttgctcaaaaataa

SEQ ID NO: 29622 - DNA, 6321 bp, Klebsiella pneumoniae; identical to SEQ ID NO: 29614

SEQ ID NO: 29623 - DNA, 3288 bp, Klebsiella pneumoniae; identical to SEQ ID NO: 29615

SEQ ID NO: 29624 - DNA, 6321 bp, Klebsiella pneumoniae; identical to SEQ ID NO: 29614

SEQ ID NO: 29625 - DNA, 3288 bp, Klebsiella pneumoniae; identical to SEQ ID NO: 29615

SEQ ID NO: 29626 - DNA, 6327 bp, Klebsiella pneumoniae
atgaacgttcagcaactgcattatgcgccacttctaaatcagcttcatcagcgtgcggtgaggtcggtggtaagtcagctggcattgcggagcaagtcgttgagtcaatatctggaatctcaatatttccagcctccaggtctgggggggtcactgcttgcagatccggtattcgaaagtacgtttggctggatgcccgcggatgaaacaatggaggatttgcgtgacaaactgatctccagcccgctggttgatgctttgagcaatgcgccagtgccgtttcgccatcagctaactgcgtggcgaacgattcttgaagacaagcagtccctattagtgagcagtggtacagggtcaggaaaaacagaatgttttatggtgccggtgctggaagatcttattcgtcagcaaaatttgacccggcagtcactaacagggacgcaggctattttcttgtatccgttgaatgcgctaataaatagtcagcaagagcggcttcgcgagtggactcgcgggtttaaagggaagatacgctttgcgctatataatggcgaaacccggcataccaaatatgaagttcaggaagaccagctcaaagtacctgaacaggcattgagtcgggaagccatttatgaagccccaccgtccatcatggtgacgaataccacgatgctggaatatatgctgattcgtcgcaaagatgcccctgtcattgaaaagtcccagggaatgctgaagtatatcgtccttgatgaggctcacagttatattggctctcaggcagctgaattagcgctgcttttacgtcgcgtcatgcaggccttcaatgttggacctggtacagataaacctgtgcaaatcattgctacctcggccactattggtgaagattctcctgaaggtaataaagaacttgctaaatttgttgccgatctcgcgggggtcacagaacgtgatgtaaaagtagttcgcggctatcgacaaataccgccgatatcggagtctcttattcgtcatgaatatcccacatctttagcatctcttaactcactaagttctcaggaactttaccaacagctgtgccattaccgtgtggcccagcaattgcgtcaggcgttaactcgccccggacgcctggcggtacgtttgagtgaattgctcaatgttgccagaagaacctggccagacattaatcaccgtgagctgctgcagcttctcgatctgatggcgaaatcgcgagagggtgaatctaaattttcactagcttttacgccattacgtatgcatgggtttatccgaacactcgcgggcctatgggcatgttcaaataaacaatgcgcacataaagcgagtgaattaggtgagagtgactggccatttggtcaggtatggtttgaacaacgccaatattgtgactgtggtgcgcctgtatttgaaatcttacgttgctccgggtgtggttcagcttatttgtctgccaaggaggaagtgcgcggtgatggaacgagctggttggtggcgcaacctgctgctgccgaagaggatgagtttgctcttgatctcgatgtttattctgaagatgaagataacaacgaattagaaaataactcccaatttgatcgtcttatagcgagcgatggtgaaaaatatatcatttcactggaggaagcgacggcgggtaaaatcgaccgcgaggcgcaaaagcactatgagataaatctgctaagacctgaatctcgaggtgagggacgcaataattcctttgcttgtgtttgttgtggtgacacccaacggaaaaataatcctttgttccgtccgcttcgactcggtgcacccttttttttaaatgaaattattcctactctgcttgaattttcgcctttaccgcaaacaagagaagagcagttaggaccgtttaatggtcgacgtttgctcacctttacggattcacgtcagggaaccgcccgtatctctgcccgattacagcaggacgcagataaagctacgttacgaaccctttgttatcaggaactggcaaatattaatgagccatcagtaaagctcagtccggcacattgtgcattgttagagagttttattacccagttttctatccctccgttaaaaaattccatcgacgcactgagaaaagcgatggtttcgaatgagaagcttagcccagcagacgttcaggcgcttagaattatcgagccgatggttagttccttaagtcaggaacatgctgaagcaatgcaaatactcctcgtcaattcaggcaatcagcagaagaaaaccatgtcgtggcaaactctgtctgaacaacttgttggcagtgtggaccttgcggacagaatgagaggcagttttaaagacttgtctggacttgagcttactaaacaacagtttgctgatttttgtttatacagtgagtttggtcgccgccctaaaaatgcctggaccctcgaaagtttggggctggtggccattcactatccatttattgataaagtcacaacctgcccgcaggactggaagacattattacccgaccccgataagcaattaccggaatggcgtaatttattgaagattacccttgatttctttatacgtgaaaacagtgccgttttttacgaaaacgaggagtaccctcgctggatgggagcacgtttcccggtaaaaatgctgcaggggccagataaaaaatacaaagggcagaaacgtgatcaactttggccacaaatacgcgatcgtcattataaccgggtcattaagctattaattgctgtctttccggcaatacagcctgagcaggctcactggaaagcgctggttaattacttaatgaatgaggtctgggaagctattcgaccatgcctgcgtcagtttgaatcgggttatcaattggacattaaacaacaagctgaattttacagtccaaagcaagtctggcgttgcccctatactcgccgtgcgttagatgtcactttattgggttattctccgtatttaccaggtagcaaagagatagcacctgaaaaagctgtattgattgaaatgcctgagcttcctgcgcgtcactggcgtttatctggtggtggagaaatggcgcgagaagagcgcctgcactggctggaatgtaatgaacgcattcaacatgctcgggaggagggggtatggtctactcgcagtgatcgattggccctgaaagatagctggtatcgtctggaggaacactcagcgcagcgaacaccagagaagaaccagtttaatgaaaaacaatttaaagcagggaaagtcaatgtgttgaactgttccacgaccatggaaatgggcgtggatattggtggtatgagtttggtcgcgatgaataacgttcctccggctccggcgaattatttgcagcgtgctggccgtgctggccgtcgcggtgaaagcgcatctgccgccattacgttatgtaaaaacaccgcgcatggaatggaggtattcaaagaccctctctgggcgttcaacaccgttgcgagtgccccacgggttcgttttggtagcagtagtattgttcagcggcatgttaacgcattggttttaggtgcgtttttacgggctgaagttcctgatgcgacaaaactgagttgtaaatggttctttgaaggtgatgagagccagtgtcttcgttttctccattggttaaatcatcaggccgatcagctggcggataaacttaaacgccttacccagggaactgtactgatgtcattgacgccgccacagctcttgactcgtacgcaaacgatgatgcagctggttgatactcgttggagaagccaacttgccatactgttggaaaacatcgaagcgttgaaaacagataacagcgcgtgggaagaaacgccagcaggcaaagcaatcacttatcagcttcgtgattatcgcggtgcttatctgttttctaaactcatcagtgaagcgttcctgccgggtcatggtttcccggttggcgtggtcaatttcaattatctgaccgcggatgaactggaaagacgtcgcgcaataaaagccactcaggctgaccctaatgaagggggagaaaacttttctcgccgcattgaaaaactgcccagccgtgacctgcccacagcattacgtgaatatgctcctggtgctgatgtggtattgggcggaaaagtatatcgttcctcgggtattatgcttggtaaagtacttgccagcgggcaggagctgtctggcgatcatcatattccgtggttctggcattgccgtaaatgcggcgcgggagcgaccagcgccacccggcctgtcgaatgttgccactgcaaggcagatatacagcagcttgatgtgaagcggtatttacagcctgtcggtttcgcgacagacattcgttatcaggcacataatgatgtatccatgcctgcgcaacttccctggaaagatcctcgtgttcttgtaccttcttcggtatgggtctccttacccgatgctggactcggacgttaccgttttagtcatagcggggaattgttccactttagtgagggtgaatttggtcatggctacgcaatttgtctttcctgtggccgggcagaatctcaaacccagccccagcgtactccggagaatctaaagaacccggagaaggaaaatacacactacctgttgagaggcggtagtaatgatcggcaggggaacaataaattgtgccacggtcatgttcataaagatctgtggttgggatatagcagccgtacagatatggttgagctgcaactcagtgatgatagtggcttactgatcagggatgatgttgccgcgcgttcccttgcggttgctttgcgtgaaggattagcgcataaattgggtatcgaaaatactgagctgggcgtgacgacacagcaagcgcgcgatatcgatggcttcactggatattctatctttatttacgataataatgctggtggtgcgggttatgcagtgcaattgatcgataattggtcggatgtctttaattacgccagaaaattgctcgattgcagctgtgataaattctgccaccactgcttgctcagctacgacagtcagcattatgtcggcaaattagatcgtcaccaggcattaaccctgctcactaatcttcgtctacagcggcttaatctcgcgccagaatatcagtacttcggagaaagtagtcgggttgaaaccaacccactcagtttgcgtattgcgcaatgcctgaacagcgaggtttatgattcttgctcgttggttcttgctgggtcgcaggaacagtggagttttgcgcaatggccattatttaaagagttactccagtttgcttcctctgggggcaatgttgagttgctgattgccacgcagctggaaaacttagctgatagcaccagacatcagctttccgcgctagcggcgataccgggtgaatgcttgcaagtgaaatctatagacactgcgcaacttgtgcaagggaatgggcacttactggcacaggtcactcgtgaggggcaaacccaacagtgggccgctgccgacagtgccaccgtttcgcccggtgaattatggggacaaagctcggcatcgccggtagtgacgattaaaggggcgtccagaaaaacattctcgggtcagactttgagtgcagaagacttactgccagcattgcccgccggggcggtacgcatcaatctcagccaacaacttgacggtcaggtggaaggttttggttcgcgtttctgggcactgatagctcagcagcatgctggctggaagaaggtttttactaatggacgcgaaattactcacgtccattatagtgatcgttatctcaatagcccatttactgtacgtttgttaggtgaaattttgacggaattggttgaacaggggctggcagaacgtgccgaactcactgtttcagttaaaaagttagagtacagttctcgccaacacgattcactctataacgcatggcttgatgagcaggatcgccagcaagttatgaccacgttgctggaagagggctaccttgggccagcctggtcagggaaaatctcatggttagcaggagataatcagaacaccgatcacggacgtgaactgaccgtgaccttcagcgatggcagtgaacattatgtgttgctcgatatgggactgagttactggcgttgtacaggtgacacattcttcgatttttcaggacgaataccgaatcaggtcgagcgcctggcaacatgccgggcattggttatagccccggataatggattgaagagttatatcatcgcaggctaa

SEQ ID NO: 29627 - DNA, 3354 bp, Klebsiella pneumoniae
gtgaaaactccagttaacccacttttgcgatggctcaatgcgttttttagcagtcgttcattacccggagctgatgggagggcgctgtatgcttaccgttgtcatgatgcagagtatgaaagtttggctgctcttcttcgtgcccatgttccacgtaactaccccaaaaccatattcatttcttacagtgatgttttgttcagcatatacgccgctgagtttatccgccgtaaccatactgcaggacatccaagatgggacgttattttagaatcgattggctggaaggtaccttacgcacatcggcaaaagctggtaaatgatgggattcgttactggaaaagaaaggtgagaagtctgggtcaagcatcgggttatctgcatactctggcttgcgaaggcggtttgcccatccggatgattgaaaatgaaagtggctatttaataacctatttcaaacgagtttatcaggcactacgtgggcaatcgtcaaggcgtcctgcggaaataatcgcacaagaactgggcgatactattcctgcgacaatgcaaaatgaactcgtctatgaaatagctggtgaattttgcgagacacttcatacgttactcaatgagcatcccactcatggtcaggaccccgtttcctcactacgcaaacaatatcctgactggcatcttcaacttccgttggtactcccggaagagaatgcctcagagattgtaagacgattactttctcaatcttcagagccccgtatatcaagcaatgtgctggttgaaaggatatgggttgatgttgatgacagttggtattgcgatgcccggtttcgatttccggccacaatgcgtactgaacagttaatatacctgtttgaaagcaatattcagccggaacagacacgactcatcatttctgcaaaatggagaaatggtggggcccggttggcaatgctaagccgttatgaacagcaagattggcgagtagagttattacccttcgctatgcaaaaactctctggggcagatgcgatgaccgaaatatcgttgtcgctccatgaagggccgattctgctaggtcacgtaattcccaaagggggttatgagcttaccgaagatttaccatgggtttttgaagcgatgaatgagagcgagtcgcagttaaaacttgtcggcatgggctctgttagttccaggcaaaactctctttttatttcgctaccgacaaatagtcatttggatattagtggagaaggtgagtttgatatcccgaggttgctgaaaaatagtgaacgtagcttaactaaaataagcggagtattcagcgttgttttacatgatggcgcagtttgtacgattcgcacgcagcaactttatgattctgcgattgagtattatataaaaccgacagagatcgatctggtaaaatctgattatcctgtccatcgtgcttggccaaagatcggctggaaaaaggatatgcagcatggcattgtcccagagaacgaacttttttggcgatccattcgttcaggtaacaactcctggttttctgtcgcatcagtaatgccgaaagggcagatagaagtcaggcgaatagtcaatggtgaggttttatttagcggtaaagttgtgattttgccagcagatttcgatattcaaattattcccgagactgctcagcaaggagttattgtactctctggtataacggatgcaagggttgataaatattcaaacaatgaaaaagtaacacttaaatcagattatttgcaaaacgagtgtgttattgattgtaattcatcacagatgctagagagcaccatcaatttacgagtatcctggaaagatggttctaatcttaaattgttattacctaagcccgttagcggtggacggtttgtaagtaatgatggttctgttcattttgacggtgttgcatctatagcacatttgcatggcgtggacgctgagctgttaacaatatcttgtgccgggaaaggatatcttaatatcgagttgttggatgaaaacccgatgtctgaaaaatttcattatttacatgcggatattccattgttatctggccgtaatgaaaaattgcaacagatttcactttatgagaattataatctgctgaacgccatgcttgtatgtgcatggaaaaatgatagtacattacgtgttgatttttactctgacagatttggtaaggacaaaacaacactcaatattaaacgctacgatggccgttttattgagggtgatgaaagattgctggttgatataaaagattctattgtttttccttaccataaaatagacgacatggttgttgaagccatttctcttaatactcctgacttatgcacagtcctgctgaaaaaagatgagtctggttatgatttctcgacgttgaataatcaaggtggcccatggttaattgtgggtaaaattgatggtgcaattcgtattgcaccagtgattaaatggatgctacctacattacagacagatgatttatttctaaatgctatatgcaacgcatcgccagaacaacgcaaggaatattgtaatgcgctgtttttggaaatgaaaaataatcctttgcaaaactcttgttatttgttggttgagtacattaaaaaatataagttgaataatagcttgcctttgctggaactggatttatttagagaaatttcgagtaattattgcgtggttgttcagttgttaatatcatcatgtctttctggggatagtgatgctatttatgatatacaggaggaattacccttctcatggggatggattcctgtttcaatatggaaagatgtctttgaacagtgttggtattctctggaaaaacagattaatgataaggcatttgcattaaatatactacagccatttattgcatttataaatcatcaagcgcatatcgatcgtcgattagttcccatcgctaacatgttgcttacacatagtgagatattacctgcaggttgcactgtattgccatctgtaagccgcgagcagtttaatgatgccaaacagatgttattaagaaacccagatagttttggacgtgtcagcattttttctaaagagctttgggatagtgctattactccagaccttaaatctgtttttaataaattttggatcgaaaacacatatcacactcgttttgaaaaacgttttaatttgatgttagtcgcggcgctgctttcccaaagaaacaataaacttatgcatcagctaactgcactttttgaatttcactatcagcaagccccgcagcaattgggggttatctatcagtattattttgaacaagcaggagtatgtcattga

SEQ ID NO: 29628 - DNA, 6321 bp, Klebsiella pneumoniae; identical to SEQ ID NO: 29620

SEQ ID NO: 29629 - DNA, 3288 bp, Klebsiella pneumoniae; identical to SEQ ID NO: 29621

SEQ ID NO: 29630 - DNA, 6321 bp, Klebsiella pneumoniae; identical to SEQ ID NO: 29614

SEQ ID NO: 29631 - DNA, 3288 bp, Klebsiella pneumoniae; identical to SEQ ID NO: 29615

SEQ ID NO: 29632 - DNA, 6321 bp, Klebsiella pneumoniae; identical to SEQ ID NO: 29614

SEQ ID NO: 29633 - DNA, 3288 bp, Klebsiella pneumoniae; identical to SEQ ID NO: 29615

SEQ ID NO: 29634 - DNA, 6321 bp, Klebsiella pneumoniae; identical to SEQ ID NO: 29614

SEQ ID NO: 29635 - DNA, 3288 bp, Klebsiella pneumoniae; identical to SEQ ID NO: 29615

SEQ ID NO: 29636 - DNA, 6321 bp, Klebsiella pneumoniae; identical to SEQ ID NO: 29614

SEQ ID NO: 29637 - DNA, 3288 bp, Klebsiella pneumoniae; identical to SEQ ID NO: 29615

SEQ ID NO: 29638 - DNA, 6327 bp, Klebsiella pneumoniae
atgaacgttcagcaactgcattatgcgccacttctaaatcagcttcatcagcgtgcggtgaggtcggtggtaagtcagctggcattgcggagcaagtcgttgagtcaatatctggaatctcaatatttccagcctccaggtctgggggggtcactgcttgcagatccggtattcgaaagtacttttggctggatgcctgcggatgaaacaatggaggatttgcgtgacaaactgatctccagcccgctggttgatgctttgagcaatgcgccagtgccgtttcgtcatcagctaactgcgtggcgaacgattcttgaagacaagcagtccctattagtgagcagtggtacagggtcaggaaaaacagaatgttttatggtgccggtgctggaagatcttattcgtcagcaaaatttgacccggcagtcactaacagggacgcaggctattttcttgtatccgttgaatgcgctaataaatagtcagcaagagcggcttcgcgagtggactcgcgggtttaaagggaagatacgctttgcgctatataatggcgaaacccggcataccaaatatgaagttcaggaagaccagctcaaagtacctgaacaggcattgagtcgggaagccatttatgaagccccaccgtccatcatggtgacgaataccacgatgctggaatatatgctgattcgtcgcaaagatgcccctgtcattgaaaagtcccagggaatgctgaagtatatcgtccttgatgaggctcacagttatattggctctcaggcagctgaattagcgctgcttttacgtcgcgtcatgcaggccttcaatgttggacctggtacagataaacctgtgcaaatcattgctacctcggccactattggtgaagattctcctgaaggtaataaagaacttgctaaatttgttgccgatctcgcgggggtcacagaacgtgatgtaaaagtagttcgcggctatcgacaaataccgccgatatcggagtctcttattcgtcatgaatatcccacatctttagcatctcttaactcactaagttctcaggaactttaccaacagctgtgccattaccgtgtggcccagcaattgcgtcaggcgttaactcgccccggacgcctggcggtacgtttgagtgaattgctcaatgttgccagaagaacctggccagacattaatcaccgtgagctgctgcagcttctcgatctgatggcgaaatcgcgagagggtgaatctaaattttcactagcttttacgccattacgtatgcatgggtttatccgaacactcgcgggcctatgggcatgttcaaataaacaatgcgcacataaagcgagtgaattaggtgtgagtgactggccatttggtcaggtatggtttgaacaacgccaatattgtgactgtggtgcgcctgtatttgaaatcttacgttgctccgggtgtggttcagcttatttgtctgccaaggaggaagtgcgcggtgatggaacgagctggttggtggcgcaacctgctgctgccgaagaggatgagtttgctcttgatctcgatgtttattctgaagatgaagataacaacgaattagaaaataactcccaatttgatcgtcttatagcgagcgatggtgaaaaatatatcatttcactggaggaagcgacggcgggtaaaatcgaccgcgaggcgcaaaagcactatgagataaatctgctaagacctgaatctcgaggtgagggacgcaataattcctttgcttgtgtttgttgtggtgacacccaacggaaaaataatcctttgttccgtccgcttcgactcggtgcacccttttttttaaatgaaattattcctactctgcttgaattttcgcctttaccgcaaacaagagaagagcagttaggaccgtttaatggtcgacgtttgctcacctttacggattcacgtcagggaaccgcccgtatctctgcccgattacagcaggacgcagataaagctacgttacgaaccctttgttatcaggaactggcaaatattaatgagccatcagtaaagctcagtccggcacattgtgcattgttagagagttttattacccagttttctatccctccgttaaaaaattccatcgacgcactgagaaaagcgatggtttcgaatgagaagcttagcccagcagacgttcaggcgcttagaattatcgagccgatggttagttccttaagtcaggaacatgctgaagcaatgcaaatactcctcgtcaattcaggcaatcagcagaagaaaaccatgtcgtggcaaactctgtctgaacaacttgttggcagtgtggatcttgcggacagaatgagaggcagttttaaagacttgtctggacttgagcttactaaacaacagtttgctgatttttgtttatacagtgagtttggtcgccgccctaaaaatgcctggaccctcgaaagtctggggctggtggccattcactatccatttattgataaagtcacaacctgcccgcaggactggaagacattattacccgaccccgataagcaattaccggaatggcgtaatttattgaagattacccttgatttctttatacgtgaaaacagtgccgttttttacgaaaacgaggagtaccctcgctggatgggagcacgtttcccggtaaaaatgctgcaggggccagataaaaaatacaaagggcagaaacgtgatcaactttggccacaaatacgcgatcgtcattataaccgggtcattaagctattaattgctgtctttccggcaatacagcctgagcaggctcactggaaagcgctggttaattacttaatgaatgaggtctgggaagctattcgaccatgcctgcgtcagtttgaatcgggttatcaattggacattaaacaacaagctgaattttacagtccaaagcaagtctggcgttgcccctatactcgccgtgcgttagatgtcactttattgggttattctccgtatttaccaggtagcaaagagatagcacctgaaaaagctgtattgattgaaatgcctgagcttcctgcgcgtcactggcgtttatctggtggtggagaaatggcgcgagaagagcgcctgcactggctggaatgtaatgaacgcattcaacatgctcgggaggagggggtatggtctactcgcagtgatcgattggccctgaaagatagctggtatcgtctggaggaacactcagcgcagcgaacaccagagaagaaccagtttaatgaaaaacaatttaaagcagggaaagtcaatgtgttgaactgttccacgaccatggaaatgggcgtggatattggtggtatgagtttggtcgcgatgaataacgttcctccggctccggcgaattatttgcagcgtgctggccgtgctggccgtcgcggtgaaagcgcatctgccgccattacgttatgtaaaaacaccgcgcatggaatggaggtattcaaagaccctctctgggcgttcaacaccgttgcgagtgccccacgggttcgttttggtagcagtagtattgttcagcggcatgttaacgcattggttttaggtgcgtttttacgggctgaagttcctgatgcgacaaaactgagttgtaaatggttctttgaaggtgatgagagccagtgtcttcgttttctccattggttaaatcatcaggccgatcagctggcggataaacttaaacgccttacccagggaactgtactgatgtcattgacgccgccacagctcttgactcgtacgcaaacgatgatgcagctggttgatactcgttggagaagccaacttgccatactgttggaaaacatcgaagcgttgaaagcagataacagcgcgtgggaagaaacgccagcaggcaaagcaatcacttatcagcttcgtgattatcgcggtgcttatctgttttctaaactcatcagtgaagcgttcctgccgggtcatggtttcccggttggcgtggtcaatttcaattatctgactgcggatgaactggaaagacgtcgcgcaataaaagccactcaggctgaccctaatgaagggggagaaaacttttctcgccgcattgaaaaactgcccagccgtgacctgcccacagcattacgtgaatatgctcctggtgctgatgtggtattgggcggaaaagtatatcgttcctcgggtattatgcttggtaaagtacttgccagcgggcaggagctgtctggcgatcatcatattccgtggttctggcattgccgtaaatgcggcgcgggagcgaccagcgccacccggcctgtcgaatgttgccactgcaaggcagatatacagcagcttgatgtgaagcggtatttacagcctgtcggtttcgcgacagacattcgttatcaggcacataatgatgtatccatgcctgcgcaacttccctggaaagatcctcgtgttcttgtaccttcttcggtatgggtctccttacccgatgctggactcggacgttaccgttttagtcatagcggggaattgttccactttagtgagggtgaatttggtcatggctacgcaatttgtctttcctgtggccgggcagaatctcaaacccagccccagcgtactccggagaatctaaagaacccggagaaggaaaatacacactacctgttgagaggcggtagtaatgatcggcaggggaacaataaattgtgccacggtcatgttcataaagatctgtggttgggatatagcagccgtacagatatggttgagctgcaactcagtgatgatagtggcttactgatcagggatgatgttgccgcgcgttcccttgcggttgctttgcgtgaaggattagcgcataaattgggtatcgaaaatactgagctgggcgtgacgacacagcaagcgcgcgatatcgatggcttcactggatattctatctttatttacgataataatgctggtggtgcgggttatgcagtgcaattgatcgataattggtcggatgtctttaattacgccagaaaattgctcgattgcagctgtgataaattctgccaccactgcttgctcagctacgacagtcagcattatgtcggcaaattagatcgtcaccaggcattaaccctgctcactaatcttcgtctacagcggcttaatctcgcgccagaatatcagtacttcggagaaagtagtcgggttgaaaccaacccactcagtttgcgtattgcgcaatgcctgaacagcgaggtttatgattcttgctcgttggttcttgctgggtcgcaggaacagtggagttttgcgcaatggccattatttaaagagttactccagtttgcttcctctgggggcaatgttgagttgctgattgccacgcagctggaaaacttagctgatagcaccagacatcagctttccgcgctagcggcgataccgggtgaatgcttgcaagtgaaatctatagacactgcgcaacttgtgcaagggaatgggcacttactggcacaggtcactcgtgaggggcaaacccaacagtgggccgctgccgacagtgccaccgtttcgcccggtgaattatggggacaaagctcggcatcgccggtagtgacgattaaaggggcgtccagaaaaacattctcgggtcagactttgagtgcagaagacttactgccagcattgcccgccggggcggtacgcatcaatctcagccaacaacttgacggtcaggtggaaggttttggttcgcgtttctgggcactgatagctcagcagcatgctggctggaagaaggtttttactaatggacgcgaaattactcacgtccattatagtgatcgttatctcaatagcccatttactgtacgtttgttaggtgaaattttgacggaattggttgaacaggggctggcagaacgtgccgaactcactgtttcagttaaaaagttagagtacagttctcgccaacacgattcactctataacgcatggcttgatgagcaggatcgccagcaagttatgaccacgttgctggaagagggctaccttgggccagcctggtcagggaaaatctcatggttagcaggagataatcagaacaccgatcacggacgtgaactgaccgtgaccttcagcgatggcagtgaacattatgtgttgctcgatatgggactgagttactggcgttgtacaggtgacacattcttcgatttttcaggacgaataccgaatcaggtcgagcgcctggcaacatgccgggcattggttatagccccggataatggattgaagagttatatcatcgcaggctaa

SEQ ID NO: 29639 - DNA, 2937 bp, Klebsiella pneumoniae
atgattgaaaatgaaagtggctatttaataacctatttcaaacgagtttatcaggcactacgtgggcaatcgtcaaggcgtcctgcggaaataatcgcacaagaactgggcgacactattcctgcgacaatgcaaaatgaactcgtctatgaaatagctggtgaattttgcgagacacttcatacgttactcaatgagcatcccactcatggtcaggaccccgtttcctcactacgcaaacaatatcctgactggcatcttcaacttccgttggtactcccggaagagaatgcctcagagattgtaagacgattactttctcaatcttcagagccccgtatatcaagcaatgtgctggttgaaaggatatgggttgatgttgatgacagttggtattgcgatgcccggtttcgatttccggccacaatgcgtactgaacagttaatatccctgtttgaaagcaatattcagccggaacagacacgactcatcatttctgcaaaatggagaaatggtggggcccggttggcaatgctaagccgttatgaacagcaagattggcgagtagagttattacccttcgctatgcaaaaactctctggggcagatgcgatgaccgaaatatcgttgtcgctccatgaagggccgattctgctaggtcacgtaattcccaaagggggttatgagcttaccgaagatttaccatgggtttttgaagcgatgaatgagagcgagtcgcagttaaaacttgtcggcatgggctctgttagttccaggcaaaactctctttttatttcgctaccgacaaatagtcatttggatattagtggagaaggtgagtttgatatcccgaggttgctgaaaaatagtgaacgtagcttaactaaaataagcggagtattcagcgttgttttacatgatggcgcagtttgtacgattcgcacgcagcaactttatgattctgcgattgagtattatataaaaccgacagagatcgatctggtaaaatctgattatcctgtccatcgtgcttggccaaagatcggctggaaaaaggatatgcagcatggcattgtcccagagaacgaacttttttggcgatccattcgttcaggtaacaactcctggttttctgtcgcatcagtaatgccgaaagggcagatagaagtcaggcgaatagtcaatggtgaggttttatttagcggtaaagttgtgattctgccagcagatttcgatattcaaattattcccgagactgctcagcaaggagttattgtactctctggtataacggatgcaagggttgataaatattcaaacaatgaaaaagtaacacttaaatcagattatttgcaaaacgagtgtgttattgattgtaattcatcacagatgctagagagcaccatcaatttacgagtatcctggaaagatggttctaatcttaaattgttattacctaagcccgttagcggtggacggtttgtaagtaatgatggttctgttcattttgacggtgttgcatctatagcacatttgcatggcgtagacgctgagctgttaacaatatcttgtgccgggaaaggatatcttaatatcgagttgttggatgaaaacccgatgtctgaaaaatttcattatttacatgcggatattccattgttatctggccgtaatgaaaaattgcaacagatttcactttatgagaattataatctgctgaacgccatgcttgtatgtgcatggaaaaatgatagtacattacgtgttgatttttactctgacagatttggtaaggacaaaacaacactcaatattaaacgctacgatggccgttttattgagggtgatgaaagattgctggttgatataaaagattctattgtttttccttatcataaaatagacgacatggttgttgaagccatttctcttaatactcctgacttatgcacagtcctgctgaaaaaagatgagtctggttatgatttctcgacgttgaataatcaaggtggcccatggttaattgtgggtaaaattgatggtgcaattcgtattgcaccagtgattaaatggatgctacctacattacagacagatgatttatttctaaatgctatatgcaacgcatcgccagaacaacgcaaggaatattgtaatgcgctgtttttggaaatgaaaaataatcctttgcaaaacacttgttatttgttggttgagtacattaaaaaatataagttgaataatagcttgcctttgctggaactggatttatttagagaaatttcgagtaattattacgtggttgttcagttgttaatatcatcatgtctttctggggatagtgatgctatttatgatatacaggaggaattacccttctcatggggatggattcctgtttcaatatggaaagatgtctttgaacagtgttggtattctctggaaaaacagattaatgataaggcatttgcattaaatatactacagccatttattgcatttataaatcatcaagcgcatatcgatcgtcgattagttcccatcgctaatatgttgcttacacatagtgagatattacctgcaggttgcactgtattgccatctgtaagccgcgagcagtttaatgatgccaaacagatgttattaagaaacccagatagttttggacgtgtcagcattttttctaaagagctttgggatagtgctattactccagaccttaaatctgtttttaataaattttggatcgaaaacacatatcacactcgttttgaaaaacgttttaatttgatgttagtcgcggcgctgctttcccaaagaaacaataaacttatgcatcagctaactgcactttttgaatttcactatcagcaagccccgcagcaattgggagttatctatcagtattattttgaacaagcaggagtatgtcattga

SEQ ID NO: 29640 - DNA, 6321 bp, Klebsiella pneumoniae
atgactacacgctatttttcgtcacttattgaacaatcgttgtctcgttcaactgaagcaacactgagtatcatgggggtcacaaacccgcagttgcgtgagcacctcgcgcaacaaatgggcgccgattgtgggaaatcaggctcattccttgcttctcccgttttccaacaaatgtttggctggaaagcgtcaaacaaaacgatgcgtagcctgacggaaggcaaggcattgctcagtaaagctgtggttgattcgctggatgatcagaacaatggacgctatcgttttggtgctgactggaaaccctttactcaccagctagccagttggaaggctctgctggaaaaaaaacattctgtggtagtgaccagcggtacgggttcaggcaaaaccgaatgttttatggtgccggtgctggaagacctctaccgggaattacatgaaaatggcaacaacccacttatcggcgtcagggcccttttcctctatccacttaacgccttaattaattcgcaacgtgagcgcctggacgcctggacacgtggttttggttccggaatccgatactgcctctacaacggaaataccgaaaatctacacgccgcagtgaaaagcgaacaggtaaaaagaccgaatgaagtactctcgcgcgaaaaaatgcgtgaagaacccgctccaattctggtgaccaacggcacaatgctggaatatatgatggtccgccagatcgacgctccaattatccagcaatctaaatcacaaaaatcattacgctggatcgtattggatgaagcgcatacctatgtcggctcgcaggccgctgaactggcgctgcagttacgccgcgtgatgacggcctttggtgtgactccagatgatgttcgctttgtagcaacctctgcaaccattgccggaagcgatgccgaaaagcaattaaaaaaattcctctctgaattatccggtataccgcaagagcgcattgacgtactggacggaagccgggttattccggaactggaaccatgcaaacacgtttttattccgttagaagaaattgagcaaatccctgatacagacatgaagggcgtaagcccagagcgctttgatgcacttacgcattcacctgaagcgtattacttgcgcgacatgctagttactcaaccgaatccaatgaagttggatgatatgacgcagcggttgaactcgctaacaaaacagcattatagccagcaggatgtgttgcgctggattgacgtctgctctggcacacaacccaatactaaggatcccgcatttcttaaggtcagggcgcacatattccaacgcaatacccagggggtgtgggcctgtgttgataaagaatgcagattaaagcacggtaccccgctggaaaagggttggccttttggctatgtgtatgtgaacaaacgccaaaattgcgattgtggaagcccggtttacgagctggcattctgtaatgaatgtaatgagccacatcttctggcgcgggacaaaaagggaaaacttgtccaatgggaaaataaaggcggtgatgagttctctttgcaagatgatgtgcatattgaacatgatgccgcagaagaaaaagttgataaagagagtcgttttcagcccgcactcattatcgccgcagagaagaccagcgcggcgggttatacccaacagcgtctggaccgtcagacgcgtcgtattggtgttattaacaatgacagcatcccgctagttattaacgacattgaacaagtatgtagtgccagtagctgtggctacagaggcacgagcggaaaacaaccgttccgccgtgccttattaggtgggccattttacgtcaccaatattgtgccaaccgttctggaatattgtcaggattttattagtgaagaaggaaaagagggcgtcggacctgattcgttaccaggtcgaggccgtcgacttattacctttaccgacagccggcaaggaacggcccgcatggcagtgcgcatgcagcaagaagctgagcgcagccgcttacgcggcagtgtggtggaaatcctgagctggcatcaacgaacacagacttctgcaacaccgaatgccaatgccgatctggaaaagttagcgacgagggcaaaacaggcccacaatgaggcgaaagagtatagaagctggggaatgccggaacaagcaaaactggctgaagcgcaagccgaacagcttgaacaggctattcaggccgcgaccggtggcaaagctgcgaccattctgttttcgcggacctggattgaaatggttaatgaacttaaagagaaagccgatattcgcggccctattctgcaatataaccactatctgaagcctgaaattttcaatgagaatggcgggccgctaaagctttctgagatgttgttattccgggagtttatgcgccggcccaaacgaactaacagcctggaaacgcagggattagttcaggttggttatcaggggctggagaagatccataagatgccggtgcattggcaagagaaagggctgacgctggatgactggaaggattttcttaaggttacgctggatctgtacgtacgtgaaagcaacttcacacaactggacgatgagttgaaaaactggattggtagccgtttttcatcgaaattcgtccgtaacccggacacaaaagatcccgaagataatcagaacagacgctggccacaaattcgtaatggcaatatatcccatcgtttagtgaagttattaatgcttggcgcaggattcaaaaccgtaaatacggcgactatggatattatcaatacgtggctgaaagaagcgtggacccaacttaccggcccacttgcagtgctgaaacctgatggtaaccgtttctatctgccaaaagagcacatgactttttctttaatcacagatgcctggatttgtccggtaaccaataagattctggatacggcctttaaaggcttaaccccttatctgcccacccacatttcgtttgaacaccttaccaagacacaatatgacgcttttgtcgcgcaaaaggtcaccatgccggaaatctggaagctggatcgttcgcaagaagactacgctccgggtctggcgaaggtacgtgactgggttagtaaagagccactaatcgcacaattacgttcggaaaacgtctggacggatattaacgatcgtgtcgtggaaggcggattttactaccgcacagccgagcactctgctcagcaatcgtcagaacgtttgcaaagctacgaaaagatgttcaaaaacgggcagcttaatgttcttaactgttctaccaccatggaaatgggggttgatatcggtggcattaccgccgtagtgatgaacaacgtaccgccccatccggctaactatttacagcgtgccgggcgagccgggcgtagtcaggaatcgcgtgcgatctcttacacactatgtaaagggaacccgcacgatcaacaggtttttgccaacccactctggccatttgagaccatgatccccgcgccaatggtggcaatgaattccgcccggctggtgcaacgccacgtcaatgcgttattactgtccgactttttatgtcacgtcattggcgaaacagataaagaaaaaaccagtcttgatagcctctggtttttcggtgaagacgacgggcaatcaaaatgtgaacactttaaagtctggctcgagcgtccggttcttgatatcgacgcggcgctggaacggctggtgaaaggtacagcattacatggcgccagacccgacctgttgcgggataaaacaatccatgcgattacgttcctgcaacagcgatggctttccgtctaccgcgatcttgtagcccaggaacgagaatcgcagccgcaaacgccttatcgcaagcgcatagaactggagaaaaaacgacactgtggcgagtatttgctgcgtgacctggcggccaggactttcctgccgggatacggcttcccgacagatgtggtgacgtttgataacttcactatggaagactatatccgtgaaaaatcacagaaaagccgggataaaaaagatcgcgaagataatgtgtcacgttataagggacttccctcacgtaacttgggggttgccatccgtgaatatgcaccaggtgcagagatcatactggatggccgggtcttccgctctgctggcgtctcactgcactggcacaatattaatgccgataccaatgaagcccagcgtctggattgcgcctggcgctgtcacaaatgcgggaccataggctatgaagaggggttgagcagttccgggacgctattttgcaccaacagcgcctgtggtgaaaaaatcatcatggataatcgtcgccaggtgctgcagccagccgggtttgtaactgatgcacacgcgccggtgacgaacaatattgaaaccatgaaatttatcccggttgtccctgcctgggtatttgttaaagaagaacccgtatcgctacctaacccgataatggggtatatggcatctggcgctgatgggcatgttttccagcaaagccttggagaaggtgggcatggttacgcactttgtctgagctgcggtcgcgcagagtcgatgttgaacgcaaacgatgcgccgaaaagtatggaagcccactacccgccgcgtccgggaaaagcagatcgcgacagccagaatcaacgtctaatttgccccggctcgacggcgctcatgaagaacgtcacgctgggggcattggcacgaacggatgtctttgaaatggttctacgcaagccgcaaaacggtgaatatctcccggatagcacggaagaagggcggattgttgccatgactctggcggtagcactacgtcaggcgctggccggggttttgggtatctccgcggcagaactgggctacgccgtgcgtccggtcagactggaagatggacaatcagtattagccgttcaactctacgatgtgattagcggtggtgcaggttttgcatccagtgcgccaatgcacattgaggccattctgttgggaatggtgaagcagttgggttgccaccactgcgatacggcatgcagtgaatgcctcctcgactcccagactcgccacgatcacgatttgctggatcgtaaagcagcacaggcatggcttggtgatgacttctcgtactacatcggtttgccggatgatgaaacattctcgctaccggatgcccgatattgcccgggagccattggcgatacccttcgtcgggcgattaacgagggtgctgaaaaactcacactgtggatgaatgggccactcaatgagtgggatctttatgcccgtcaattccgggcggctattcagaactaccggattaaggacaatgttgcggtcgaccttgtcattcctgctggcgtcgatgatccggagctgttgcatgagctttcgcagtttactgctttgggcgtgcgtttgtgtcatagcgaacaggctctggaattgccgattgttgcgcaagtcgcctttgccgatcgcgtaatgacgctggcttcacgcagccagcaggcaactatcccagggccaggctggcacctgaatgacgaactggtcgttcgcagcctcggctataacacggtaaaactgaacgagtttgttttgccggggaaagcagcgaactctgttgagcgtgtcaaagacatagagattcataaacagttaaatggtgcactttcgcagttcggacaacgcttctgggacacgctgtttaacagccatgaagaagcacaatcgctgatgaaaaaccagcgaatcaccagcgttcactataccgatcgctatctgcaaaacccggttgcgctggcactgctgggggcgatactgaaaccgctaaaaacaaagctgaccgatgacgcggagcttgagcttgatactctgtttaagcccaaggatcgtcccggcaaccggccgttccatgactggatgagcgatgcggattttcaggatttcgccgaccagtggtttactgcggcaatgggcagagcggtagaactgacggtgttcgattcgccacgtgatattccacatcatcgtaagctgacggtgacctttgaagatggtcagacgttgaagattcgattcgaccagggaatgggatactggcgtatcgacttcccaaatgcatggcgtaactttgactttactgacgatgtgacttatcagctagtaaaaatggcgcaagcctgccaggagggcaaagtccttaatagcgaggacagctgggcaacggatgtgctggtagaggtgatgtcgtcttaa

SEQ ID NO: 29641 - DNA, 3288 bp, Klebsiella pneumoniae; identical to SEQ ID NO: 29621

SEQ ID NO: 29642 - DNA, 6321 bp, Klebsiella pneumoniae; identical to SEQ ID NO: 29640

SEQ ID NO: 29643 - DNA, 3288 bp, Klebsiella pneumoniae; identical to SEQ ID NO: 29621

SEQ ID NO: 29644 - DNA, 6321 bp, Klebsiella pneumoniae
atgactacacgctatttttcgtcacttattgaacaatcgttgtctcgttcaactgaagcaacactgagtatcatgggggtcacaaacccgcagttgcgtgagcacctcgcgcaacaaatgggcgccgattgtgggaaatcaggctcattccttgcttctcccgttttccaacaaatgtttggctggaaagcgtcaaacaaaacgatgcgtagcctgacggaaggcaaggcattgctcagtaaagctgtggttgattcgctggatgatcagaacaatggacgctatcgttttggtgctgactggaaaccctttactcaccagctagccagttggaaggctctgctggaaaaaaaacattctgtggtagtgaccagcggtacgggttcaggcaaaaccgaatgttttatggtgccggtgctggaagacctctaccgggaattacatgaaaatggcaacaacccacttatcggcgtcagggcccttttcctctatccacttaacgccttaattaattcgcaacgtgagcgcctggacgcctggacacgtggttttggttccggaatccgatactgcctctacaacggaaataccgaaaatctacacgccgcagtgaaaagcgaacaggtaaaaagaccgaatgaagtactctcgcgcgaaaaaatgcgtgaagaacccgctccaattctggtgaccaacggcacaatgctggaatatatgatggtccgccagatcgacgctccaattatccagcaatctaaatcacaaaaatcattacgctggatcgtattggatgaagcgcatacctatgtcggctcgcaggccgctgaactggcgctgcagttacgccgcgtgatgacggcctttggtgtgactccagatgatgttcgctttgtagcaacctctgcaaccattgccggaagcgatgccgaaaagcaattaaaaaaattcctctctgaattatccggtataccgcaagagcgcattgacgtactggacggaagccgggttattccggaactggaaccatgcaaacacgtttttattccgttagaagaaattgagcaaatccctgatacagacatgaagggcgtaagcccagagcgctttgatgcacttacgcattcacctgaagcgtattacttgcgcgacatgctagttactcaaccgaatccaatgaagttggatgatatgacgcagcggttgaactcgctaacaaaacagcattatagccagcaggatgtgttgcgctggattgacgtctgctctggcacacaacccaatactaaggatcccgcatttcttaaggtcagggcgcacatattccaacgcaatacccagggggtgtgggcctgcgttgataaagaatgcagattaaagcacggtaccccgctggaaaagggttggccttttggctatgtgtatgtgaacaaacgccaaaattgcgattgtggaagcccggtttacgagctggcattctgtaatgaatgtaatgagccacatcttctggcgcgggacaaaaagggaaaacttgtccaatgggaaaataaaggcggtgatgagttctctttgcaagatgatgtgcatattgaacatgatgccgcagaagaaaaagttgataaagagagtcgttttcagcccgcactcattatcgccgcagagaagaccagcgcggcgggttatacccaacagcgtctggaccgtcagacgcgtcgtattggtgttattaacaatgacagcatcccgctagttattaacgacattgaacaagtatgtagtgccagtagctgtggctacagaggcacgagcggaaaacaaccgttccgccgtgccttattaggtgggccattttacgtcaccaatattgtgccaaccgttctggaatattgtcaggattttattagtgaagaaggaaaagagggcgtcggacctgattcgttaccaggtcgaggccgtcgacttattacctttaccgacagccggcaaggaacggcccgcatggcagtgcgcatgcagcaagaagctgagcgcagccgcttacgcggcagtgtggtggaaatcctgagctggcatcaacgaacacagacttctgcaacaccgaatgccaatgccgatctggaaaagttagcgacgagggcaaaacaggcccacaatgaggcgaaagagtatagaagctggggaatgccggaacaagcaaaactggctgaagcgcaagccgaacagcttgaacaggctattcaggccgcgaccggtggcaaagctgcgaccattctgttttcgcggacctggattgaaatggttaatgaacttaaagagaaagccgatattcgcggccctattctgcaatataaccactatctgaagcctgaaattttcaatgagaatggcgggccgctaaagctttctgagatgttgttattccgggagtttatgcgccggcccaaacgaactaacagcctggaaacgcagggattagttcaggttggttatcaggggctggagaagatccataagatgccggtgcattggcaagagaaagggctgacgctggatgactggaaggattttcttaaggttacgctggatctgtacgtacgtgaaagcaacttcacacaactggacgatgagttgaaaaactggattggtagccgtttttcatcgaaattcgtccgtaacccggacacaaaagatcccgaagataatcagaacagacgctggccacaaattcgtaatggcaatatatcccatcgtttagtgaagttattaatgcttggcgtaggattcaaaaccgtaaatacggcgacgatggatattatcaatacgtggctgaaagaagcgtggacccaacttaccggcccacttgcagtgctgaaacctgatggtaaccgtttctatctgccaaaagagcacatgactttttctttaatcacagatgcctggatttgtccggtaaccaataagattctggatacggcctttaaaggcttaaccccttatctgcccacccacatttcgtttgaacaccttaccaagacacaatatgacgcttttgtcgcgcaaaaggtcaccatgccggaaatctggaagctggatcgttcgcaagaagactacgctccgggtctggcgaaggtacgtgactgggttagtaaagagccactaatcgcacaattacgttcggaaaacgtctggacggatattaacgatcgtgtcgtggaaggcggattttactaccgcacagccgagcactctgctcagcaatcgtcagaacgtttgcaaagctacgaaaagatgttcaaaaacgggcagcttaatgttcttaactgttctaccaccatggaaatgggggttgatatcggtggcattaccgccgtagtgatgaacaacgtaccgccccatccggctaactatttacagcgtgccgggcgagccgggcgtagtcaggaatcgcgtgcgatctcttacacactatgtaaagggaacccgcacgatcaacaggtttttgccaacccactctggccatttgagaccatgatccccgcgccaatggtggcaatgaattccgcccggctggtgcaacgccacgtcaatgcgttattactgtccgactttttatgtcacgtcattggcgaaacagataaagaaaaaaccagtcttgatagcctctggtttttcggtgaagacgacgggcaatcaaaatgtgaacactttaaagtctggctcgagcgtccggttcttgatatcgacgcggcgctggaacggctggtgaaaggtacagcattacatggcgccagacccgacctgttgcgggataaaacaatccatgcgattacgttcctgcaacagcgatggctttccgtctaccgcgatcttgtagcccaggaacgagaatcgcagccgcaaacgccttatcgcaagcgcatagaactggagaaaaaacgacactgtggcgagtatttgctgcgtgacctggcggccaggactttcctgccgggatacggcttcccgacagatgtggtgacgtttgataacttcactatggaagactatatccgtgaaaaatcacagaaaagccgggataaaaaagatcgcgaagataatgtgtcacgttataagggacttccctcacgtaacttgggggttgccatccgtgaatatgcaccaggtgcagagatcatactggatggccgggtcttccgctctgctggcgtctcactgcactggcacaatattaatgccgataccaatgaagcccagcgtctggattgcgcctggcgctgtcacaaatgcgggaccataggctatgaagaggggttgagcagttccgggacgctattttgcaccaacagcgcctgtggtgaaaaaatcatcatggataatcgtcgccaggtgctgcagccagccgggtttgtaactgatgcacacgcgccggtgacgaacaatattgaaaccatgaaatttatcccggttgtccctgcctgggtatttgttaaagcagaacccgtatcgctacctaacccgataatggggtatatggcatctggcgctgatgggcatgttttccagcaaagccttggagaaggtgggcatggttacgcactttgtctgagctgcggtcgcgcagagtcgatgttgaacgcaaacgatgcgccgaaaagtatggaagcccactacccgccgcgtccgggaaaagcagatcgcgacagccagaatcaacgtctaatttgccccggctcgacggcgctcatgaagaacgtcacgctgggggcattggcacgaacggatgtctttgaaatggttctacgcaagccgcaaaacggtgaatatctcccggatagcacggaagaagggcggattgttgccatgactctggcggtagcactacgtcaggcgctggccggggttttgggtatctccgcggcagaactgggctacgccgtgcgtccggtcagactggaagatggacaatcagtattagccgttcaactctacgatgtgattagcggtggtgcaggttttgcatccagtgcgccaatgcacattgaggccattctgttgggaatggtgaagcagttgggttgccaccactgcgatacggcatgcagtgaatgcctcctcgactcccagactcgccacgatcacgatttgctggatcgtaaagcagcacaggcatggcttggtgatgacttctcgtactacatcggtttgccggatgatgaaacattctcgctaccggatgcccgatattgcccgggagccattggcgatacccttcgtcgggcgattaacgagggtgctgaaaaactcacactgtggatgaatgggccactcaatgagtgggatctttatgcccgtcaattccgggcggctattcagaactaccggattaaggacaatgttgcggtcgaccttgtcattcctgctggcgtcgatgatccggagctgttgcatgagctttcgcagtttactgctttgggcgtgcgtttgtgtcatagcgaacaggctctggaattgccgattgttgcgcaagtcgcctttgccgatcgcgtaatgacgctggcttcacgcagccagcaggcaactatcccagggccaggctggcacctgaatgacgaactggtcgttcgcagcctcggctataacacggtaaaactgaacgagtttgttttgccggggaaagcagcgaactctgttgagcgtgtcaaagacatagagattcataaacagttaaatggtgcactttcgcagttcggacaacgcttctgggacacgctgtttaacagccatgaagaagcacaatcgctgatgaaaaaccagcgaatcaccagcgttcactataccgatcgctatctgcaaaacccggttgcgctggcactgctgggggcgatactgaaaccgctaaaaacaaagctgaccgatgacgcggagcttgagcttgatactctgtttaagcccaaggatcgtcccggcaaccggccgttccatgactggatgagcgatgcggattttcaggatttcgccgaccagtggtttactgcggcaatgggcagagcggtagaactgacggtgttcgattcgccacgtgatattccacatcatcgtaagctgacggtgacctttgaagatggtcagacgttgaagattcgattcgaccagggaatgggatactggcgtatcgacttcccaaatgcatggcgtaactttgactttactgacgatgtgacttatcagctagtaaaaatggcgcaagcctgccaggagggcaaagtccttaatagcgaggacagctgggcaacggatgtgctggtagaggtgatgtcgtcttaa

SEQ ID NO: 29645 - DNA, 3288 bp, Klebsiella pneumoniae; identical to SEQ ID NO: 29621

SEQ ID NO: 29646 - DNA, 6321 bp, Klebsiella pneumoniae; identical to SEQ ID NO: 29644

SEQ ID NO: 29647 - DNA, 3288 bp, Klebsiella pneumoniae; identical to SEQ ID NO: 29621

SEQ ID NO: 29648 - DNA, 6321 bp, Klebsiella pneumoniae; identical to SEQ ID NO: 29620

SEQ ID NO: 29649 - DNA, 3288 bp, Klebsiella pneumoniae; identical to SEQ ID NO: 29621

SEQ ID NO: 29650 - DNA, 6321 bp, Klebsiella pneumoniae; identical to SEQ ID NO: 29614

SEQ ID NO: 29651 - DNA, 3288 bp, Klebsiella pneumoniae; identical to SEQ ID NO: 29615

SEQ ID NO: 29652 - DNA, 6321 bp, Klebsiella pneumoniae; identical to SEQ ID NO: 29614

SEQ ID NO: 29653 - DNA, 3288 bp, Klebsiella pneumoniae; identical to SEQ ID NO: 29615

SEQ ID NO: 29654 - DNA, 6321 bp, Klebsiella pneumoniae; identical to SEQ ID NO: 29614

SEQ ID NO: 29655 - DNA, 3027 bp, Klebsiella pneumoniae
atgtgggaccctatatatagagcattgggagtatcattaacgtcgactgaattaaggattattatccctaaagggatggaaggttactggaaccgcccaatccgattttacgaatcggaacgacgtaattttctcggaacattgttcagtgaggggggattaccattccgcttactgaaagaatcggatagccattttcagaatgtattctcccggattctcaatcaatatgggcaggcacaactggcaggattttccatactttctctagtaagaactgtcatagaaaaatcagccctgccaactgtttttagcgaagacacttctgtagaactcatcagccatatagcggaaaaactcagctcgctggttctaatgtacaacctgagcaatcataccgaacccgtgaagcagcttgataaagtgcatccaaaatggcgtgatgagttccctatgcctttggatgatgaaacaggtactcgctttcttaatgggttgctatgtactgcctccgtagaggctaaatcccacttacaaaaaaataagggttccggttgtcaattctattggtcggaaaaccatcccaatcaaatccaggcgataatttcgctgcctgatgaactcaccttcccaatcatcagcactccctcaacgacgcgatttgaacttgccatttatgaagatggtgaagaagtcacctgtctcggccccgcctatgcatccctggagaacgcccatgccaaagttcgcctgcgtaaaagtgagtcgagatttgtcagacgccagccagctgcgagcttaacgattgttgcacgaactggaggaatgattgttggcaccataaaacttgaagatagtgaaatcgccgttggcgaggtaccacttacttttgttgatgatgaggaacgctggttattgcaagggcaagcttcttgtactgtacgtaatagcaatgttcttattgccttacctcaagaaaaaaccactatttcagggtgtgaaggctctccaggtacagcgtcgttattaggactcagaacactgtccgtaaaaggacgccaagatataaccatttccggagatgaaacatacaggatccgcaccgggagggaacaatctaatcagagcggatttgattttgatggaaaacatgttacctggaattgccatcctgatgaaacattccttggtgtacctaaagttacggcgaaaaacctgaatgctgaagatatacaattcaaacgttacctgagtggcatatcgttagatgaatgtcaggtacaagagatgatgggtacgcaatatgtttctgtcagaaatactcacaatgaaactctactgcgtcgaaaaattgggatcttgccggcagattttaacattgaaataaagggtggtgagctagccaatgaaggttccattgttatctcaacgcaacatccctgcatgtctgtcttaaaagataaaacattagaggttgctcgcaaacgctcagcaggacaaacagaaatattacttaaagcagaaggaatacctcctgcgtttgtctctttgcagatttacccaaatttgggtgcagccccagtagagatgactctacctttccctgcaaaaggttgcctggcccttgatgcaaatggatgcactctggataaaaatattactctgcatgatttgctgggttcgagagcctttttatttggtaaaaatggcgatccgacacgtttttcactggaattacatttacgttccaaaagtgggttacaggcatggcatgaatggtgttataccgcgggggaacaccccgtcgaactcaatttatacagcctgagagagcatattgaaaacttactgtctcttgagacaggaattgaccaggttgttgagatgcaaatcaaaggcgcaggtgctgtaatgagctggcagattcgccgctataaatacagtttacgctatgattatgaaagagaacttctcgtcagccagtcaacccattatcgtaccgagcaaatgtcttcacctgtcatcatgttattgagtgagccggagagaaaaatcaccccattatcatcaagaatgagcgaaggtgtaccgacaggtgaatatgaactgagttcggttattaacaaaaatgggccgtggttagtcgtccccaaacagggtgaggaaatggcgtttcgcccctgcttcattcgtggggaaccgtcgttacctgtggatgaaagtagtattcgttcattgcagaaagcgacccagctttttaatccccagtctgaagttaataccattacactggtacttgaacagatggctaacgatcccgctcattccggctggcaatttatgcgttgcctgtacgaccaatttggttatctgccgctggcaacctttgaagtttggcgtgcgctagtacagcatccacgagcactggcgatgtcgctatttaaatttgagatgtcagctgagtatctgagccgcattgaaaatgagttccctattttatgggagttcttccccatcttcgaaatcaaaactgcagccgatcgatttaaattgttcctgagccaaaagggtgcaccggaagaaacccagaatttactggtgaagagcttgtatcagcgattggggctcgtttttccgacatatgccgacgaaattgagaaatggttaagttatggacaattccctccgcccattccagagttcttcattcgcgagtggtatcaggagcttttacgtgagcatagtgaagctcgctggccagagtacggcagcaagcggctgcatagctggatgacatcacaaaaaaatccagtgatcagcattaatcctgacgcagaataccgctattccgttgcctggttacccgtcttcgccgcagctgtagcaagcggcaatacctcttttgaagccgtatttgaccgtaaaccgggtgccgtatttttcctgagacaggtcagggacttcgattcccgctggtttaaggccatcttccagtgcagcctgttgcgttattttgctcaaaaataa

SEQ ID NO: 29656 - DNA, 6321 bp, Klebsiella pneumoniae; identical to SEQ ID NO: 29620

SEQ ID NO: 29657 - DNA, 3288 bp, Klebsiella pneumoniae; identical to SEQ ID NO: 29621

SEQ ID NO: 29658 - DNA, 6321 bp, Klebsiella pneumoniae; identical to SEQ ID NO: 29614

SEQ ID NO: 29659 - DNA, 3288 bp, Klebsiella pneumoniae; identical to SEQ ID NO: 29615

SEQ ID NO: 29660 - DNA, 6321 bp, Klebsiella pneumoniae; identical to SEQ ID NO: 29614

SEQ ID NO: 29661 - DNA, 3288 bp, Klebsiella pneumoniae; identical to SEQ ID NO: 29615

SEQ ID NO: 29662 - DNA, 6249 bp, Klebsiella pneumoniae 303K
atgggggtcacaaacccgcagttgcgtgagcacctcgcgcaacaaatgggcgccgattgtgggaaatcaggctcattccttgcttctcccgttttccaacaaatgtttggctggaaagcgtcaaacaaaacgatgcgtagcctgacggaaggcaaggcattgctcagtaaagctgtggttgattcgctggatgatcagaacaatggacgctatcgttttggtgctgactggaaaccctttactcaccagctagccagttggaaggctctgctggaaaaaaaacattctgtggtagtgaccagcggtacgggttcaggcaaaaccgaatgttttatggtgccggtgctggaagacctctaccgggaattacatgaaaatggcaacaacccacttatcggcgtcagggcccttttcctctatccacttaacgccttaattaattcgcaacgtgagcgcctggacgcctggacacgtggttttggttccggaatccgatactgcctctacaacggaaataccgaaaatctacacgccgcagtgaaaagcgaacaggtaaaaagaccgaatgaagtactctcgcgcgaaaaaatgcgtgaagaacccgctccaattctggtgaccaacggcacaatgctggaatatatgatggtccgccagatcgacgctccaattatccagcaatctaaatcacaaaaatcattacgctggatcgtattggatgaagcgcatacctatgtcggctcgcaggccgctgaactggcgctgcagttacgccgcgtgatgacggcctttggtgtgactccagatgatgttcgctttgtagcaacctctgcaaccattgccggaagcgatgccgaaaagcaattaaaaaaattcctctctgaattatccggtataccgcaagagcgcattgacgtactggacggaagccgggttattccggaactggaaccatgcaaacacgtttttattccgttagaagaaattgagcaaatccctgatacagacatgaaaggcgtaagcccagagcgctttgatgcacttacgcattcacctgaagcgtattacttgcgcgacatgctagttactcaaccgaatccaatgaagttggatgatatgacgcagcggttgaactcgctaacaaaacagcattatagccagcaggatgtgttgcgctggattgacgtctgctctggcacacaacccaatactaaggatcccgcatttcttaaggtcagggcgcacatattccaacgcaatacccagggggtgtgggcctgtgttgataaagaatgcagattaaagcacggtaccccgctggaaaagggttggccttttggctatgtgtatgtgaacaaacgccaaaattgcgattgtggaagcccggtttacgagctggcattctgtaatgaatgtaatgagccacatcttctggcgcgggacaaaaagggaaaacttgtccaatgggaaaataaaggcggtgatgagttctctttgcaagatgatgtgcatattgaacatgatgccgcagaagaaaaagttgataaagagagtcgttttcagcccccactcattatcgccgcagagaagaccagcgcggcgggttatacccaacagcgtctggaccgtcagacgcgtcgtattggtgttattaacaatgacagcatcccgctaattattaacgacattgaacaagtatgtagtgccagtagctgtggctacagaggcacgagcggaaaacaaccgttccgccgtgccttattaggtgggccattttacgtcaccaatattgtgccaaccgttctggaatattgtcaggattttattagtgaagaaggaaaagagggcgtcggacctgattcgttaccaggtcgaggccgtcgacttattacctttaccgacagccggcaaggaacggcccgaatggcggtgcgcatgcagcaagaagctgagcgcagccgcttacgcggtagtgtggtcgaaatcctgagctggcatcaacgaacacagacttctgcaacaccgaatgccaatgccgatctggaaaagttagcgacgagggcaaaacaggcccgccatgaggcgaaagaatatagaagctggggaatgccggaacaagcaaaactggctgaagcgcaagccgaacagcttgaacaggctattcaggccgcgaccggtggcaaagctgcgactattctggtttcgcggacctggattgaaatggttaatgaacttaaagaaaaagccgatattcgcggccctattctgcaatataaccactatctgaagcctgaaattttcaatgagaatggcgggccgctaaagctttctgaaatgttgttattccgggagtttatgcgccggcccaaacgaactaacagcctggaaacgcagggattagttcaggttggttatcaggggctggagaagagccataagatgccggtgcattggcaagagaaagggctgacgctggatgactggaaggattttcttaaggttacgctggatctgtacgtacgtgaaagcaacttcacacaactggacgatgagttgaaaaactggattggtagccgtttttcatcgaaattcgtccgtaacccggacacaaaagatcccgaagataatcagaacagacgctggccacaaattcgtaatggcaatatatcccatcgtttagtgaagatattaatgcttggcgcaggattcaaaaccgtaaatacggcgacgatggatattatcaatacgtggctgaaagaagcgtggacccaacttaccggcccacttgcagtgctgaaacctgatggtaaccgtttctatctaccaaaagagcacatgactttttctttaatcacagatgcctggatttgtccggtaaccaataagattctggatacggcctttaaaggcttaaccccttatctgcccacccacatttcgtttgaacaccttaccaagacacaatatgacgcttttgtcgcgcaaaaggtcaccatgccggaaatctggaagctggatcgttcgcaagaagactacgctccgggtctggcgaaggtacgtgactgggttagtaaagagccactaatcgcacaattacgttcggaaaacgtctggacggatattaacgatcgtgtcgtggaaggcggattttactaccgcacagccgagcactctgctcagcaatcgtcagaacgtttgcaaagctacgaaaagatgttcaaaaacggacagcttaatgttctcaactgttccaccaccatggaaatgggggttgatatcggtggcattaccgccgtggtgatgaacaacgtaccgccacatccggcaaactatttacagcgtgccgggcgagccgggcgtagtcaggaatcacgtgcgatttcttatactctgtgcaaaggaaacccgcacgaccagcaggttttttccaacccactctggccgtttgagaccatgatccccgcgccgatggtggcaatgaattccgcccggttggtgcaacgccacgtcaatgcgttattactgtccgactttttatgtcacgtcattggcgaaacagataaagaaaaaaccagtcttgatagcctctggtttttcggtgaagacgacgggcaatcaaaatgtgaacactttaaagtctggctcgagcgtccggttcttgatatcgacgcggcgctggaacggctggtgaaaggtacagcattacatggcgccagacccgacctgttgcgggataaaacaatccatgcgattacgttcctgcaacagcgatggctttccgtctaccgcgatcttgtagcccaggaacgagaatcgcagccgcaaacgccttatcgcaagcgcatagaactggagaaaaaacgacactgtggcgagtatttgctgcgtgacctggcggccaggactttcctgccgggatacggcttcccgacagatgtggtgacgtttgataacttcactatggaagactatatccgtgaaaaatcacagaaaagccgggataaaaaagatcgcgaagataatgtgtcacgttataagggacttccctcgcgtaacctgggggttgccatccgtgaatatgcaccaggtgcagagatcatactggatggccgggtcttccgctctgctggcgtctcactgcactggcacaatattaatgccgataccaatgaagcccagcgtctggattgcgcctggcgctgtcacaaatgcgggaccataggctatgaagaggggttgagcagttccgggacgctattttgcaccaacagcgcctgtggtgaaaaaatcatcatggataatcgtcgccaggtgctgcagccagccgggtttgtaactgatgcacacgcgccggtgacgaacaatattgaaaccatgaaatttatcccggttgtccctgcctgggtatttgttaaagcagaacccgtatcgctacctaacccgataatggggtatatggcatctggcgctgatgggcatgttttccagcaaagccttggagaaggtgggcatggttacgcactttgtctgagctgcggtcgcgcagagtcgatgttgaacgcaaacgatgcgccgaaaagtatggaagcccactacccgccgcgtccgggaaaagcagatcgcgacagccagaatcaacgtctaatttgccccggctcgacggcgctcatgaagaacgtcacgctgggggcattggcacgaacggatgtctttgaaatggttctacgcaagccgcaaaacggtgaatatctcccggatagcacggaagaagggcggattgttgccatgactctggcggtagcactacgtcaggcgctggccggggttttgggtatctccgcggcagaactgggctacgccgtgcgtccggtcagactggaagatggacaatcagtattagccgttcaactctacgatgtgattagcggtggtgcaggttttgcatccagtgcgccaatgcacattgaggccattctgttgggaatggtgaagcagttgggttgccaccactgcgatacggcatgcagtgaatgcctcctcgactcccagactcgccacgatcacgatttgctggatcgtaaagcagcacaggcatggcttggtgatgacttctcgtactacatcggtttgccggatgatgaaacattctcgctaccggatgcccgatattgcccgggagccattggcgatacccttcgtcgggcgattaacgagggtgctgaaaaactcacactgtggatgaatgggccactcaatgagtgggatctttatgcccgtcaattccgggcggctattcagaactaccggattaaagacaatgttgcggtcgaccttgtcattcctgctggcgtcgatgatccggagctgttgcatgagctttcgcagtttactgctttgggcgtgcgtttgtgtcatagcgaacaggctctggaattgccgattgttgcgcaagtcgcctttgccgatcgcgtaatgacgctggcttcacgcagccagcaggcaactatcccagggccaggctggcacctgaatgacgaactggtcgttcgcagcctcggctataacacggtaaaactgaacgagtttgttttgccggggaaagcagcgaacgcggttgagcgtgtcaaagacatagagattcataaacagttaaatggtccactttcgcagttcggacaacgcttctgggatttgctgtgtaacaaccatgaagaagcacagtcactgatgaaaaaccagcgaatcacaagcgttcactataccgatcgctatctgcaaaacccggttgcgctggcactgctgggggcgatactgaaaccgctaaaaacaaagctgaccgatgacgcggagcttgagcttgatactctgtttaagcccaaagatcgttcaggaaatcgcccctctcatgactggatgagcgaagcggattttcaggatttcgccgaccagtggtttactgcggcaatgggcagagcggtagaactgacggtgttcgattcgccacgtgatattccacatcatcgtaagctgacggtgacctttgaagatagtcagatgttgaagattcgcttcgaccagggaatgggatactggcgtatcgacttcccgtatgcatggcgtaactttgactttactgatgatgtgacttatcagctagtaaaactggcgcaagcctgccaggagggcaaagtccttaatagcgaggaaagctgggcaacggatgtgctggtagaggtgatgccgtcttaa

SEQ ID NO: 29663 - DNA, 2952 bp, Klebsiella pneumoniae 303K
atggaaggttactggaaccgcccaatccgattttacgaatcggaacgacgtaattttctcggaacattgttcagtgaggggggattaccattccgcttactgaaagaatcggatagccattttcagaatgtattctcccggattctcaatcaatatgggcaggcacaactggcaggattttccatactttctctagtaagaactgtcatagaaaaatcagccctgccaactgtttttagcgaagacacttctgtagaactcatcagccatatagcggaaaaactcagctcgctggttctaatgtacaacctgagcaatcataccgaacccgtgaagcagcttgataaagtgcatccaaaatggcgtgatgagttccctatgcctttggatgatgaaacaggtactcgctttcttaatgggttgctatgtactgcctccgtagaggctaaatcccacttacaaaaaaataagggttccggttgtcaattctattggtcggaaaaccatcccaatcaaatccaggcgataatttcgctgcctgatgaactcaccttcccaatcatcagcactccctcaacgacgcgatttgaacttgccatttatgaagatggtgaagaagtcacctgtctcggccccgcctatgcatccctggagaacgcccatgccaaagttcgcctgcgtaaaagtgagtcgagatttgtcagacgccagccagctgcgagcttaacgattgttgcacgaactggaggaatgattgttggcaccataaaacttgaagatagtgaaatcgccgttggcgaggtaccacttacttttgttgatgatgaggaacgctggttattgcaagggcaagcttcttgtactgtacgtaatagcaatgttcttattgccttacctcaagaaaaaaccactatttcagggtgtgaaggctctccaggtacagcgtcgttattaggactcagaacactgtccgtaaaaggacgccaagatataaccatttccggagatgaaacatacaggatccgcaccgggagggaacaatctaatcagagcggatttgattttgatggaaaacatgttacctggaattgccatcctgatgaaacattccttggtgtacctaaagttacggcgaaaaacctgaatgctgaagatatacaattcaaacgttacctgagtggcatatcgttagatgaatgtcaggtacaagagatgatgggtacgcaatatgtttctgtcagaaatactcacaatgaaactctactgcgtcgaaaaattgggatcttgccggcagattttaacattgaaataaagggtggtgagctagccaatgaaggttccattgttatctcaacgcaacatccctgcatgtctgtcttaaaagataaaacattagaggttgctcgcaaacgctcagcaggacaaacagaaatattacttaaagcagaaggaatacctcctgcgtttgtctctttgcagatttacccaaatttgggtgcagccccagtagagatgactctacctttccctgcaaaaggttgcctggcccttgatgcaaatggatgcactctggataaaaatattactctgcatgatttgctgggttcgagagcctttttatttggtaaaaatggcgatccgacacgtttttcactggaattacatttacgttccaaaagtgggttacaggcatggcatgaatggtgttataccgcgggggaacaccccgtcgaactcaatttatacagcctgagagagcatattgaaaacttactgtctcttgagacaggaattgaccaggttgttgagatgcaaatcaaaggcgcaggtgctgtaatgagctggcagattcgccgctataaatacagtttacgctatgattatgaaagagaacttctcgtcagccagtcaacccattatcgtaccgagcaaatgtcttcacctgtcatcatgttattgagtgagccggagagaaaaatcaccccattatcatcaagaatgagcgaaggtgtaccgacaggtgaatatgaactgagttcggttattaacaaaaatgggccgtggttagtcgtccccaaacagggtgaggaaatggcgtttcgcccctgcttcattcgtggggaaccgtcgttacctgtggatgaaagtagtattcgttcattgcagaaagcgacccagctttttaatccccagtctgaagttaataccattacactggtacttgaacagatggctaacgatcccgctcattccggctggcaatttatgcgttgcctgtacgaccaatttggttatctgccgctggcaacctttgaagtttggcgtgcgctagtacagcatccacgagcactggcgatgtcgctatttaaatttgagatgtcagctgagtatctgagccgcattgaaaatgagttccctattttatgggagttcttccccatcttcgaaatcaaaactgcagccgatcgatttaaattgttcctgagccaaaagggtgcaccggaagaaacccagaatttactggtgaagagcttgtatcagcgattggggctcgtttttccgacatatgccgacgaaattgagaaatggttaagttatggacaattccctccgcccattccagagttcttcattcgcgagtggtatcaggagcttttacgtgagcatagtgaagctcgctggccagagtacggcagcaagcggctgcatagctggatgacatcacaaaaaaatccagtgatcagcattaatcctgacgcagaataccgctattccgttgcctggttacccgtcttcgccgcagctgtagcaagcggcaatacctcttttgaagccgtatttgaccgtaaaccgggtgccgtatttttcctgagacaggtcagggacttcgattcccgctggtttaaggccatcttccagtgcagcctgttgcgttattttgctcaaaaataa

SEQ ID NO: 29664 - DNA, 6321 bp, Klebsiella pneumoniae BIDMC 11; identical to SEQ ID NO: 29614

SEQ ID NO: 29665 - DNA, 3288 bp, Klebsiella pneumoniae BIDMC 11
ttgagtcaatcagaatgcatttcttgggtaaaatgtacttcctggctaagtaactttcttaatcgtagaggattgagacaacctgatagccgtcccctatatgaatatcatgcgaccaatgatgaatacaataatctaacacaactacttcgtgcagttggtcaagtacagagttatatcgatgataaaggttacgctgcctgttttgtccttttttgctctgaatggtatcgcagagattatgagcgccattgtggttggatgtgggaccctatatatagagcattgggagtatcattaacgtcgactgaattaaggattattatccctaaagggatggaaggttactggaaccgcccaatccgattttacgaatcggaacgacgtaattttctcggaacattgttcagtgaggggggattaccattccgcttactgaaagaatcggatagccattttcagaatgtattctcccggattctcaatcaatatgggcaggcacaactggcaggattttccatactttctctagtaagaactgtcatagaaaaatcagccctgccaactgtttttagcgaagacacttctgtagaactcatcagccatatagcggaaaaactcagctcgctggttctaatgtacaacctgagcaatcataccgaacccgtgaagcagcttgataaagtgcatccaaaatggcgtgatgagttccctatgcctttggatgatgaaacaggtactcgctttcttaatgggttgctatgtactgcctccgtagaggctaaatcccacttacaaaaaaataagggttccggttgtcaattctattggtcggaaaaccatcccaatcaaatccaggcgataatttcgctgcctgatgaactcaccttcccaatcatcagcactccctcaacgacgcgatttgaacttgccatttatgaagatggtgaagaagtcacctgtctcggccccgcctatgcatccctggagaacgcccatgccaaagttcgcctgcgtaaaagtgagtcgagatttgtcagacgccagccagctgcgagcttaacgattgttgcacgaactggaggaatgattgttggcaccataaaacttgaagatagtgaaatcgccgttggcgaggtaccacttacttttgttgatgatgaggaacgctggttattgcaagggcaagcttcttgtactgtacgtaatagcaatgttcttattgccttacctcaagaaaaaaccactatttcagggtgtgaaggctctccaggtacagcgtcgttattaggactcagaacactgtccgtaaaaggacgccaagatataaccatttccggagatgaaacatacaggatccgcaccgggagggaacaatctaatcagagcggatttgattttgatggaaaacatgttacctggaattgccatcctgatgaaacattccttggtgtacctaaagttacggcgaaaaacctgaatgctgaagatatacaattcaaacgttacctgagtggcatatcgttagatgaatgtcaggtacaagagatgatgggtacgcaatatgtttctgtcagaaatactcacaatgaaactctactgcgtcgaaaaattgggatcttgccggcagattttaacattgaaataaagggtggtgagctagccaatgaaggttccattgttatctcaacgcaacatccctgcatgtctgtcttaaaagataaaacattagaggttgctcgcaaacgctcagcaggacaaacagaaatattacttaaagcagaaggaatacctcctgcgtttgtctctttgcagatttacccaaatttgggtgcagccccagtagagatgactctacctttccctgcaaaaggttgcctggcccttgatgcaaatggatgcactctggataaaaatattactctgcatgatttgctgggttcgagagcctttttatttggtaaaaatggcgatccgacacgtttttcactggaattacatttacgttccaaaagtgggttacaggcatggcatgaatggtgttataccgcgggggaacaccccgtcgaactcaatttatacagcctgagagagcatattgaaaacttactgtctcttgagacaggaattgaccaggttgttgagatgcaaatcaaaggcgcaggtgctgtaatgagctggcagattcgccgcaataaatacagtttacgctatgattatgaaagagaacttctcgtcagccagtcaacccattatcgtaccgagcaaatgtcttcacctgtcatcatgttattgagtgagccggagagaaaaatcaccccattatcatcaagaatgagcgaaggtgtaccgacaggtgaatatgaactgagttcggttattaacaaaaatgggccgtggttagtcgtccccaaacagggtgaggaaatggcgtttcgcccctgcttcattcgtggggaaccgtcgttacctgtggatgaaagtagtattcgttcattgcagaaagcgacccagctttttaatccccagtctgaagttaataccattacactggtacttgaacagatggctaacgatcccgctcattccggctggcaatttatgcgttgcctgtacgaccaatttggttatctgccgctggcaacctttgaagtttggcgtgcgctagtacagcatccacgagcactggcgatgtcgctatttaaatttgagatgtcagctgagtatctgagccgcattgaaaatgagttccctattttatgggagttcttccccatcttcgaaatcaaaactgcagccgatcgatttaaattgttcctgagccaaaagggtgcaccggaagaaacccagaatttactggtgaagagcttgtatcagcgattggggctcgtttttccgacatatgccgacgaaattgagaaatggttaagttatggacaattccctccgcccattccagagttcttcattcgcgagtggtatcaggagcttttacgtgagcatagtgaagctcgctggccagagtacggcagcaagcggctgcatagctggatgacatcacaaaaaaatccagtgatcagcattaatcctgacgcagaataccgctattccgttgcctggttacccgtcttcgccgcagctgtagcaagcggcaatacctcttttgaagccgtatttgaccgtaaaccgggtgccgtatttttcctgagacaggtcagggacttcgattcccgctggtttaaggccatcttccagtgcagcctgttgcgttattttgctcaaaaataa

SEQ ID NO: 29666 - DNA, 6321 bp, Klebsiella pneumoniae BIDMC 36
atgactacacgctatttttcgtcacttattgaacaatcgttgtctcgttcaactgaagcaacactgagtatcatgggggtcacaaacccgcagttgcgtgagcacctcgcgcaacaaatgggcgccgattgtgggaaatcaggctcattccttgcttctcccgttttccaacaaatgtttggctggaaagcgtcaaacaaaacgatgcgtagcctgacggaaggcaaggcattgctcagtaaagctgtggttgattcgctggatgatcagaacaatggacgctatcgttttggtgctgactggaaaccctttactcaccagctagccagttggaaggctctgctggaaaaaaaacattctgtggtagtgaccagcggtacgggttcaggcaaaaccgaatgttttatggtgccggtgctggaagacctctaccgggaattacatgaaaatggcaacaacccacttatcggcgtcagggcccttttcctctatccacttaacgccttaattaattcgcaacgtgagcgcctggacgcctggacacgtggttttggttccggaatccgatactgcctctacaacggaaataccgaaaatctacacgccgcagtgaaaagcgaacaggtaaaaagaccgaatgaagtactctcgcgcgaaaaaatgcgtgaagaacccgctccaattctggtgaccaacggcacaatgctggaatatatgatggtccgccagatcgacgctccaattatccagcaatctaaatcacaaaaatcattacgctggatcgtattggatgaagcgcatacctatgtcggctcgcaggccgctgaactggcgctgcagttacgccgcgtgatgacggcctttggtgtgactccagatgatgttcgctttgtagcaacctctgcaaccattgccggaagcgatgccgaaaagcaattaaaaaaattcctctctgaattatccggtataccgcaagagcgcattgacgtactggacggaagccgggttattccggaactggaaccatgcaaacacgtttttattccgttagaagaaattgagcaaatccctgatacagacatgaagggcgtaagcccagagcgctttgatgcacttacgcattcacctgaagcgtattacttgcgcgacatgctagttactcaaccgaatccaatgaagttggatgatatgacgcagcggttgaactcgctaacaaaacagcattatagccagcaggatgtgttgcgctggattgacgtctgctctggcacacaacccaatactaaggatcccgcatttcttaaggtcagggcgcacatattccaacgcaatacccagggggtgtgggcctgtgttgataaagaatgcagattaaagcacggtaccccgctggaaaagggttggccttttggctatgtgtatgtgaacaaacgccaaaattgcgattgtggaagcccggtttacgagctggcattctgtaatgaatgtaatgagccacatcttctggcgcgggacaaaaagggaaaacttgtccaatgggaaaataaaggcggtgatgagttctctttgcaagatgatgtgcatattgaacatgatgccgcagaagaaaaagttgataaagagagtcgttttcagcccgcactcattatcgccgcagagaagaccagcgcggcgggttatacccaacagcgtctggaccgtcagacgcgtcgtattggtgttattaacaatgacagcatcccgctagttattaacgacattgaacaagtatgtagtgccagtagctgtggctacagaggcacgagcggaaaacaaccgttccgccgtgccttattaggtgggccattttacgtcaccaatattgtgccaaccgttctggaatattgtcaggattttattagtgaagaaggaaaagagggcgtcggacctgattcgttaccaggtcgaggccgtcgacttattacctttaccgacagccggcaaggaacggcccgcatggcagtgcgcatgcagcaagaagctgagcgcagccgcttacgcggcagtgtggtggaaatcctgagctggcatcaacgaacacagacttctgcaacaccgaatgccaatgccgatctggaaaagttagcgacgagggcaaaacaggcccacaatgaggcgaaagagtatagaagctggggaatgccggaacaagcaaaactggctgaagcgcaagccgaacagcttgaacaggctattcaggccgcgaccggtggcaaagctgcgaccattctgttttcgcggacctggattgaaatggttaatgaacttaaagagaaagccgatattcgcggccctattctgcaatataaccactatctgaagcctgaaattttcaatgagaatggcgggccgctaaagctttctgagatgttgttattccgggagtttatgcgccggcccaaacgaactaacagcctggaaacgcagggattagttcaggttggttatcaggggctggagaagatccataagatgccggtgcattggcaagagaaagggctgacgctggatgactggaaggattttcttaaggttacgctggatctgtacgtacgtgaaagcaacttcacacaactggacgatgagttgaaaaactggattggtagccgtttttcatcgaaattcgtccgtaacccggacacaaaagatcccgaagataatcagaacagacgctggccacaaattcgtaatggcaatatatcccatcgtttagtgaagttattaatgcttggcgcaggattcaaaaccgtaaatacggcgacgatggatattatcaatacgtggctgaaagaagcgtggacccaacttaccggcccacttgcagtgctgaaacctgatggtaaccgtttctatctgccaaaagagcacatgactttttctttaatcacagatgcctggatttgtccggtaaccaataagattctggatacggcctttaaaggcttaaccccttatctgcccacccacatttcgtttgaacaccttaccaagacacaatatgacgcttttgtcgcgcaaaaggtcaccatgccggaaatctggaagctggatcgttcgcaagaagactacgctccgggtctggcgaaggtacgtgactgggttagtaaagagccactaatcgcacaattacgttcggaaaacgtctggacggatattaacgatcgtgtcgtggaaggcggattttactaccgcacagccgagcactctgctcagcaatcgtcagaacgtttgcaaagctacgaaaagatgttcaaaaacgggcagcttaatgttcttaactgttctaccaccatggaaatgggggttgatatcggtggcattaccgccgtagtgatgaacaacgtaccgccccatccggctaactatttacagcgtgccgggcgagccgggcgtagtcaggaatcgcgtgcgatctcttacacactatgtaaagggaacccgcacgatcaacaggtttttgccaacccactctggccatttgagaccatgatccccgcgccaatggtggcaatgaattccgcccggctggtgcaacgccacgtcaatgcgttattactgtccgactttttatgtcacgtcattggcgaaacagataaagaaaaaaccagtcttgatagcctctggtttttcggtgaagacgacgggcaatcaaaatgtgaacactttaaagtctggctcgagcgtccggttcttgatatcgacgcggcgctggaacggctggtgaaaggtacagcattacatggcgccagacccgacctgttgcgggataaaacaatccatgcgattacgttcctgcaacagcgatggctttccgtctaccgcgatcttgtagcccaggaacgagaatcgcagccgcaaacgccttatcgcaagcgcatagaactggagaaaaaacgacactgtggcgagtatttgctgcgtgacctggcggccaggactttcctgccgggatacggcttcccgacagatgtggtgacgtttgataacttcactatggaagactatatccgtgaaaaatcacagaaaagccgggataaaaaagatcgcgaagataatgtgtcacgttataagggacttccctcacgtaacttgggggttgccatccgtgaatatgcaccaggtgcagagatcatactggatggccgggtcttccgctctgctggcgtctcactgcactggcacaatattaatgccgataccaatgaagcccagcgtctggattgcgcctggcgctgtcacaaatgcgggaccataggctatgaagaggggttgagcagttccgggacgctattttgcaccaacagcgcctgtggtgaaaaaatcatcatggataatcgtcgccaggtgctgcagccagccgggtttgtaactgatgcacacgcgccggtgacgaacaatattgaaaccatgaaatttatcccggttgtccctgcctgggtatttgttaaagcagaacccgtatcgctacctaacccgataatggggtatatggcatctggcgctgatgggcatgttttccagcaaagccttggagaaggtgggcatggttacgcactttgtctgagctgcggtcgcgcagagtcgatgttgaacgcaaacgatgcgccgaaaagtatggaagcccactacccgccgcgtccgggaaaagcagatcgcgacagccagaatcaacgtctaatttgccccggctcgacggcgctcatgaagaacgtcacgctgggggcattggcacgaacggatgtctttgaaatggttctacgcaagccgcaaaacggtgaatatctcccggatagcacggaagaagggcggattgttgccatgactctggcggtagcactacgtcaggcgctggccggggttttgggtatctccgcggcagaactgggctacgccgtgcgtccggtcagactggaagatggacaatcagtattagccgttcaactctacgatgtgattagcggtggtgcaggttttgcatccagtgcgccaatgcacattgaggccattctgttgggaatggtgaagcagttgggttgccaccactgcgatacggcatgcagtgaatgcctcctcgactcccagactcgccacgatcacgatttgctggatcgtaaagcagcacaggcatggcttggtgatgacttctcgtactacatcggtttgccggatgatgaaacattctcgctaccggatgcccgatattgcccgggagccattggcgatacccttcgtcgggcgattaacgagggtgctgaaaaactcacactgtggatgaatgggccactcaatgagtgggatctttatgcccgtcaattccgggcggctattcagaactaccggattaaggacaatgttgcggtcgaccttgtcattcctgctggcgtcgatgatccggagctgttgcatgagctttcgcagtttactgctttgggcgtgcgtttgtgtcatagcgaacaggctctggaattgccgattgttgcgcaagtcgcctttgccgatcgcgtaatgacgctggcttcacgcagccagcaggcaactatcccagggccaggctggcacctgaatgacgaactggtcgttcgcagcctcggctataacacggtaaaactgaacgagtttgttttgccggggaaagcagcgaactctgttgagcgtgtcaaagacatagagattcataaacagttaaatggtgcactttcgcagttcggacaacgcttctgggacacgctgtttaacagccatgaagaagcacaatcgctgatgaaaaaccagcgaatcaccagcgttcactataccgatcgctatctgcaaaacccggttgcgctggcactgctgggggcgatactgaaaccgctaaaaacaaagctgaccgatgacgcggagcttgagcttgatactctgtttaagcccaaggatcgtcccggcaaccggccgttccatgactggatgagcgatgcggattttcaggatttcgccgaccagtggtttactgcggcaatgggcagagcggtagaactgacggtgttcgattcgccacgtgatattccacatcatcgtaagctgacggtgacctttgaagatggtcagacgttgaagattcgattcgaccagggaatgggatactggcgtatcgacttcccaaatgcatggcgtaactttgactttactgacgatgtgacttatcagctagtaaaaatggcgcaagcctgccaggagggcaaagtccttaatagcgaggacagctgggcaacggatgtgctggtagaggtgatgtcgtcttaa

SEQ ID NO: 29667 - DNA, 3288 bp, Klebsiella pneumoniae BIDMC 36; identical to SEQ ID NO: 29621

SEQ ID NO: 29668 - DNA, 6321 bp, Klebsiella pneumoniae CHS 66; identical to SEQ ID NO: 29614

SEQ ID NO: 29669 - DNA, 3288 bp, Klebsiella pneumoniae CHS 66
ttgagtcaatcagaatgcatttcttgggtaaaatgtacttcctggctaagtaactttcttaatcgtagaggattgagacaacctgatagccgtcccctatatgaatatcatgcgaccaatgatgaatacaataatctaacacaactacttcgtgcagttggtcaagtacagagttatatcgatgataaaggttacgctgcctgttttgtccttttttgctctgaatggtatcgcagagattatgagcgccattgtggttggatgtgggaccctatatatagagcattgggagtatcattaacgtcgactgaattaaggattattatccctaaagggatggaaggttactggaaccgcccaatccgattttacgaatcggaacgacgtaattttctcggaacattgttcagtgaggggggattaccattccgcttactgaaagaatcggatagccattttcagaatgtattctcccggattctcaatcaatatgggcaggcacaactggcaggattttccatactttctctagtaagaactgtcatagaaaaatcagccctgccaactgtttttagcgaagacacttctgtagaactcatcagccatatagcggaaaaactcagctcgctggttctaatgtacaacctgagcaatcataccgaacccgtgaagcagcttgataaagtgcatccaaaatggcgtgatgagttccctatgcctttggatgatgaaacaggtactcgctttcttaatgggttgctatgtactgcctccgtagaggctaaatcccacttacaaaaaaataagggttccggttgtcaattctattggtcggaaaaccatcccaatcaaatccaggcgataatttcgctgcctgatgaactcaccttcccaatcatcagcactccctcaacgacgcgatttgaacttgccatttatgaagatggtgaagaagtcacctgtctcggccccgcctatgcatccctggagaacgcccatgccaaagttcgcctgcgtaaaagtgagtcgagatttgtcagacgccagccagctgcgagcttaacgattgttgcacgaactggaggaatgattgttggcaccataaaacttgaagatagtgaaatcgccgttggcgaggtaccacttacttttgttgatgatgaggaacgctggttattgcaagggcaagcttcttgtactgtacgtaatagcaatgttcttattgccttacctcaagaaaaaaccactatttcagggtgtgaaggctctccaggtacagcgtcgttattaggactcagaacactgtccgtaaaaggacgccaagatataaccatttccggagatgaaacatacaggatccgcaccgggagggaacaatctaatcagagcggatttgattttgatggaaaacatgttacctggaattgccatcctgatgaaacattccttggtgtacctaaagttacggcgaaaaacctgaatgctgaagatatacaattcaaacgttacctgagtggcatatcgttagatgaatgtcaggtacaagagatgatgggtacgcaatatgtttctgtcagaaatactcacaatgaaactctactgcgtcgaaaaattgggatcttgccggcagattttaacattgaaataaagggtggtgagctagccaatgaaggttccattgttatctcaacgcaacatccctgcatgtctgtcttaaaagataaaacattagaggttgctcgcaaacgctcagcaggacaaacagaaatattacttaaagcagaaggaatacctcctgcgtttgtctctttgcagatttacccaaatttgggtgcagccccagtagagatgactctacctttccctgcaaaaggttgcctggcccttgatgcaaatggatgcactctggataaaaatattactctgcatgatttgctgggttcgagagcctttttatttggtaaaaatggcgatccgacacgtttttcactggaattacatttacgttccaaaagtgggttacaggcatggcatgaatggtgttataccgcgggggaacaccccgtcgaactcaatttatacagcctgagagagcatattgaaaacttactgtctcttgagacaggaattgaccaggttgttgagatgcaaatcaaaggcgcaggtgctgtaatgagctggcagattcgccgctataaatacagtttacgctatgattatgaaagagaacttctcgtcagccagtcaacccattatcgtaccgagcaaatgtcttcacctgtcatcatgttattgagtgagccggagagaaaaatcaccccattatcatcaagaatgagcgaaggtgtaccgacaggtgaatatgaactgagttcggttattaacaaaaatgggccgtggttagtcgtccccaaacagggtgaggaaatggcgtttcgcccctgcttcattcgtgtggaaccgtcgttacctgtggatgaaagtagtattcgttcattgcagaaagcgacccagctttttaatccccagtctgaagttaataccattacactggtacttgaacagatggctaacgatcccgctcattccggctggcaatttatgcgttgcctgtacgaccaatttggttatctgccgctggcaacctttgaagtttggcgtgcgctagtacagcatccacgagcactggcgatgtcgctatttaaatttgagatgtcagctgagtatctgagccgcattgaaaatgagttccctattttatgggagttcttccccatcttcgaaatcaaaactgcagccgatcgatttaaattgttcctgagccaaaagggtgcaccggaagaaacccagaatttactggtgaagagcttgtatcagcgattggggctcgtttttccgacatatgccgacgaaattgagaaatggttaagttatggacaattccctccgcccattccagagttcttcattcgcgagtggtatcaggagcttttacgtgagcatagtgaagctcgctggccagagtacggcagcaagcggctgcatagctggatgacatcacaaaaaaatccagtgatcagcattaatcctgacgcagaataccgctattccgttgcctggttacccgtcttcgccgcagctgtagcaagcggcaatacctcttttgaagccgtatttgaccgtaaaccgggtgccgtatttttcctgagacaggtcagggacttcgattcccgctggtttaaggccatcttccagtgcagcctgttgcgttattttgctcaaaaataa

SEQ ID NO: 29670 - DNA, 6345 bp, Klebsiella pneumoniae IS22
atgactacacgctatttttcgtcacttattgaacaatcgttgtctcgttcaactgaagcaacgctcagtatcatgggcgttaccaacccgcagctgcgtgaacatctcgcgcaacaaatgggggctgattgtgggaaaccgggctcattccttgcttctccggtattccagcaaatgtttggctggaaggagtcaaaccacacgatgcgcagcctgacggaaggcaacgcattgttgagcaaagcagtggttgattcactggatgatcagaataatggccggtaccggtttggtgctgactggaggccttttacgcaccagttagccagttggaaagctttgctggaaaagaaacattcagtggtggtaaccagtggtacgggttcaggtaaaacggaatgttttatggtaccggtgctggaagatctttaccgggaactgcatgaaaatggcaacaatccgttggtcggtgtccgagccctttttctctatccattgaacgccctgattaattcacagcgcgagcgtctggatgcctggacgcgtggttttggtacagggatccgctactgcctttacaacggcaacaccgaaaacctacacgcttcggtaaaaagcgaacaggcaaaaaggccgaatgaggtgctctcgcgcgaaaaaatgcgtgaagaacctgcgccgattctggtgaccaacggcacgatgctggaatatatgatggttcgccaggtcgacgccccgattatccagcaatctaaagcacaaaaatcactacgctggattgtactggatgaagcgcatacctatgtagggtcgcaggccgctgaactggcgctccagctgcgtcgtgtgatgaccgcgtttggcatgacaccagatgacgtgcgctttgtcgcgacctctgcgaccattgccggcagcgacgctgaaaagcagctgaaaaaatttctctctgaattatccggtatcccgcaggagcgcatcgatgttctggacggaagtcgggtgattcctgaactggaaccatccaaaaacgtttctgttccgttagacgagatagagcaaatacctgatctggatctaagagataaaaatgataataaaattaaagggataagtcctgagcgcttttatgcgcttacgcattcccccgaagcgcgttacatacgtgagatgttggtcaaacagcccaatccgatgaagctggatgagataacagagcggttacacgtgctgacaaaacagcattacagccagcaggaagtactgcgttggatcgatgtctgttcagggactcaacctaatgcaaaggatcccgcatttcttaaagtcagggcgcatatcttccagcgtaatacccagggaatatgggcttgtgttgataaagattgcagattaaagcacggtacaccgctcgacaaaggctggccctttggctatgtgtatgtgaaccagcgacaaaattgtgactgtggaagccctgtatacgaagttgcattctgtaatgattgtaatgagcctcatcttctggcacgggacaaaaagggcaaactagtccagtgggaaaataaaggtggcgatgaattctctttgcaggatgaagtacctgttgaacatgacgctacagaagaaaaagtcgaaaaagagaacagttttcagcctccgttgattattgccgcaggagagaccagcgaggcaggttataccctacaacgcctcgaccgtcagacgcgccgtattggcgttattaacaatgacagcattccgctgattattaatgatattgaacaggtttgtagtgccagtggctgtggctacagaggcatgagtgggaaacagcccttccggcgtgcactattaggtgggccattttacgttactaatatcgtgcccaccgttctagagtattgtcaggactttaccagtgatgaaggcaaagagggcgtcggaccagattcgttgccaggacgaggtcgtcgactcatcacctttacagacagtcgacaagggacagcccgaatggcggtgcgtatgcagcaagaagcagaacgcagtcgcttacgcggaagcgtagtcgaaattctcagctggcatcaaaggacgcaaacgtctacagcgccgaatgccaatgccgatctggaaaaattagcggccagggcgaagcaagcccgtgagcaggcagaagaatatcgaagctggggaatgccagaccaggcgaaattgtcacaagcacaggctgaacagcttgaacaggcttatcaggctgcaaccggtgggaaagccgcgactatcctggtatcccgaacctggacggagatggttaacgagcttaaagagagagccgatatccgcgggccggttctgcaatataaccattatcttaagcctgaagtgtttaatgaaaacggcggcccccttaagctttctgaaatgttgttgttccgggaattcatgcgtcgccctaaacggactaacagcctggaaacacaggggctggttcaggttggttaccaggggctggagaaaatacataagagccccttgcactggcaggaaaaaggattaacgctggatgactggcgcgattttctcaaggttacgttggatcattacgttcgcgagagcaacttcacacagctggatgatgagctgaaaaactggattggtagccgtttttcatcaaaattcgtccgtaacccggaatcaaaagatcctgaagataatcagaacagacgctggcctcaaattcgtaatggcaacgtatcccatcgtttagcgaagttgctgatgctgggggctggattcaaaaccgtcaatgcggcaactattgatattatcaatacatggctgaaagaagcatgggcccaacttaccggaccgcttgcagtactgaaacccgatggcaaccgtttttatttaccgaaagagcatatgactttttctttaatcacggatgcctggatttgcccggtaaccaataaaatcctggatacggcttttaaaggcttaaccccttatctgcctacccatatttcgttcgagcatcttaccctggcgcaatatgacacttttgtcgcgcagaaagtcacaatgccggaaatctggaagctggatcgttcacaggaagactacgcagagggtctggcaaaagcacgcgactgggtcagccatgatccgctgatcgcacaattgcggtcggaaaacgtctggacagacattaacgatcgtgtcgtggaaggcggcttctactatcgtactgccgagcactctgcccagcagtcgtcagaacgtctgcaaagctatgaaaagatgttcaagaatgggcaactaaatgttctcaactgttccaccaccatggaaatgggggttgatatcgggggtattactgcggtggtaatgaacaacgtaccgccacatccggccaactatttacagcgcgccgggcgagccgggcgtagtaaagaatcacgcgcgatctcttacaccctatgtaaaggtaacccacacgaccagcaggtttttgccaacccgctctggccatttgaaaccatgatcccggcacccatggtcgcgatgaactccgcccgactggtgcaacgtcacgtcaatgcattattactgtccgactttttatgtaacgttattggcgaaaccgataaagaaaaaaccagcctcgatagcctctggtttttcggtgaagatgacgggcagtcaaaatgcgaacgctttaaaatctggctggaacgtccggttcttgatatcgacacggcgctggaacggctggtgaaaggtacggcgttgcatggtgcaagagccgaatatctgcgggataaaacaatcaacgcgatcaccttcctgcaacagcggtggctctccgtttatcgcgatctcgtgacacaggagcgtgagtcgcagccgcaaacgccttatcgtaagcgcatagagctggagaagaaacggcactgtggcgagtatctgctgcgcgatctggctgccagaaccttcctgccgggatacggtttcccgacagatgtagtgacgtttgataacttcacgatggaagattatatccgcgaaaaatcgcagaaaagtcgtgataaaaaggaccgtgaagataacgtttcccgttataaaggattaccttcccgtaacctcggtgttgccattcgtgaatatgcaccgggagcagagatcatccttgatggccgtgtcttccgctctgccggtgtctcactgcactggcacaacattaatgctgataccaatgaagcccagcgtctggattgcgcctggcgctgtcacaaatgcgggaccattggctatgaagaggggatgagcagttccgggatgctcttttgctccaatagcgcctgcggcgaaaaaataatcatggataatcgccgtcaggtgctgcagcctgccgggtttgtcaccgatgcacacgctccggtaacgaacaatattgaaaccatgaaattcgtcccggttgtccccgcgtgggtctttgttaaagcagagcccgtaccgttgcctaacccgctaatgggttatatggcttctggggctgatgggcatgttttccagcaaagtttgggggaaggtggacacggttatgcattgtgtctgagctgtggccgtgctgagtcgatgctgaatgaaaatgatgcgccgaaaagtatggaagctcactatccaccgcgtccgggtaaagcggatcgcgacagccagaatcatcgtctgatttgccccggttcgacggcactcatgaagaatgtcaccctgggcgcactggcgcgtaccgatgtctttgaaatggttctgcgcaaaccgcaaaacggcgagtatctgccagataacacagaggaggggcggattgttgccatgactctggcggttgctctgcgtcaggcgctggcgggcgttctgggtatctccgccgcagaactcggctattctgtacgtccggtcagactggaggatgggcaatcggtattagccgtacagctttatgatgtgatcagcggtggtgcaggttttgcctccagcgcaccggtacacattgaagctatattgcagggaatggtgaaacagttaggctgccgccattgtgagactgcatgtagtgaatgcctgcttgattcccagactcgccacgatcacgatttgctggatcgcaaagcggcgctggcctggcttggcgatgacttcacgtattacatcggtttaccggatgaagagacattctcgctgccggatgcccgctactgccctggcgccattggcgatacgattcgccgggcgattaacgaaggcgctgaaaagctcaccctgtggatgaccggcgcgcccaatgagtgggatttatacgcacgtcagttccgcgcggcggttcagaactatcggctaaaagacaacgtcgaggtcgatcttgttattcctacgggagtggatgacccggacctgttgcatgaactatcgcaatttactgcgctgggtgtgcggctgtgccatgttgaacaggatctgcaattaccgatcgttgcccaggtcacctttaccgatcgcgtgatgacgctggcctctcgcagccagcaggcaacgattccggggccggagtggcacctgaatgacgaactggtggtgcgtagtctcggttataaaacggtagaactgaacgagtttattctgccggctaaagccaccaacgctgtcgagcgggtcaaagacattcagatccacaaacagttgaatggaccactgtcgcagtttgggcaacgcttctgggacgtgctgtttaacgaccatgaagaagcgcagtcactgatgaataacacgcgaattaccggcgttcactataccgatcgctatctgcaaaacccggttgcgctggcgttgttgggatcaattctgagaccgctaaaaacaaagctgaccgatggcgctgaagtgacgctggatacgctatttaaagataaagatcgccccggtaaccggcctttccatgactggatgagcatagcggattttcaggatttcgctgatcagtggtttgctgctgcgctgggcaggccggtagaactgacggtgttcgactcgccgcgcgatatccctcaccatcgtaaactgacggtgacttttgaggatggtcaggtattgaagatccgcttcgatcaggggatgggctactggcgcatcaacttttcatcgcaatggcattactttgatttccgcgatgacgtttctttccagttagtcaaaatggctcaggcctgcaaggaagggaatgtcgccaacagcgaagagagttgggcaacggatgtgctggtggaggtgatcgcctcctga

SEQ ID NO: 29671 - DNA, 3291 bp, Klebsiella pneumoniae IS22; identical to SEQ ID NO: 29083

SEQ ID NO: 29672 - DNA, 6321 bp, Klebsiella pneumoniae JHCK1; identical to SEQ ID NO: 29614

SEQ ID NO: 29673 - DNA, 3288 bp, Klebsiella pneumoniae JHCK1; identical to SEQ ID NO: 29615

SEQ ID NO: 29674 - DNA, 6249 bp, Klebsiella pneumoniae KP-11
atgggggtcacaaacccgcagttgcgtgagcacctcgcgcaacaaatgggcgccgattgtgggaaatcaggctcattccttgcttctcccgttttccaacaaatgtttggctggaaagcgtcaaacaaaacgatgcgtagcctgacggaaggcaaggcattgctcagtaaagctgtggttgattcgctggatgatcagaacaatggacgctatcgttttggtgctgactggaaaccctttactcaccagctagccagttggaaggctctgctggaaaaaaaacattctgtggtagtgaccagcggtacgggttcaggcaaaaccgaatgttttatggtgccggtgctggaagacctctaccgggaattacatgaaaatggcaacaacccacttatcggcgtcagggcccttttcctctatccacttaacgccttaattaattcgcaacgtgagcgcctggacgcctggacacgtggttttggttccggaatccgatactgcctctacaacggaaataccgaaaatctacacgccgcagtgaaaagcgaacaggtaaaaagaccgaatgaagtactctcgcgcgaaaaaatgcgtgaagaacccgctccaattctggtgaccaacggcacaatgctggaatatatgatggtccgccagatcgacgctccaattatccagcaatctaaatcacaaaaatcattacgctggatcgtattggatgaagcgcatacctatgtcggctcgcaggccgctgaactggcgctgcagttacgccgcgtgatgacggcctttggtgtgactccagatgatgttcgctttgtagcaacctctgcaaccattgccggaagcgatgccgaaaagcaattaaaaaaattcctctctgaattatccggtataccgcaagagcgcattgacgtactggacggaagccgggttattccggaactggaaccatgcaaacacgtttttattccgttagaagaaattgagcaaatccctgatacagacatgaagggcgtaagcccagagcgctttgatgcacttacgcattcacctgaagcgtattacttgcgcgacatgctagttactcaaccgaatccaatgaagttggatgatatgacgcagcggttgaactcgctaacaaaacagcattatagccagcaggatgtgttgcgctggattgacgtctgctctggcacacaacccaatactaaggatcccgcatttcttaaggtcagggcgcacatattccaacgcaatacccagggggtgtgggcctgtgttgataaagaatgcagattaaagcacggtacgccgctggaaaagggttggccttttggctatgtgtatgtgaacaaacgccaaaattgcgattgtggaagcccggtttacgagctggcattctgtaatgaatgtaatgagccacatcttctggcgcgggacaaaaagggaaaacttgtccaatgggaaaataaaggcggtgatgagttctctttgcaagatgatgtgcatattgaacatgatgccgcagaagaaaaagttgataaagagagtcgttttcagcccgcactcattatcgccgcagagaagaccagcgcggcgggttatacccaacagcgtctggaccgtcagacgcgtcgtattggtgttattaacaatgacagcatcccgctagttattaacgacattgaacaagtatgtagtgccagtagctgtggctacagaggcacgagcggaaaacaaccgttccgccgtgccttattaggtgggccattttacgtcaccaatattgtgccaaccgttctggaatattgtcaggattttattagtgaagaaggaaaagagggcgtcggacctgattcgttaccaggtcgaggccgtcgacttattacctttaccgacagccggcaaggaacggcccgcatggcagtgcgcatgcagcaagaagctgagcgcagccgcttacgcggcagtgtggtggaaatcctgagctggcatcaacgaacacagacttctgcaacaccgaatgccaatgccgatctggaaaagttagcgacgagggcaaaacaggcccacaatgaggcgaaagagtatagaagctggggaatgccggaacaagcaaaactggctgaagcgcaagccgaacagcttgaacaggctattcaggccgcgaccggtggcaaagctgcgaccattctgttttcgcggacctggattgaaatggttaatgaacttaaagagaaagccgatattcgcggccctattctgcaatataaccactatctgaagcctgaaattttcaatgagaatggcgggccgctaaagctttctgagatgttgttattccgggagtttatgcgccggcccaaacgaactaacagcctggaaacgcagggattagttcaggttggttatcaggggctggagaagatccataagatgccggtgcattggcaagagaaagggctgacgctggatgactggaaggattttcttaaggttacgctggatctgtacgtacgtgaaagcaacttcacacaactggacgatgagttgaaaaactggattggtagccgtttttcatcgaaattcgtccgtaacccggacacaaaagatcccgaagataatcagaacagacgctggccacaaattcgtaatggcaatatatcccatcgtttagtgaagttattaatgcttggcgcaggattcaaaaccgtaaatacggcgacgatggatattatcaatacgtggctgaaagaagcgtggacccaacttaccggcccacttgcagtgctgaaacctgatggtaaccgtttctatctgccaaaagagcacatgactttttctttaatcacagatgcctggatttgtccggtaaccaataagattctggatacggcctttaaaggcttaaccccttatctgcccacccacatttcgtttgaacaccttaccaagacacaatatgacgcttttgtcgcgcaaaaggtcaccatgccggaaatctggaagctggatcgttcgcaagaagactacgctccgggtctggcgaaggtacgtgactgggttagtaaagagccactaatcgcacaattacgttcggaaaacgtctggacggatattaacgatcgtgtcgtggaaggcggattttactaccgcacagccgagcactctgctcagcaatcgtcagaacgtttgcaaagctacgaaaagatgttcaaaaacgggcagcttaatgttcttaactgttctaccaccatggaaatgggggttgatatcggtggcattaccgccgtagtgatgaacaacgtaccgccccatccggctaactatttacagcgtgccgggcgagccgggcgtagtcaggaatcgcgtgcgatctcttacacactatgtaaagggaacccgcacgatcaacaggtttttgccaacccactctggccatttgagaccatgatccccgcgccaatggtggcaatgaattccgcccggctggtgcaacgccacgtcaatgcgttattactgtccgactttttatgtcacgtcattggcgaaacagataaagaaaaaaccagtcttgatagcctctggtttttcggtgaagacgacgggcaatcaaaatgtgaacactttaaagtctggctcgagcgtccggttcttgatatcgacgcggcgctggaacggctggtgaaaggtacagcattacatggcgccagacccgacctgttgcgggataaaacaatccatgcgattacgttcctgcaacagcgatggctttccgtctaccgcgatcttgtagcccaggaacgagaatcgcagccgcaaacgccttatcgcaagcgcatagaactggagaaaaaacgacactgtggcgagtatttgctgcgtgacctggcggccaggactttcctgccgggatacggcttcccgacagatgtggtgacgtttgataacttcactatggaagactatatccgtgaaaaatcacagaaaagccgggataaaaaagatcgcgaagataatgtgtcacgttataagggacttccctcgcgtaacttgggggttgccatccgtgaatatgcaccaggtgcagagatcatactggatggccgggtcttccgctctgctggcgtctcactgcactggcacaatattaatgccgataccaatgaagcccagcgtctggattgcgcctggcgctgtcacaaatgcgggaccataggctatgaagaggggttgagcagttccgggacgctattttgcaccaacagcgcctgtggtgaaaaaatcatcatggataatcgtcgccaggtgctgcagccagccgggtttgtaactgatgcacacgcgccggtgacgaacaatattgaaaccatgaaatttatcccggttgtccctgcctgggtatttgttaaagcagaacccgtatcgctacctaacccgataatggggtatatggcatctggcgctgatgggcatgttttccagcaaagccttggagaaggtgggcatggttacgcactttgtctgagctgcggtcgcgcagagtcgatgttgaacgcaaacgatgcgccgaaaagtatggaagcccactacccgccgcgtccgggaaaagcagatcgcgacagccagaatcaacgtctaatttgccccggctcaacggcgctcatgaagaacgtcacgctgggggcattggcacgaacggatgtctttgaaatggttctacgcaagccgcaaaacggtgaatatctcccggatagcacggaagaagggcggattgttgccatgactctggcggtagcactacgtcaggcgctggccggggttttgggtatctccgcggcagaactgggctacgccgtgcgtccggtcagactggaagatggacaatcagtattagccgttcaactctacgatgtgattagcggtggtgcaggttttgcatccagtgcgccaatgcacattgaggacattctgttgggaatggtgaagcagttgggttgccaccactgcgatacggcatgcagtgaatgcctcctcgactcccagactcgccacgatcacgatttgctggatcgtaaagcagcacaggcatggcttggtgatgacttctcgtactacatcggtttgccggatgatgaaacattctcgctaccggatgcccgatattgcccgggagccattggcgatacccttcgtcgggcgattaacgagggtgctgaaaaactcacactgtggatgaatgggccactcaatgagtgggatctttatgcccgtcaattccgggcggctattcagaactaccggattaaagacaatgttgcggtcgaccttgtcattcctgctggcgtcgatgatccggagctgttgcatgagctttcgcagtttactgctttgggcgtgcgtttgtgtcatagcgaacaggctctggaattgccgattgttgcgcaagtcgcctttgccgatcgcgtaatgacgctggcttcacgcagccagcaggcaactatcccagggccaggctggcacctgaatgacgaactggtcgttcgcagcctcggctataacacggtaaaactgaacgagtttgttttgccggggaaagcagcgaactctgttgagcgtgtcaaagacatagagattcataaacagttaaatggtgcactttcgcagttcggacaacgcttctgggacacgctgtttaacagccatgaagaagcacaatcgctgatgaaaaaccagcgaatcaccagcgttcactataccgatcgctatctgcaaaacccggttgcgctggcactgctgggggcgatactgaaaccgctaaaaacaaagctgaccgatgacgcggagcttgagcttgatactctgtttaagcccaaggatcgtcccggcaaccggccgttccatgactggatgagcgatgcggattttcaggatttcgccgaccagtggtttactgcggcaatgggcagagcggtagaactgacggtgttcgattcgccacgtgatattccacatcatcgtaagctgacggtgacctttgaagatagtcagatgttgaagattcgcttcgaccagggaatgggatactggcgtatcgacttcccgtatgcatggcgtaactttgactttactgatgatgtgacttatcagctagtaaaactggcgcaagcctgccaggagggcaaagtccttaatagcgaggaaagctgggcaacggatgtgctggtagaggtgatgccgtcttaa

SEQ ID NO: 29675 - DNA, 3288 bp, Klebsiella pneumoniae KP-11
ttgagtcaatcagaatgcatttcttgggtaaaatgtacttcctggctaagtaactttcttaatcgtagaggattgagacaacctgatagccgtcccctatatgaatatcatgcgaccaatgatgaatacaataatctaacacaactacttcgtgcagttggtcaagtacagagtaatatcgatgataaaggttacgctgcctgttttgtccttttttgctctgaatggtatcgcagagattatgagcgccattgtggttggatgtgggaccctatatatagagcattgggagtatcattaacgtcgactgaattaaggattattatccctaaagggatggaaggttactggaaccgcccaatccgattttacgaatcggaacgacgtaattttctcggaacattgttcagtgaggggggattaccattccgcttactgaaagaatcggatagccattttcagaatgtattctcccggattctcaatcaatatgggcaggcacaactggcaggattttccatactttctctagtaagaactgtcatagaaaaatcagccctgccaactgtttttagcgaagacacttctgtagaactcatcagccatatagcggaaaaactcagctcgctggttctaatgtacaacctgagcaatcataccgaacccgtgaagcagcttgataaagtgcatccaaaatggcgtgatgagttccctatgcctttggatgatgaaacaggtactcgctttcttaatgggttgctatgtactgcctccgtagaggctaaatcccacttacaaaaaaataagggttccggttgtcaattctattggtcggaaaaccatcccaatcaaatccaggcgataatttcgctgcctgatgaactcaccttcccaatcatcagcactccctcaacgacgcgatttgaacttgccatttatgaagatggtgaagaagtcacctgtctcggccccgcctatgcatccctggagaacgcccatgccaaagttcgcctgcgtaaaagtgagtcgagatttgtcagacgccagccagctgcgagcttaacgattgttgcacgaactggaggaatgattgttggcaccataaaacttgaagatagtgaaatcgccgttggcgaggtaccacttacttttgttgatgatgaggaacgctggttattgcaagggcaagcttcttgtactgtacgtaatagcaatgttcttattgccttacctcaagaaaaaaccactatttcagggtgtgaaggctctccaggtacagcgtcgttattaggactcagaacactgtccgtaaaaggacgccaagatataaccatttccggagatgaaacatacaggatccgcaccgggagggaacaatctaatcagagcggatttgattttgatggaaaacatgttacctggaattgccatcctgatgaaacattccttggtgtacctaaaattacggcgaaaaacctgaatgctgaagatatacaattcaaacgttacctgagtggcatatcgttagatgaatgtcaggtacaagagatgatgggtacgcaatatgtttctgtcagaaatactcacaatgaaactctactgcgtcgaaaaattgggatcttgccggcagattttaacattgaaataaagggtggtgagctagccaatgaaggttccattgttatctcaacgcaacatccctgcatgtctgtcttaaaagataaaacattagaggttgctcgcaaacgctcagcaggacaaacagaaatattacttaaagcagaaggaatacctcctgcgtttgtctctttgcagatttacccaaatttgggtgcagccccagtagagatgactctacctttccctgcaaaaggttgcctggcccttgatgcaaatggatgcactctggataaaaatattactctgcatgatttgctgggttcgagagcctttttatttggtaaaaatggcgatccgacacgtttttcactggaattacatttacgttccaaaagtgggttacaggcatggcatgaatggtgttataccgcgggggaacaccccgtcgaactcaatttatacagcctgagagagcatattgaaaacttactgtctcttgagacaggaattgaccaggttgttgagatgcaaatcaaaggcgcaggtgctgtaatgagctggcagattcgccgctataaatacagtttacgctatgattatgaaagagaacttctcgtcagccagtcaacccattatcgtaccgagcaaatgtcttcacctgtcatcatgttattgagtgagccggagagaaaaatcaccccattatcatcaagaatgagcgaaggtgtaccgacaggtgaatatgaactgagttcggttattaacaaaaatgggccgtggttagtcgtccccaaacagggtgaggaaatggcgtttcgcccctgcttcattcgtggggaaccgtcgttacctgtggatgaaagtagtattcgttcattgcagaaagcgacccagctttttaatccccagtctgaagttaataccattacactggtacttgaacagatggctaacgatcccgctcattccggctggcaatttatgcgttgcctgtacgaccaatttggttatctgccgctggcaacctttgaagtttggcgtgcgctagtacagcatccacgagcactggcgatgtcgctatttaaatttgagatgtcagctgagtatctgagccgcattgaaaatgagttccctattttatgggagttcttccccatcttcgaaatcaaaactgcagccgatcgatttaaattgttcctgagccaaaagggtgcaccggaagaaacccagaatttactggtgaagagcttgtatcagcgattggggctcgtttttccgacatatgccgacgaaattgagaaatggttaagttatggacaattccctccgcccattccagagttcttcattcgcgagtggtatcaggagcttttacgtgagcatagtgaagctcgctggccagagtacggcagcaagcggctgcatagctggatgacatcacaaaaaaatccagtgatcagcattaatcctgacgcagaataccgctattccgttgcctggttacccgtcttcgccgcagctgtagcaagcggcaatacctcttttgaagccgtatttgaccgtaaaccgggtgccgtatttttcctgagacaggtcagggacttcgattcccgctggtttaaggccatcttccagtgcagcctgttgcgttattttgctcaaaaataa

SEQ ID NO: 29676 - DNA, 6321 bp, Klebsiella pneumoniae KP-7
atgactacacgctatttttcgtcacttattgaacaatcgttgtctcgttcaactgaagcaacactgagtatcatgggggtcacaaacccgcagttgcgtgagcacctcgcgcaacaaatgggcgccgattgtgggaaatcaggctcattccttgcttctcccgttttccaacaaatgtttggctggaaagcgtcaaacaaaacgatgcgtagcctgacggaaggcaaggcattgctcagtaaagctgtggttgattcgctggatgatcagaacaatggacgctatcgttttggtgctgactggaaaccctttactcaccagctagccagttggaaggctctgctggaaaaaaaacattctgtggtagtgaccagcggtacgggttcaggcaaaaccgaatgttttatggtgccggtgctggaagacctctaccgggaattacatgaaaatggcaacaacccacttatcggcgtcagggcccttttcctctatccacttaacgccttaattaattcgcaacgtgagcgcctggacgcctggacacgtggttttggttccggaatccgatactgcctctacaacggaaataccgaaaatctacacgccgcagtgaaaagcgaacaggtaaaaagaccgaatgaagtactctcgcgcgaaaaaatgcgtgaagaacccgctccaattctggtgaccaacggcacaatgctggaatatatgatggtccgccagatcgacgctccaattatccagcaatctaaatcacaaaaatcattacgctggatcgtattggatgaagcgcatacctatgtcggctcgcaggccgctgaactggcgctgcagttacgccgcgtgatgacggcctttggtgtgactccagatgatgttcgctttgtagcaacctctgcaaccattgccggaagcgatgccgaaaagcaattaaaaaaattcctctctgaattatccggtataccgcaagagcgcattgacgtactggacggaagccgggttattccggaactggaaccatgcaaacacgtttttattccgttagaagaaattgagcaaatccctgatacagacatgaagggcgtaagcccagagcgctttgatgcacttacgcattcacctgaagcgtattacttgcgcgacatgctagttactcaaccgaatccaatgaagttggatgatatgacgcagcggttgaactcgctaacaaaacagcattatagccagcaggatgtgttgcgctggattgacgtctgctctggcacacaacccaatactaaggatcccgcatttcttaaggtcagggcgcacatattccaacgcaatacccagggggtgtgggcctgtgttgataaagaatgcagattaaagcacggtacgccgctggaaaagggttggccttttggctatgtgtatgtgaacaaacgccaaaattgcgattgtggaagcccggtttacgagctggcattctgtaatgaatgtaatgagccacatcttctggcgcgggacaaaaagggaaaacttgtccaatgggaaaataaaggcggtgatgagttctctttgcaagatgatgtgcatattgaacatgatgccgcagaagaaaaagttgataaagagagtcgttttcagcccgcactcattatcgccgcagagaagaccagcgcggcgggttatacccaacagcgtctggaccgtcagacgcgtcgtattggtgttattaacaatgacagcatcccgctagttattaacgacattgaacaagtatgtagtgccagtagctgtggctacagaggcacgagcggaaaacaaccgttccgccgtgccttattaggtgggccattttacgtcaccaatattgtgccaaccgttctggaatattgtcaggattttattagtgaagaaggaaaagagggcgtcggacctgattcgttaccaggtcgaggccgtcgacttattacctttaccgacagccggcaaggaacggcccgcatggcagtgcgcatgcagcaagaagctgagcgcagccgcttacgcggcagtgtggtggaaatcctgagctggcatcaacgaacacagacttctgcaacaccgaatgccaatgccgatctggaaaagttagcgacgagggcaaaacaggcccacaatgaggcgaaagagtatagaagctggggaatgccggaacaagcaaaactggctgaagcgcaagccgaacagcttgaacaggctattcaggccgcgaccggtggcaaagctgcgaccattctgttttcgcggacctggattgaaatggttaatgaacttaaagagaaagccgatattcgcggccctattctgcaatataaccactatctgaagcctgaaattttcaatgagaatggcgggccgctaaagctttctgagatgttgttattccgggagtttatgcgccggcccaaacgaactaacagcctggaaacgcagggattagttcaggttggttatcaggggctggagaagatccataagatgccggtgcattggcaagagaaagggctgacgctggatgactggaaggattttcttaaggttacgctggatctgtacgtacgtgaaagcaacttcacacaactggacgatgagttgaaaaactggattggtagccgtttttcatcgaaattcgtccgtaacccggacacaaaagatcccgaagataatcagaacagacgctggccacaaattcgtaatggcaatatatcccatcgtttagtgaagttattaatgcttggcgcaggattcaaaaccgtaaatacggcgacgatggatattatcaatacgtggctgaaagaagcgtggacccaacttaccggcccacttgcagtgctgaaacctgatggtaaccgtttctatctgccaaaagagcacatgactttttctttaatcacagatgcctggatttgtccggtaaccaataagattctggatacggcctttaaaggcttaaccccttatctgcccacccacatttcgtttgaacaccttaccaagacacaatatgacgcttttgtcgcgcaaaaggtcaccatgccggaaatctggaagctggatcgttcgcaagaagactacgctccgggtctggcgaaggtacgtgactgggttagtaaagagccactaatcgcacaattacgttcggaaaacgtctggacggatattaacgatcgtgtcgtggaaggcggattttactaccgcacagccgagcactctgctcagcaatcgtcagaacgtttgcaaagctacgaaaagatgttcaaaaacgggcagcttaatgttcttaactgttctaccaccatggaaatgggggttgatatcggtggcattaccgccgtagtgatgaacaacgtaccgccccatccggctaactatttacagcgtgccgggcgagccgggcgtagtcaggaatcgcgtgcgatctcttacacactatgtaaagggaacccgcacgatcaacaggtttttgccaacccactctggccatttgagaccatgatccccgcgccaatggtggcaatgaattccgcccggctggtgcaacgccacgtcaatgcgttattactgtccgactttttatgtcacgtcattggcgaaacagataaagaaaaaaccagtcttgatagcctctggtttttcggtgaagacgacgggcaatcaaaatgtgaacactttaaagtctggctcgagcgtccggttcttgatatcgacgcggcgctggaacggctggtgaaaggtacagcattacatggcgccagacccgacctgttgcgggataaaacaatccatgcgattacgttcctgcaacagcgatggctttccgtctaccgcgatcttgtagcccaggaacgagaatcgcagccgcaaacgccttatcgcaagcgcatagaactggagaaaaaacgacactgtggcgagtatttgctgcgtgacctggcggccaggactttcctgccgggatacggcttcccgacagatgtggtgacgtttgataacttcactatggaagactatatccgtgaaaaatcacagaaaagccgggataaaaaagatcgcgaagataatgtgtcacgttataagggacttccctcgcgtaacttgggggttgccatccgtgaatatgcaccaggtgcagagatcatactggatggccgggtcttccgctctgctggcgtctcactgcactggcacaatattaatgccgataccaatgaagcccagcgtctggattgcgcctggcgctgtcacaaatgcgggaccataggctatgaagaggggttgagcagttccgggacgctattttgcaccaacagcgcctgtggtgaaaaaatcatcatggataatcgtcgccaggtgctgcagccagccgggtttgtaactgatgcacacgcgccggtgacgaacaatattgaaaccatgaaatttatcccggttgtccctgcctgggtatttgttaaagcagaacccgtatcgctacctaacccgataatggggtatatggcatctggcgctgatgggcatgttttccagcaaagccttggagaaggtgggcatggttacgcactttgtctgagctgcggtcgcgcagagtcgatgttgaacgcaaacgatgcgccgaaaagtatggaagcccactacccgccgcgtccgggaaaagcagatcgcgacagccagaatcaacgtctaatttgccccggctcaacggcgctcatgaagaacgtcacgctgggggcattggcacgaacggatgtctttgaaatggttctacgcaagccgcaaaacggtgaatatctcccggatagcacggaagaagggcggattgttgccatgactctggcggtagcactacgtcaggcgctggccggggttttgggtatctccgcggcagaactgggctacgccgtgcgtccggtcagactggaagatggacaatcagtattagccgttcaactctacgatgtgattagcggtggtgcaggttttgcatccagtgcgccaatgcacattgaggacattctgttgggaatggtgaagcagttgggttgccaccactgcgatacggcatgcagtgaatgcctcctcgactcccagactcgccacgatcacgatttgctggatcgtaaagcagcacaggcatggcttggtgatgacttctcgtactacatcggtttgccggatgatgaaacattctcgctaccggatgcccgatattgcccgggagccattggcgatacccttcgtcgggcgattaacgagggtgctgaaaaactcacactgtggatgaatgggccactcaatgagtgggatctttatgcccgtcaattccgggcggctattcagaactaccggattaaagacaatgttgcggtcgaccttgtcattcctgctggcgtcgatgatccggagctgttgcatgagctttcgcagtttactgctttgggcgtgcgtttgtgtcatagcgaacaggctctggaattgccgattgttgcgcaagtcgcctttgccgatcgcgtaatgacgctggcttcacgcagccagcaggcaactatcccagggccaggctggcacctgaatgacgaactggtcgttcgcagcctcggctataacacggtaaaactgaacgagtttgttttgccggggaaagcagcgaactctgttgagcgtgtcaaagacatagagattcataaacagttaaatggtgcactttcgcagttcggacaacgcttctgggacacgctgtttaacagccatgaagaagcacaatcgctgatgaaaaaccagcgaatcaccagcgttcactataccgatcgctatctgcaaaacccggttgcgctggcactgctgggggcgatactgaaaccgctaaaaacaaagctgaccgatgacgcggagcttgagcttgatactctgtttaagcccaaggatcgtcccggcaaccggccgttccatgactggatgagcgatgcggattttcaggatttcgccgaccagtggtttactgcggcaatgggcagagcggtagaactgacggtgttcgattcgccacgtgatattccacatcatcgtaagctgacggtgacctttgaagatagtcagatgttgaagattcgcttcgaccagggaatgggatactggcgtatcgacttcccgtatgcatggcgtaactttgactttactgatgatgtgacttatcagctagtaaaactggcgcaagcctgccaggagggcaaagtccttaatagcgaggaaagctgggcaacggatgtgctggtagaggtgatgccgtcttaa

SEQ ID NO: 29677 - DNA, 3288 bp, Klebsiella pneumoniae KP-7; identical to SEQ ID NO: 29675

SEQ ID NO: 29678 - DNA, 6327 bp, Klebsiella pneumoniae MGH 18; identical to SEQ ID NO: 29638

SEQ ID NO: 29679 - DNA, 3354 bp, Klebsiella pneumoniae MGH 18
gtgaaaactccagttaacccacttttgcgatggctcaatgcgttttttagcagtcgttcattacccggagctgatgggagggcgctgtatgcttaccgttgtcatgatgcagagtatgaaagtttggctgctcttcttcgtgcccatgttccacgtaactaccccaaaaccatattcatttcttacagtgatgttttgttcagcatatacgccgctgagtttatccgccgtaaccatactgcaggacatccaagatgggacgttattttagaatcgattggctggaaggtaccttacgcacatcggcaaaagctggtaaatgatgggattcgttactggaaaagaaaggtgagaagtctgggtcaagcatcgggttatctgcatactctggcttgcgaaggcggtttgcccatccggatgattgaaaatgaaagtggctatttaataacctatttcaaacgagtttatcaggcactacgtgggcaatcgtcaaggcgtcctgcggaaataatcgcacaagaactgggcgacactattcctgcgacaatgcaaaatgaactcgtctatgaaatagctggtgaattttgcgagacacttcatacgttactcaatgagcatcccactcatggtcaggaccccgtttcctcactacgcaaacaatatcctgactggcatcttcaacttccgttggtactcccggaagagaatgcctcagagattgtaagacgattactttctcaatcttcagagccccgtatatcaagcaatgtgctggttgaaaggatatgggttgatgttgatgacagttggtattgcgatgcccggtttcgatttccggccacaatgcgtactgaacagttaatatccctgtttgaaagcaatattcagccggaacagacacgactcatcatttctgcaaaatggagaaatggtggggcccggttggcaatgctaagccgttatgaacagcaagattggcgagtagagttattacccttcgctatgcaaaaactctctggggcagatgcgatgaccgaaatatcgttgtcgctccatgaagggccgattctgctaggtcacgtaattcccaaagggggttatgagcttaccgaagatttaccatgggtttttgaagcgatgaatgagagcgagtcgcagttaaaacttgtcggcatgggctctgttagttccaggcaaaactctctttttatttcgctaccgacaaatagtcatttggatattagtggagaaggtgagtttgatatcccgaggttgctgaaaaatagtgaacgtagcttaactaaaataagcggagtattcagcgttgttttacatgatggcgcagtttgtacgattcgcacgcagcaactttatgattctgcgattgagtattatataaaaccgacagagatcgatctggtaaaatctgattatcctgtccatcgtgcttggccaaagatcggctggaaaaaggatatgcagcatggcattgtcccagagaacgaacttttttggcgatccattcgttcaggtaacaactcctggttttctgtcgcatcagtaatgccgaaagggcagatagaagtcaggcgaatagtcaatggtgaggttttatttagcggtaaagttgtgattctgccagcagatttcgatattcaaattattcccgagactgctcagcaaggagttattgtactctctggtataacggatgcaagggttgataaatattcaaacaatgaaaaagtaacacttaaatcagattatttgcaaaacgagtgtgttattgattgtaattcatcacagatgctagagagcaccatcaatttacgagtatcctggaaagatggttctaatcttaaattgttattacctaagcccgttagcggtggacggtttgtaagtaatgatggttctgttcattttgacggtgttgcatctatagcacatttgcatggcgtagacgctgagctgttaacaatatcttgtgccgggaaaggatatcttaatatcgagttgttggatgaaaacccgatgtctgaaaaatttcattatttacatgcggatattccattgttatctggccgtaatgaaaaattgcaacagatttcactttatgagaattataatctgctgaacgccatgcttgtatgtgcatggaaaaatgatagtacattacgtgttgatttttactctgacagatttggtaaggacaaaacaacactcaatattaaacgctacgatggccgttttattgagggtgatgaaagattgctggttgatataaaagattctattgtttttccttatcataaaatagacgacatggttgttgaagccatttctcttaatactcctgacttatgcacagtcctgctgaaaaaagatgagtctggttatgatttctcgacgttgaataatcaaggtggcccatggttaattgtgggtaaaattgatggtgcaattcgtattgcaccagtgattaaatggatgctacctacattacagacagatgatttatttctaaatgctatatgcaacgcatcgccagaacaacgcaaggaatattgtaatgcgctgtttttggaaatgaaaaataatcctttgcaaaacacttgttatttgttggttgagtacattaaaaaatataagttgaataatagcttgcctttgctggaactggatttatttagagaaatttcgagtaattattacgtggttgttcagttgttaatatcatcatgtctttctggggatagtgatgctatttatgatatacaggaggaattacccttctcatggggatggattcctgtttcaatatggaaagatgtctttgaacagtgttggtattctctggaaaaacagattaatgataaggcatttgcattaaatatactacagccatttattgcatttataaatcatcaagcgcatatcgatcgtcgattagttcccatcgctaatatgttgcttacacatagtgagatattacctgcaggttgcactgtattgccatctgtaagccgcgagcagtttaatgatgccaaacagatgttattaagaaacccagatagttttggacgtgtcagcattttttctaaagagctttgggatagtgctattactccagaccttaaatctgtttttaataaattttggatcgaaaacacatatcacactcgttttgaaaaacgttttaatttgatgttagtcgcggcgctgctttcccaaagaaacaataaacttatgcatcagctaactgcactttttgaatttcactatcagcaagccccgcagcaattgggagttatctatcagtattattttgaacaagcaggagtatgtcattga

SEQ ID NO: 29680 - DNA, 6321 bp, Klebsiella pneumoniae MGH 35; identical to SEQ ID NO: 29620

SEQ ID NO: 29681 - DNA, 3288 bp, Klebsiella pneumoniae MGH 35; identical to SEQ ID NO: 29621

SEQ ID NO: 29682 - DNA, 6321 bp, Klebsiella pneumoniae MGH 46; identical to SEQ ID NO: 29614

SEQ ID NO: 29683 - DNA, 861 bp, Klebsiella pneumoniae MGH 46
atggcgtttcgcccctgcttcattcgtggggaaccgtcgttacctgtggatgaaagtagtattcgttcattgcagaaagcgacccagctttttaatccccagtctgaagttaataccattacactggtacttgaacagatggctaacgatcccgctcattccggctggcaatttatgcgttgcctgtacgaccaatttggttatctgccgctggcaacctttgaagtttggcgtgcgctagtacagcatccacgagcactggcgatgtcgctatttaaatttgagatgtcagctgagtatctgagccgcattgaaaatgagttccctattttatgggagttcttccccatcttcgaaatcaaaactgcagccgatcgatttaaattgttcctgagccaaaagggtgcaccggaagaaacccagaatttactggtgaagagcttgtatcagcgattggggctcgtttttccgacatatgccgacgaaattgagaaatggttaagttatggacaattccctccgcccattccagagttcttcattcgcgagtggtatcaggagcttttacgtgagcatagtgaagctcgctggccagagtacggcagcaagcggctgcatagctggatgacatcacaaaaaaatccagtgatcagcattaatcctgacgcagaataccgctattccgttgcctggttacccgtcttcgccgcagctgtagcaagcggcaatacctcttttgaagccgtatttgaccgtaaaccgggtgccgtatttttcctgagacaggtcagggacttcgattcccgctggtttaaggccatcttccagtgcagcctgttgcgttattttgctcaaaaataa

SEQ ID NO: 29684 - DNA, 6327 bp, Klebsiella pneumoniae MGH 74
atgaacgttcagcaactgcattatgcgccacttctaaatcagcttcatcagcgtgcggtgaggtcggtggtaagtcagctggcattgcggagcaagtcgttgagtcaatatctggaatctcaatatttccagcctccaggtctgggggggtcactgcttgcagatccggtattcgaaagtacgtttggctggatgcccgcggatgaaacaatggaggatttgcgtgacaaactgatctccagcccgctggttgatgctttgagcaatgcgccagtgccgtttcgtcatcagctaactgcgtggcgaacgattcttgaagacaagcagtccctattagtgagcagtggtacagggtcaggaaaaacagaatgttttatggtgccggtgctggaagatcttattcgtcagcaaaatttgacccggcagtcactaacagggacgcaggctattttcttgtatccgttgaatgcgctaataaatagtcagcaagagcggcttcgcgagtggactcgcgggtttaaagggaagatacgctttgcgctatataatggcgaaacccggcataccaaatatgaagttcaggaagaccagctcaaagtacctgaacaggcattgagtcgggaagccatttatgaagccccaccgtccatcatggtgacgaataccacgatgctggaatatatgctgattcgtcgcaaagatgcccctgtcattgaaaagtcccagggaatgctgaagtatatcgtccttgatgaggctcacagttatattggctctcaggcagctgaattagcgctgcttttacgtcgcgtcatgcaggccttcaatgttggacctggtacagataaacctgtgcaaatcattgctacctcggccactattggtgaagattctcctgaaggtaataaagaacttgctaaatttgttgccgatctcgcgggggtcacagaacgtgatgtaaaagtagttcgcggctatcgacaaataccgccgatatcggagtctcttattcgtcatgaatatcccacatctttagcatctcttaactcactaagttctcaggaactttaccaacagctgtgccattaccgtgtggcccagcaattgcgtcaggcgttaactcgccccggacgcctggcggtacgtttgagtgaattgctcaatgttgccagaagaacctggccagacattaatcaccgtgagctgctgcagcttctcgatctgatggcgaaatcgcgagagggtgaatctaaattttcactagcttttacgccattacgtatgcatgggtttatccgaacactcgcgggcctatgggcatgttcaaataaacaatgcgcacataaagcgagtgaattaggtgagagtgactggccatttggtcaggtatggtttgaacaacgccaatattgtgactgtggtgcgcctgtatttgaaatcttacgttgctccgggtgtggttcagcttatttgtctgccaaggaggaagtgcgcggtgatggaacgagctggttggtggcgcaacctgctgctgccgaagaggatgagtttgctcttgatctcgatgtttattctgaagatgaagataacaacgaattagaaaataactcccaatttgatcgtcttatagcgagcgatggtgaaaaatatatcatttcactggaggaagcgacggcgggtaaaatcgaccgcgaggcgcaaaagcactatgagataaatctgctaagacctgaatctcgaggtgagggacgcaataattcctttgcttgtgtttgttgtggtgacacccaacggaaaaataatcctttgttccgtccgcttcgactcggtgcacccttttttttaaatgaaattattcctactctgcttgaattttcgcctttaccgcaaacaagagaagagcagttaggaccgtttaatggtcgacgtttgctcacctttacggattcacgtcagggaaccgcccgtatctctgcccgattacagcaggacgcagataaagctacgttacgaaccctttgttatcaggaactggcaaatattaatgagccatcagtaaagctcagtccggcacattgtgcattattagagagttttattacccagttttctatccctccgttaaaaaattccatcgacgcactgagaaaagcgatggtttcgaatgagaagcttagcccagcagacgttcaggcgcttagaattatcgagccgatggttagttccttaagtcaggaacatgctgaagcaatgcaaatactcctcgtcaattcaggcaatcagcagaagaaaaccatgtcgtggcatactctgtctgaacaacttgttggcagtgtggatcttgcggacagaatgagaggcagttttaaagacttgtctggacttgagcttactaaacaacagtttgctgatttttgtttatacagtgagtttggtcgccgccctaaaaatgcctggaccctcgaaagtctggggctggtggccattcactatccatttattgataaagtcacaacctgcccgcaggactggaagacattattacccgaccccgataagcaattaccggaatggcgtaatttattgaagattacccttgatttctttatacgtgaaaacagtgccgttttttacgaaaacgaggagtaccctcgctggatgggagcacgtttcccggtaaaaatgctgcaggggccagataaaaaatacaaagggcagaaacgtgatcaactttggccacaaatacgcgatcgtcattataaccgggtcattaagctattaattgctgtctttccggcaatacagcctgagcaggctcactggaaagcgctggttaattacttaatgaatgaggtctgggaagctattcgaccatgcctgcgtcagtttgaatcgggttatcaattggacattaaacaacaagctgaattttacagtccaaagcaagtctggcgttgcccctatactcgccgtgcgttagatgtcactttattgggttattctccgtatttaccaggtagcaaagagatagcacctgaaaaagctgtattgattgaaatgcctgagcttcctgcgcgtcactggcgtttatctggtggtggagaaatggcgcgagaagagcgcctgcactggctggaatgtaatgaacgcattcaacatgctcgggaggagggggtatggtctaatcgcagtgatcgattggccctgaaagatagctggtatcgtctggaggaacactcagcgcagcgaacaccagagaagaaccagtttaatgaaaaacaatttaaagcagggaaagtcaatgtgttgaactgttccacgaccatggaaatgggcgtggatattggtggtatgagtttggtcgcgatgaataacgttcctccggctccggcgaattatttgcagcgtgctggccgtgctggccgtcgcggtgaaagcgcatctgccgccattacgttatgtaaaaacaccgcgcatggaatggaggtattcaaagaccctctctgggcgttcaacaccgttgcgagtgccccacgggttcgttttggtagcagtagtattgttcagcggcatgttaacgcattggttttaggtgcgtttttacgggctgaagttcctgatgcgacaaaactgagttgtaaatggttctttgaaggtgatgagagccagtgtcttcgttttctccattggttaaatcatcaggccgatcagctggcggataaacttaaacgccttacccagggaactgtactgatgtcattgacgccgccacagctcttgactcgtacgcaaacgatgatgcagctggttgatactcgttggagaagccaacttgccatactgttggaaaacatcgaagcgttgaaagcagataacagcgcgtgggaagaaacgccagcaggcaaagcaatcacttatcagcttcgtgattatcgcggtgcttatctgttttctaaactcatcagtgaagcgttcctgccgggtcatggtttcccggttggcgtggtcaatttcaattatctgactgcggatgaactggaaagacgtcgcgcaataaaagccactcaggctgaccctaatgaagggggagaaaacttttctcgccgcattgaaaaactgcccagccgtgacctgcccacagcattacgtgaatatgctcctggtgctgatgtggtattgggcggaaaagtatatcgttcctcgggtattatgcttggtaaagtacttgccagcgggcaggagctgtctggcgatcatcatattccgtggttctggcattgccgtaaatgcggcgcgggagcgaccagcgccacccggcctgtcgaatgttgccactgcaaggcagatatacagcagcttgatgtgaagcggtatttacagcctgtcggtttcgcgacagacattcgttatcaggcacataatgatgtatccatgcctgcgcaacttccctggaaagatcctcgtgttcttgtaccttcttcggtatgggtctccttacccgatgctggactcggacgttaccgttttagtcatagcggggaattgttccactttagtgagggtgaatttggtcatggctacgcaatttgtctttcctgtggccgggcagaatctcaaacccagccccagcgtactccggagaatctaaagaacccggagaaggaaaatacacactacctgttgagaggcggtagtaatgatcggcaggggaacaataaattgtgccacggtcatgttcataaagatctgtggttgggatatagcagccgtacagatatggttgagctgcaactcagtgatgatagtggcttactgatcagggatgatgttgccgcgcgttcccttgcggttgctttgcgtgaaggattagcgcataaattgggtatcgaaaatactgagctgggcgtgacgacacagcaagcgcgcgatatcgatggcttcactggatattctatctttatttacgataataatgctggtggtgcgggttatgcagtgcaattgatcgataattggtcggatgtctttaattacgccagaaaattgctcgattgcagctgtgataaattctgccaccactgcttgctcagttacgacagtcagcattatgtcggcaaattagatcgtcaccaggcattaaccctgctcactaatcttcgtctacagcggcttaatctcgcgccagaatatcagtacttcggagaaagtagtcgggttgaaaccaacccactcagtttgcgtattgcgcaatgcctgaacagcgaggtttatgattcttgctcgttggttcttgctgggtcgcaggaacagtggagttttgcgcaatggccattatttaaagagttactccagtttgcttcctctgggggcaatgttgagttgctgattgccacgcagctggaaaacttagctgatagcaccagacatcagctttccgcgctagcggcgataccgggtgaatgcttgcaagtgaaatctatagacactgcgcaacttgtgcaagggaatgggcacttactggcacaggtcactcgtgaggggcaaacccaacagtgggccgctgccgacagtgccaccgtttcgcccggtgaattatggggacaaagctcggcatcgccggtagtgacgattaaaggggcgtccagaaaaacattctcgggtcagactttgagtgcagaagacttactgccagcattgcccgccggggcggtacgcatcaatctcagccaacaacttgacggtcaggtggaaggttttggttcgcgtttctgggcactgatagctcagcagcatgctgactggaagaaggtttttactaatggacgcgaaattactcacgtccattatagtgatcgttatctcaatagcccatttactgtacgtttgttaggtgaaattttgacggaattggttgaacaggggctggcagaacgtgccgaactcactgtttcagttaaaaagttagagtacagttctcgccaacacgattcactctataacgcatggcttgatgagcaggatcgccagcaagttatgaccacgttgctggaagagggctaccttgggccagcctggtcagggaaaatctcatggttagcaggagataatcagaacaccgatcacggacgtgaactgaccgtgaccttcagcgatggcagtgaacattatgtgttgctcgatatgggactgagttactggcgttgtacaggtgacacattcttcgatttttcaggacgaataccgaatcaggtcgagcgcctggcaacatgccgggcattggttatagccccggataatggattgaagagttatatcatcgcaggctaa

SEQ ID NO: 29685 - DNA, 3354 bp, Klebsiella pneumoniae MGH 74
gtgaaaactcccgttaacccacttttgcgatggctcaatgcgttttttagcagtcgttcattacccggagctgatgggagggcgctgtatgcttaccgttgtcatgatgcagagtatgaaagtttggctgctcttcttcgtgcccatgttccacgtaactaccccaaaaccatattcatttcttacagtgatgttttgttcagcatatacgccgctgagtttatccgccgtaaccatactgcaggacatccaagatgggacgttattttagaatcgattggctggaaggtaccttacgcacatcggcaaaagctggtaaatgatgggattcgttactggaaaagaaaggtgagaagtctgggtcaagcatcgggttatctgcatactctggcttgcgaaggcggtttgcccatccggatgattgaaaatgaaagtggctatttaataacctatttcaaacgagtttatcaggcactacgtgggcaatcgtcaaggcgtcctgcggaaataatcgcacaagaactgggcgacactattcctgcgacaatgcaaaatgaactcgtctatgaaatagctggtgaattttgcgagacacttcatacgttactcaatgagcatcccactcatggtcaggaccccgtttcctcactacgcaaacaatatcctgactggcatcttcaacttccgttggtactcccggaagagaatgcctcagagattgtaagacgattactttctcaatcttcagagccccgtatatcaagcaatgtgctggttgaaaggatatgggttgatgttgatgacagttggtattgcgatgcccggtttcgatttccggccacaatgcgtactgaacagttaatatccctgtttgaaagcaatattcagccggaacagacacgactcatcatttctgcaaaatggagaaatggtggggcccggttggcaatgctaagccgttatgaacagcaagattggcgagtagagttattacccttcgctatgcaaaaactctctggggcagatgcgatgaccgaaatatcgttgtcgctccatgaagggccgattctgctaggtcacgtaattcccaaagggggttatgagcttaccgaagatttaccatgggtttttgaagcgatgaatgagagcgagtcgcagttaaaacttgtcggcatgggctctgttagttccaggcaaaactctctttttatttcgctaccgacaaatagtcatttggatattagtggagaaggtgagtttgatatcccgaggttgctgaaaaatagtgaacgtagcttaactaaaataagcggagtattcagcgttgttttacatgatggcgcagtttgtacgattcgcacgcagcaactttatgattctgcgattgagtattatataaaaccgacagagatcgatctggtaaaatctgattatcctgtccatcgtgcttggccaaagatcggctggaaaaaggatatgcagcatggcattgtcccagagaacgaacttttttggcgatccattcgttcaggtaacaactcctggttttctgtcgcatcagtaatgccgaaagggcagatagaagtcaggcgaatagtcaatggtgaggttttatttagcggtaaagttgtgattttgccagcagatttcgatattcaaattattcccgagactgctcagcaaggagttattgtactctctggtataacggatgcaagggttgataaatattcaaacaatgaaaaagtaacacttaaatcagattatttgcaaaacgagtgtgttattgattgtaattcatcacagatgctagagagcaccatcaatttacgagtatcctggaaagatggttctaatcttaaattgttattacctaagcccgttagcggtggacggtttgtaagtaatgatggttctgttcattttgacggtgttgcatctatagcacatttgcatggcgtggacgctgagctgttaacaatatcttgtgccgggaaaggatatcttaatatcgagttgttggatgaaaacccgatgtctgaaaaatttcattatttacatgcggatattccattgttatctggccgtaatgaaaaattgcaacagatttcactttatgagaattataatctgctgaacgccatgcttgtatgtgcatggaaaaatgatagtacattacgtgttgatttttactctgacagatttggtaaggacaaaacaacactcaatattaaacgctacgatggccgttttattgagggtgatgaaagattgctggttgatataaaagattctattgtttttccttaccataaaatagacgacatggttgttgaagccatttctcttaatactcctgacttatgcacagtcctgctgaaaaaagatgagtctggttatgatttctcgacgttgaataatcaaggtggcccatggttaattgtgggtaaaattgatggtgcaattcgtattgcaccagtgattaaatggatgctacctacattacagacagatgatttatttctaaatgctatatgcaacgcatcgccagaacaacgcaaggaatattgtaatgcgctgtttttggaaatgaaaaataatcctttgcaaaactcttgttatttgttggttgagtacattaaaaaatataagttgaataatagcttgcctttgctggaactggatttatttagagaaatttcgagtaattattgcgtggttgttcagttgttaatatcatcatgtctttctggggatagtgatgctatttatgatatacaggaggaattacccttctcatggggatggattcctgtttcaatatggaaagatgtctttgaacagtgttggtgttctctggaaaaacagattaatgataaggcatttgcattaaatatactacagccatttattgcatttataaatcatcaagcgcatatcgatcgtcgattagttcccatcgctaatatgttgcttacacatagtgagatattacctgcaggttgcactgtattgccatctgtaagccgcgagcagtttaatgatgccaaacagatgttattaagaaacccagatagttttggacgtgtcagcattttttctaaagagctttgggatagtgctattactccagaccttaaatctgtttttaataaattttggatcgaaaacacatatcacactcgttttgaaaaacgttttaatttgatgttagtcgcggcgctgctttcccaaagaaacaataaacttatgcatcagctaactgcactttttgaatttcactatcagcaagccccgcagcaattgggggttatctatcagtattattttgaacaagcaggagtatgtcattga

SEQ ID NO: 29686 - DNA, 6321 bp, Klebsiella pneumoniae subsp. pneumoniae; identical to SEQ ID NO: 29620

SEQ ID NO: 29687 - DNA, 3288 bp, Klebsiella pneumoniae subsp. pneumoniae; identical to SEQ ID NO: 29621

SEQ ID NO: 29688 - DNA, 6249 bp, Klebsiella pneumoniae subsp. pneumoniae PittNDM01; identical to SEQ ID NO: 29662

SEQ ID NO: 29689 - DNA, 2952 bp, Klebsiella pneumoniae subsp. pneumoniae PittNDM01; identical to SEQ ID NO: 29663

SEQ ID NO: 29690 - DNA, 6321 bp, Klebsiella pneumoniae subsp. pneumoniae WGLW2; identical to SEQ ID NO: 29614

SEQ ID NO: 29691 - DNA, 3288 bp, Klebsiella pneumoniae subsp. pneumoniae WGLW2; identical to SEQ ID NO: 29615

SEQ ID NO: 29692 - DNA, 6321 bp, Klebsiella pneumoniae UCICRE 4; identical to SEQ ID NO: 29614

SEQ ID NO: 29693 - DNA, 3288 bp, Klebsiella pneumoniae UCICRE 4; identical to SEQ ID NO: 29615

SEQ ID NO: 29694 - DNA, 6321 bp, Klebsiella pneumoniae UHKPC179; identical to SEQ ID NO: 29614

SEQ ID NO: 29695 - DNA, 3288 bp, Klebsiella pneumoniae UHKPC179; identical to SEQ ID NO: 29615

SEQ ID NO: 29696 - DNA, 6321 bp, Klebsiella pneumoniae UHKPC57; identical to SEQ ID NO: 29614

SEQ ID NO: 29697 - DNA, 3288 bp, Klebsiella pneumoniae UHKPC57; identical to SEQ ID NO: 29615

SEQ ID NO: 29698 - DNA, 6312 bp, Kosakonia radicincitans DSM 16656
atgactacacgctatttttcgacactcattgaacaatcactctctcgctcaacggaagcgacactcagtatattgagtattaccaatccccagttgcgtgagcatcttgcacagcaaatggcagcagaatgcggtgcggaaggttcatttctcgcatcgccggttttcgagcaaacctttggttgggaagagtccgctttcacgatgcgccagctggcaacggaaaaaacgttgctgagtaaagaagtcgtcgcttctctggatagcgaggaaaatggccgctatcgttttggcgcaagctggaagccttttacacatcagttggccagctggaaagcgttgcttgagcagaagcattctattgtggtgaccagtggtacaggctccggtaagaccgagtgttttatggtgccggttctggaagatctctaccgggaactacgtgggaacggtaataagccgctggtgggcgtgcgggcgctgttcctctatccattgaacgcgctgattaattcccagcgcgaacgccttgatgcctggacgcgcagcttcgggacgggaattcgctattgcctgtataacggcaacaccaaagagaaacatgcggccgtcaaaagcgagcaagagaaaaagccaaatgaagtgctttcgcgtgagaagatgcgcgaagaacctgcacctattctggttaccaatggcaccatgctggaatacatgatggttcgccaggttgatgcgcccattattcagcaatctaaagcgcaaaaatcattacgctggatcgtgctggacgaagcacacacctatgttggttcacaggctgccgaactggcgttgcagttgcgtcgcgtaatgaatgcctttggtgttacgccgagggacgtccggtttgttgcaacatcggcaaccattgccggtagcgatgcagaaaagcagctgaaaaaattcttgtctgagctttctggcgtgccactggaacagattgatgtgctgggaggcaaacgcattgtgcctgaacttgaggctagcctgaatcgcgctgtttctctggatgtgctcgaagctattcctgatgctggcgaaaaagaggttagcccggagcgctatagcgcattaactcactcaccggaagcgcgtcacttacgtgaaatgctggttagccagcgggcaatgaaactggatgcgttgaccgcgcgccttaatgaactgactaaacaacgctatagccagcaggacactttacgctggattgatctctgttccggtacgcgtcccaatgaacaggatcccgcttttctcaaggtcagggcgcatattttccagcgcaatacacaggggctctgggcctgtgctgacaaacactgtgcagcgaagcacggcacggccctggagaagaactggccatttggctatgtctatgtaaaccaacggcagaattgcgcatgtggcagcccggtatttgaactggcattttgtaatgagtgtaatgaaccccatctgctggcccgagaaaaaaggggcaggcttgtccaatgggaaaataaaggtggtgacgagttctctctgcaggacgatataccggaggagattgagccggttgctgaaaaagtcgaaaaagagattgtcatcaagactccgcacattatcgcggcggaacataatgaagccgctggctacacgcttcaacgtcttgatcgtcaaacgcacagtatcggtgtcgtgcacgataacagcatttctcttgccataaacgacatcgatcaggtctgtagcgcccagggttgcggctaccggggcgtaaaaggaatatcacctttccgacgtgctatcctggggagcccgttttatgtcacgcatattgttcctacggtgcttgagtactgtccggattttgccgggaaaaatgaaaaaggtgatggtcaacaaactctaccggggcgcggtagacgcttaattacctttaccgatagtcgccagggcactgcgcgaatggcagtgcgcatgcagcaagaagccgaacgtaaccggctgcgcggcagtgtggttgaaatcctgtcgtggtatcagaaacaacagtcgacaggcgatgttgttgctgccgatattgatccgcagaaattccgtgaactggccgataaagcccgcaaagaagcaaaagagtaccgtgatatgggcatgccgggtgaggcggcagaagcggaggaaaaagcgctgcgttttgaacagcgtctgaaacaggcattgggcgaaaaagtaagtgcgccgttggtgtcactcagctggcgagagatggttggcgagttacaaaaaacctttgatatcaaaggtccgatcctgcgttacaacaaataccacaaaccggaaatttttcgcgagcatgatggcccggtgaaattatcggaaatgctgttatttcgcgagtttatgcgccgtcctaaacgttccaacagccttgaaacccagggactggtgaagatcggttatcaggggcttgataaggcgcagattgttcctgaccactggcaggaaaaggggttgtcactccaggattggcaggatttcctcaaaatatccctcgatttttatgttcgcgaaggcagctatattcagctggaagatgactggcggcagtggattggtagccgttttgcgccgcgttccttgcgcagccctgaatcagatgagcatgacgaatatcagatcaagcgctggccgcagattcgccatggcaatgtgtcgcagcggctgatcaagcttttgctgctgggcgccgggctgaatgtgaagagaacggctgatatcgatttggtgaatgcctggttgaaagcggcctggaaggcgctttccgggaatcttgctgtgttacgttcggatggtaaccgcttttacttgccgcgcgagcatatgactttctcgttggtgacaaaagcgtatatttgcccggtaactaataaattactggacacggctttcaaaggcttaacgccttacctgccgacgcatatcgattttgacaacctgagcgatacacaacggctgtcgtatcacgcggagccggtaatgttgccggaggtctggcattttgaccgttcgcaggatgattacgataacggcattagcaaaatcagacagcaaagtgcggcagacgatctggtgcaaaagctgcgctcacagaacttgtggaccaatattaacgaccgggctattgaaggcggcttctactaccgcaccgcagaacactcggcgcagcagtctgctgaacgcctggaagagtacgaaacgatgtttaaagagggcggcattaacgttctcaactgctcaaccaccatggaaatgggcgtagatattggtggtatctctgccgtggtgatgaataacgtgccgccgcaccccgccaactacttacagcgtgccggtcgcgcgggccgtagtaaggaatcgcgcgccatctcttataccctgtgtaagggtaacccacacgatcagcaggtatttgctaatacgctctggccgtttgagacgacgatcccggcgccgatggtggctatgaattctgaacgtctggtgcagcggcatgttaattcgctgctgctctcagaattcctgtgtcacgtgatcggggaaacggaaaaagagcgcaccaatctcaacagccagtggttctttggcgaagagcatgaacaatccatctgtaatcgctttaaagtctggctggagcgtactaccttaccggtcgatggcgcactggaacagttagtaaaaggcactgcgctacacggtgtcagccccgacaatctgcgccgaaatacgctcgggtccatttcttccctacagaaacgctggcttgatattttccaggatctttcgcggcaggaacgcgagtcgcagcccgatacaccgtatcgtaagcgcctggagatggagaaaaaacgacactgcggcgagtatctgttgcgtgatctggcggcgagaacattcctgcctggctatggcttccctaccgatgttgtcacctttgataacttcaacatggaagattacatccgtgagaaaacattcagaagccgtgataagagcgatcgtgaagacaacgtctcgcgctataaagggctgccttcacgcaacctgggcgtggcgatccgtgagtacgcgccgggtgcggaaattattctcgatggccgcgtgtttcgctccgccggtgtctctctgcattggcataacctgaacgcagataccaatgaacctcagcggctggatgttgcctggcgttgccataaatgcgggacgctggggtatggagagggaatcagcgggcagggcgaactgttttgtaccaatgctgcctgcggcgagcggattatttctgcaaacaaacgccaggtattgcaaccagcgggctttgtgaccgatgcctactatccggtaaccaacaacatcgaaacgatgaagttcatccccgtggtacccgcgtgggtgtttgtacaggcagaacgtgtaccattgccgaatccgctaaccgggtttatggcgtccgggcctgatggtcgtgtattccagcaaagtatgggtgaaggtggacatggttatgcgctgtgcatgatttgtggtcgcgcggagtcgatgattaacgaaactgatgcgccaaaatcgatggaagcccattatccgccacgcccgggtaagggagatcgtgatagccagaaccatcggttgatctgcccgggttccacagcattgagaaccaaagtgacactgggtgccgtagcgcagacggatgtgtttgagcttattctcaggcgtccgcagagcggcgagtatattcaggatggttccgacgaaggtcgcagcgttgcaatgacgctggccgtcgctttgcgtcgcgcactggccggtgtgctgggggtttccgccgcggagctgggttattccattcgcccggtgaaactggataacgaacagtctgtactggccatccagttgtatgacgtgattagtggcggggccggttttgcctccagcgcgccattacatattgatgctctgctgagaggcatggtgaaacagctcggctgtagccattgcgatacagcctgcagtgagtgcctgctcgattcgcaaacccgtcacgatcacgatgcgctggatcgtaaagcggcgctggcctggttgggtgaggatttcacacactatattggtttgccggaagaggaaaaactgtcgttggtagatgcgcaatattgccccggcagcatagaagatgccattcggcgcgtgatcaatgaaggtgccacatcattgacggtgtggctcaacgagccgctcagtgagtgggatctgtatgccagcgagttccgcagggcgatcctgcgttaccggttgaccgataatctgggtgtgacgctggtgatcccggccggtattactgatgccgacgtgttgggcgagcttgctcagtttgccgctacgggcatacgaatttgctgcaacaaggtagcgttgacggtgcctgttatcgctcagttgctgcgtggcgagagcgttataacgctggcaacgcgtgacatgcaatcggccattcctggttctgactggcaccaaacgcaggccctggttgtgcgttcgcagacatttgcgccggtcgagctggacgcggtggatctggcacgctggagcgaaccggcaggcgagcgggtaaaagatctttccctctctactgaactgaatggcccgattgcgcagtttggtcgccgcttctgggccgagctggaaaaagccaatgaagagactgctgcgctgctgaaaaacaatcagataacgcgtgtctactacaccgaccgctatattcagaacccggcggcgctggtgttgctgggttcgattatgaatcagttgaaaccgcgtctgagcggccatgcgcaggtcgccatcaatacgctgttcaaagcgaaagagaaaccgggcttcaaggcggcacacgactgggcaaacgaagatgattttcagggatttgctgagcagtggtttaccacgctgatgggcaagccggttgatgtcacgctgaattactccaaccgggatattcctcatcatcgtaaactgctggtggagtttgataacggcaaagcgctgaagatccgtttcgatcagggaatggggtactggttcattcagttccgccctgacagttataactttatggctgaagtagaggatcagatcttcaatatggcgcgttcgctggaacaagcccgggtcagcaataaagaagagcgctggccaacggatgtgctggtggaaattcagcagcagtaa

SEQ ID NO: 29699 - DNA, 2994 bp, Kosakonia radicincitans DSM 16656
ttggatggtttttgggaacgtccaattcgtttttatgaatcggaacgtcgtaattttctggggtcacttttcagtgaaggtggtctgcctttcaagctgctgaaagaaacggatagccgcttccagtctgttttttcccgtattcttaatcaatacgaacaggcctcatcgctggggtactcaacgtcgatgttggttcaaatgatggttgaaaaatcatcgcttcctcaaggatttcgggaagacacatccatagaattcatcgcccggatggctgaacaactcatttcgttggtgcaactctatgagctcagcacccatgctgaaccggttaaagagcttgagcgcgtacaccctaaatggcgcgacagttttcccatcccccttgacgatgatacgggaaccagctttctcaacggcttgcttcgcactgcatcggtggaaaataagccccggcagcgcaaaagtaagattattgaatgctttttttcctggtcagagcaaaagcccgatgccttacatacctacatttcactgccggaagaaatggtttttccattattgagtgaaccttcgactactcgctttgaactggcagtgtgtgaagacggggaagacatggtcagcctgggaagcgcttacgccacgcttgagcatatgcaagccagattacggctgcgcaaaagtgatgttcgttttcaccggcgtcgtcctgccaccacattgtctctggtcgcccgggctggtggggtgattattggcattgtcaatattgctgagagtgaaatcccggttggcgatgttcctcttgtctttgtgcgtcagggtgatgactggtccttgcaagggattgcctcatgcagtgtccgcagtagcgacatgctaatcattctgccggaaggtgggacgctgtctgctgaaaataccccctctgattttacctgccgggctttcggctaccctgctttagtggtgcaaggagggcaggatatcctcattgagggtgaggaaacctatcgcatacgtgcggggctggagcaggtgcgcctgccaggtctggagttacaaggtaagcgtctgaactggacgacctttcctgaagaggtgtttcttggcactccgcgagttatgcgaaaaatgggggtacctgaagttcgctacaggcgttttttgagcggtaaagatattgatgtgtgcgagttgcatgacaccatggggacgcattttttgtccatccgcaatgagaacaatgaaacgttactgcgtcgcaaaattggcatattacctgcggattttcaggttgaaattaagagcggtgagcgtgcaaacgaaggaatcattgctatctcgacgcagcacaaatgttggtatgcgttaaaggacaaaacacttgaaataggccgtaagcgttccgggaacagaacggaaattttgatcaaagcggaaggggtaccgccctcatcagtacaattgcaggttaccccaagcttgatggaagcgcccgttgggattgttatgccttttccctcaagtggctgtcttgcttttgatgccgaaggtcggccgctggcaaaaaatatcaccattaccgatttgctgggctctcgagtgttcctgtttggcaaaaatggagaaccgacccgctttaccctggaactacgcttgcgttccaacagtgggcagcaggcatggcatgaatggcgttataacgccggtgaacgcccgcttgaaattaatctttacagcctgaaagagcatattgagaacttactttccctcggttcagggattgatcagattgtggatatgcggattagcggcgtaggcggtaccggcaactggcaaatccggcgctacaaatacagcctggaatatgatccggcctcacagatactgcgttccaactcgattcacaatgcatcagggaaagtgccttcgccagttatcatgttgctgagcgaaccagagcgaaaatccattcctctgacatcaagaatgagtgaaggtgtcccggtcggtgaatttgagctgggctcaattgtaagtaaaaacggcccctggctggttctgccgaaacctggcgaagaaactgcattccgtccctgttttattcgtggtgaacagttgccagaagcggaagccggtacgattcactccttgcaaaaagccactcagcttttcaaacctggtgctgaggttaataccatttccttggttctggatcagatggcgaacgatccggcgcattctggctggcaattcctgcaaaatctttacagccagttcagttatttacctctggccaccttcgaggtctggcgtgcgttatttcagcatcctcaggcactaacgctctccttgttcaaatttgaaatgtcggccgaatatcttggacgaatcgaatctgaattccccgtgttttgggagttcttaccgatacagcaaataaaaaatgcagcagcaaaaatgcaggcctttatggtgagcaaaggcgcatctatagaaatgcagagtaatttcctgaataaaatgtatcaaaggttgggaatgctctttcctacctatgccagcgatgtgcatagctggttaagcgagggaaaggccccgaggcttttcccacaaccggtcatgaaagagattattcagggctggtatcaggagttacttcgtgaacacggggaatcccgctggccggaatatggcggcccacgtctctctcgctggatccagtcgcaagccgatcccattattgaaatctcttccgatacacattttcgctatgccgttgcatggctgccggtgtttgccgccgcagtagccagcggcaaaaccacctttaccagcgtttttggcaatgaacctggcgccgtatttttcttacggcaggtgagagactttgactctcgctggtttaacgctttgttccagtactgcttgctgcgtaacgttacggaaaataaaaatgactacacgctatttttcgacactcattga

SEQ ID NO: 29700 - DNA, 6312 bp, Kosakonia radicincitans UMEnt01/12
atgactacacgctatttttcgacactcattgaacaatcactctctcgctcaacggaagcgacactcagtatattgagtattaccaatccccagttgcgtgagcatcttgcacagcaaatggcagcagaatgcggtgcggaaggttcatttctcgcatcgccggttttcgagcaaacctttggttgggaagagtccgctttcacgatgcgccagctggcaacggaaaaaacgttgctgagtaaagaagtcgtcgcttctctggatagcgaggaaaatggccgctatcgttttggcgcaagctggaagccttttacacatcagttggccagctggaaagcgttgcttgagcagaagcattctattgtggtgaccagtggtacaggctccggtaagaccgagtgttttatggtgccggttctggaagatctctaccgggaactacgtgggaacggtaataagccgctggtgggcgtgcgggcgctgttcctctatccattgaacgcgctgattaattcccagcgcgaacgccttgatgcctggacgcgcagcttcgggacgggaattcgctattgcctgtataacggcaacaccaaagagaaacatgcggccgtcaaaagcgagcaagagaaaaagccaaatgaagtgctttcgcgtgagaagatgcgcgaagaacctgcacctattctggttaccaatggcaccatgctggaatacatgatggttcgccaggttgatgcgccgattattcagcaatctaaagcgcaaaaatcattacgctggatcgtgctggacgaagcacacacctatgttggttcgcaggctgccgaactggcgttgcagttgcgtcgcgtaatgaatgcctttggtgttacgccgagggatgtccggtttgttgcaacatcggcaaccattgccggtagcgatgcagaaaagcagctgaaaaaattcttgtctgagctttctggcgtgccactggaacagattgatgtgctgggaggcaaacgcattgtgcctgaacttgaggctagcctgaatcgcgctgtttctctggatgtgctcgaagctattcctgatgctggcgaaaaagaggttagctcggagcgctatagcgcattaactcactcaccggaagcgcgtcacttacgtgaaatgctggttagccagcgggcaatgaaactggatgcgttgaccgcgcgccttaatgaactgactaaacaacgctatagccagcaggacactttacgctggattgatctctgttccggtacacgtcccaatgaacaggatcccgcttttctcaaggtcagggcgcatattttccagcgaaatacacagggactctgggcctgtgctgacaaacactgcgcggcgaagcacggcacggctctggagaagaactggccatttggctatgtctatgtaaaccaacggcagaattgcgcatgcggtagcccggtatttgaactggcattttgtaatgagtgtaatgaaccccatctgctggcccgagaaaaaaggggcaggcttgtccaatgggaaaataaaggtggtgacgagttctctctgcaggacgatatgccggaggagattgagccggttgctgaaaaagtcgaaaaagagattgtcatcaagactccgcacattatcgcggcggaacataatgaagccgctggctacacgcttcaacgtcttgatcgtcaaacgcacagtatcggtgtcgtgcacgataacagcatttctcttgccataaacgacatcgatcaggtctgtagcgcccagggttgcggctaccggggcgtaaaaggaatatcacctttccgacgtgctatcctggggagcccgttttatgtcacgcatattgttcctacggtgcttgagtactgtccggattttgccgggaaaaatgaaaaaggtgatggtcaacaaactctaccggggcgcggtcgacgcttaattacctttaccgatagtcgccagggcactgcgcgaatggcagtgcgcatgcagcaagaagccgaacgtaaccggctgcgcggcagtgtggttgaaatcctgtcgtggtatcagaaacaacagtcgacaggcgatgttgttgctgccgatattgatccgcagaaattccgtgaactggccgataaagcccgcaaagaagcaaaagagtaccgtgatatgggcatgccgggtgaggcggcagaagcggaggaaaaagcgctgcgttttgaacagcgtctgaaacaggcattgggcgaaaaagtaagtgcgccgttggtgtcactcagctggcgagagatggttggcgagttacaaaaaacctttgatatcaaaggtccgatcctgcgttacaacaaataccacaaaccggaaatttttcgcgagcatgatggcccggtgaaattatcggaaatgctgttatttcgcgagtttatgcgtcgtcctaaacgttccaacagccttgaaacccagggactggtgaagatcggttatcaggggcttgataaggcgcagattgttcctgaccactggcaggaaaaggggttgtcactccaggattggcaggatttcctcaaaatatccctcgatttttatgttcgcgaaggcagctatattcagctggaagatgactggcggcagtggattggtagccgttttgcgccgcgttccttgcgcagccctgaatcagatgagcatgacgaatatcagatcaagcgctggccgcagattcgccatggcaatgtgtcgcagcggctgatcaagcttttgctgctgggcgccgggctgaatgtgaagagaacggctgatatcgatttggtgaatgcctggttgaaagcggcctggaaggcgctttccgggaatcttgctgtgttacgttcggatggtaaccgcttttacttgccgcgcgagcatatgactttctcgttggtgacaaaagcgtatatttgcccggtaactaataaattactggacacggctttcaagggcttaacgccttacctgccgacgcatatcgattttgacaacctgagcgatacacaacggctgtcgtatcacgcggagccggtaatgttgccggaggtctggcattttgaccgctcgcaggatgattacgataacggcattagcaaaatcagacagcaaagtgcggcagacgatctggtgcaaaagctgcgctcacagaacttgtggaccaatattaacgaccgggctattgaaggcggcttctactaccgcaccgcagaacactcggcgcagcagtctgctgaacgcctggaagagtacgaaacgatgtttaaagagggcggcattaacgttctcaactgctcaaccaccatggaaatgggcgtagatattggtggtatctctgccgtggtgatgaataacgtgccgccgcaccccgccaactacttacagcgtgccggtcgcgcgggccgtagtaaggaatcgcgcgccatctcttataccctgtgtaagggtaacccacacgatcagcaggtatttgctaatacgctctggccgtttgagacgacgatcccggcgccgatggtggctatgaattctgaacgtctggtgcagcggcatgttaattcgctgctgctctcagaattcctgtgtcacgtgatcggggaaacggaaaaagagcgcaccaatctcaacagccagtggttctttggcgaagagcatgaacaatccatctgtaatcgctttaaagtctggctggagcgtactaccttaccggtcgatggcgcactggaacagttagtaaaaggcactgcgctacacggtgtcagccccgacaatctgcgccgaaatacgctcgggtccatttcttccctacagaaacgctggcttgatattttccaggatctttcgcggcaggaacgcgagtcgcagcccgatacaccgtatcgtaagcgcctggagatggagaaaaaacgacactgcggcgagtatctgttgcgtgatctggcggcgagaacattcctgcctggctatggcttccctaccgatgttgtcacctttgataacttcaacatggaagattacatccgtgagaaaacattcagaagccgtgataagagcgatcgtgaagacaacgtctcgcgctataaagggctgccttcacgcaacctgggcgtggcgatccgtgagtacgcgccgggtgcggaaattattctcgatggccgcgtgtttcgctccgccggtgtctctctgcattggcataacctgaacgcagataccaatgaacctcagcggctggatgttgcctggcgttgccataaatgcgggacgctggggtatggagagggaatcagcgggcagggcgaactgttttgtaccaatgctgcctgcggcgagcggattatttctgcaaacaaacgccaggtattgcaaccagcgggctttgtgaccgatgcctactatccggtaaccaacaacatcgaaacgatgaagttcatcccggtggtacccgcgtgggtgtttgtacaggcagaacgtgtaccattgccgaatccgctaaccgggtttatggcgtccgggcctgatggtcgtgtattccagcaaagtatgggtgaaggtggacatggttatgcgctgtgcatgatttgtggtcgcgcggagtcgatgattaacgaaactgatgcgccaaaatcgatggaagcccactatccgccacgcccgggtaagggagatcgtgatagccagaaccatcgcctgatctgcccgggttccacagcattgagaaccaaagtgacactgggtgccgtagcgcagacggatgtgtttgagcttatcctcaggcgcccgcagagcggcgagtatattccggatggttccgacgaaggtcgcagcgttgcaatgacgctggccgtcgctttgcgtcgcgcactggccggtgtgctgggggtttccgccgcggagctgggttattccattcgcccggtgaaactggataacgaacagtctgtactggccatccagttgtatgacgtgattagtggcggggccggttttgcctccagcgcgccattacatattgatgctctgctgagaggcatggtgaaacagctcggctgtagccattgcgatacagcctgcagtgagtgcctgctcgattcgcaaacccgtcacgatcacgatgcgctggatcgtaaagcggcgctggcctggttgggtgaggatttcacacactatattggtttgccggaagaggaaaaactgtcgttggtagatgcgcaatattgccccggcagcatagaagatgccattcggcgcgtgatcaatgaaggtgccacatcattgacggtgtggctcaacgagccgctcagtgagtgggatctgtatgccagcgagttccgcagggcgatcctgcgttaccggttgaccgataatctggatgtgacgctggtgatcccggccggtattaccgatgccgacgtgttgggcgagctggctcagtttgccgcgacgggcatacgaatttgctgcaacaaggtagcgttgacggtgcctgttatcgctcagttgctgcgtggcgagagcgttataacgctggcaacgcgtgacatgcaagcggccattcctggttctgactggcacctgacgcaggccctggttgtgcgttcgcagacatttgcgccggtcgagctggaagcggtggatctggcacgctggagcgaaccggcaggcgagcgggtaaaagatctttccctctctactgaactgaatggcccgattgcgcagtttggtcgccgcttctgggccgagctggaaaaagccaatgaagagactgctgcgctgctgaaaaacaatcagataacgcgtgtctactacaccgaccgctatattcagaacccggcggcgctggtattactgggttcgattatgaatcagttgaaaccgcgtctgagcggccatgcgcaggtcgccatcaatacgctgttcaaagcgaaagagaaactgggcttcaaggcggcacacgactgggcaaacgaagatgattttcagggatttgctgagcagtggtttaccacgctgatgggcaagccggttgatgtcacgctgaattactccaaccgggatattcctcatcatcgtaaactgctggtggagtttgataacggcaaagcgctgaagatccgtttcgatcagggaatggggtactggttcattcagttccgccctgacagttataactttatggctgaagtagaggatcagatcttcaatatggcgcgttcgctggaacaagcccgggtcagcaataaagaagagcgctggccaacggatgtgctggtggaaattcagcagcagtaa

SEQ ID NO: 29701 - DNA, 3288 bp, Kosakonia radicincitans UMEnt01/12
ttgagtcagtctgaactcgtttcagtatttaaatgcaccccctggttgacgaagtttcttactcgtcgtggattaaaaaaagctgatagtaggcctctttatgaatatcatgcaaccagcgatgaatatgccgatctgaaacggcttcttcgggaaatagggcagccagaaaaactaaaaaacgataaaggttatgcagcctgttttacccttttttgctccgaatggtatcgccgggactacgggcgcgactgcaaatggagctgggatcctattcatgcagccctgaatattagtctgtctcattcggaattaggtttggtcgtaccaaaaggattggaaggtttttgggaacgtccaattcgtttttatgaatcggaacgtcgtaattttctggggtcacttttcagtgaaggtggtctgcctttcaagctgctgaaagaaacggatagccgcttccagtctgttttttcccgtattcttaatcaatacgaacaggcctcatcgctgggttactcaacgtcgatgttggttcaaatgatggttgaaaaatcatcgcttcctcaaggatttcgggaagacacatccatagaattcatcgcccggatggctgaacaactcatttcgttggtgcaactctatgagctcagcacccatgctgaaccggttaaagagcttgagcgcgtacaccctaaatggcgcgacagttttcccatcccccttgacgatgatacgggaaccagctttctcaacggcttgcttcgcactgcatcggtggaaaataagccccggcagcgcaaaagtaagattattgaatgctttttttcctggtcagagcaaaagcccgatgccttacatacctacatttcactgccggaagaaatggtttttccattattgagtgaaccttcgactactcgctttgaactggcagtgtgtgaagacggggaagacatggtcagcctgggaagcgcttacgccacgcttgagcatatgcaagccagattacggctgcgcaaaagtgatgttcgttttcaccggcgtcgtcctgccaccacattgtctctggtcgcccgggctggtggggtgattattggcattgtcaatattgctgagagtgaaatcccggttggcgatgttcctcttgtctttgtgcgtcagggtgatgactggtccttgcaagggattgcctcatgcagtgtccgcagtagcgacatgctaatcattctgccggaaggtgggacgatgaataccccctctgattttacctgccgggctttcggctaccctgctttagtggtgcaaggagggcaggatatcctcattgagggtgaggaaacctatcgcatacgtgcggggctggagcaggtgcgcctgccaggtctggagttacaaggtaagcgtctgaactggacgacctttcctgaagaggtgtttcttggcactccgcgagttatgcgaaaaatgggggtacctgaagttcgctacaggcgttttttgagcggtaaagatattgatgtgtgcgagttgcatgacaccatggggacgcattttttgtccatccgcaatgagaacaatgaaacgttactgcgtcgcaaaattggcatattacctgcggattttcaggttgaaattaagagcggtgagcgtgcaaacgaaggaatcattgctatctcgacgcagcacaaatgttggtatgcgttaaaggacaaaacacttgaaataggccgtaagcgttccgggaacagaacggaaattttgatcaaagcggaaggggtaccgccctcatcagtacaattgcaggttaccccaagcttgatggaagcgcccgttgggattgttatgccttttccctcaagtggctgtcttgcttttgatgccgaaggtcggccgctggcaaaaaatatcaccattaccgatttgctgggctctcgagtgttcctgtttggcaaaaatggagaaccgacccgctttaccctggaactacgcttgcgttccaacagtgggcagcaggcatggcatgaatggcgttataacgccggtgaacgcccgcttgaaattaatctttacagcctgaaagagcatattgagaacttactttccctcggttcagggattgatcagattgtggatatgcggattagcggcgtaggcggtaccggcaactggcaaatccggcgctacaaatacagcctggaatatgatccggcctcacagatactgcgttccaactcgattcacaatgcatcagggaaagtgccttcgccagttatcatgttgctgagcgaaccagagcgaaaatccattcctctgacatcaagaatgagtgaaggtgtcccggtcggtgaatttgagctgggctcaattgtaagtaaaaacggcccctggctggttctgccgaaacctggcgaagaaactgcattccgtccctgttttattcgtggtgaacagttgccagaagcggaagccggtacgattcactccttgcaaaaagccactcagcttttcaaacctggtgctgaggttaataccatttccttggttctggatcagatggcgaacgatccggcgcattctggctggcaattcctgcaaaatctttacagccagttcagttatttacctctggccaccttcgaggtctggcgtgcgttatttcagcatcctcaggcactaacgctctccttgttcaaatttgaaatgtcggccgaatatcttggtcgaatcgaatctgaattccccgtgttttgggagttcttaccgatacagcaaataaaaaatgcagcagcaaaaatgcaggcctttatggtgagcaaaggcgcatctatagaaatgcagagtaatttcctgaataaaatgtatcaaaggttgggaatgatctttcctacctatgccagcgatgtgcatagctggttaagcgagggaaaggccccgaggcttttcccacaaccggtcatgaaagagattattcagggttggtatcaggagttacttcgtgaacacggggaatcccgctggccggaatatggcggcccacgtctctctcgctggatccagtcgcaagccgatcccattattgaaatctcttccgatacacattttcgctatgccgttgcatggctgccggtgtttgccgccgcagtagccagcggcaaaaccacctttaccagcgtttttggcaatgaacctggcgccgtatttttcttacggcaggtgagagactttgactctcgctggtttaacgctttgttccagtactgcttgctgcgtaacgttacggaaaaataa

SEQ ID NO: 29702 - DNA, 6321 bp, Legionella pneumophila str. Lens
atgaataaagagtatttttcaaagcttttaccccaaattgcagagcgttctggatctgctgcattaagtcgtttggggttttctcacgtacctctgtataggcatttaaaacaacaattttctagaccatttggtgaagtaggtagctttttggctgatccttcctttgaggcaacttttggttgggaaattgcaaagttaaaaatgtgtgaccttgccaatactcttttaacaactgatttggttcgtgctatggatcaaccgccaaaagaattggcaaaagattatcgatttgcaagcaacctttatccatatatgcatcaattagaatcatggcaaattttagctaatgagatccctcaatcattagttgttgcaagtggaacaggttcaggtaaaacagaatgttttatggtacctattctggatcgattaacacgattgcaccaggagcaaaaaagcagattaataggtgtgcgggcactttttttatatcctcttaatgcattaatcaatagtcagcgagaaagattacgtgcatggacgtatgtgtatggtgaaaatcttcgtttttgtttgtttaatggaaatacaccaaacaaaattccagctcatttaaaacaagaatatccaagtgaagtaatggatagagattctctacgagcctcaccacctccaattttagttacaaatgctacgatgcttgaatatatgcttgttcgtacagatgacgctccaattcttgaaaagtcacaaggtaaacttgagtgggtggttttagatgaggctcatacatacataggttctcaagccgctgagttatccttattaattaggcgggttttacatgcttttggtgtgagtcctgatacggtgagatttgtggctacatctgcaactattggcgatcctaatggtgaagctggtgaaaagcttaaatgttttttagcggatgttgctggagttagtcttgatcgggttcatcttgtatctggtaaaagacatattcccttgctcccaccagaagagatatatactaattcattagaagagttgagtgtactgagtgattcggatacatcaaaagatttgtataatattttggcccgccataaaacagctcgtgatattcgtagttcttttattgagagtgaaaaaaagaacaaagaaaaaggtgggagcggtatggtcgctcgattatctgatgtctgtagaaatatttttggaaatagtgattggtttacccttgaacaacagattaatgcacttcggtggctcgatctattaagcggaacatgcgataaaaatcattctgcttttttaccgcttagagctcatttatttcatcaaactatttcaggcatttgggcttgtgcagatcctaattgcaatgagaagtgtggttctaaattagaggataaagagtggccattcgggcaaatctattttgaaatgcgaaagcactgcaggtgtggtagtccaatttatgaattagttgcatgtgatgattgtgggacccctcacttaatagctgctcaaagaggtgatcaattagttcctcctattaacattaaagtcattgatgaatttgaactagatattgacgcaaatgaagaggagcttaatcaagatgatactaatgttgttaatgatagatacaacgacgcagaatctagcgttctaatagttaatcgaaatattaatggtgtaattgaagaggtaattgacaagcaaacacgacagcttattgagcctactagtggaaatgagcatttacgtttaagagtgttgggagatagtggtagcggccttatttgcccatgttgtcaaggtggtagtcatggaaatcgccatcgaaaactatttcaagaagctcgtataggagctccattttcacttggtattatactacctagcttattagagtttgcaccggatggagatgatcctgcagagcatccatatcgtggtcgtcgccttcttacatttaatgatagtcgacaaggaacggcaagaatagcagcaaaactgcaacaggaatcagagcgagatcgtattcgtggccttgtatatcatttagctttaagagatggcttaatgcaatctgatttcgaagcaaaacagctcaaggatgaaattcaagaattagaaaatatcagggaacatgttaaagaggaaggaaaaacacatattgaaaacctgctagttaatcggaaaaaacagcttgcctccttatcaaaaccaaagccaatctcttttgaagaaatgtcgcaaaagcttactaatcaaagtagtgattttgaacggatgttaagccattatagaaatgatatttcatacgagaattttaaaggtccggaaggttcgctgtccttagctagaatgtttcttataagagagttcgggcgtaggcctaagcgcttaaataacttggaatcaatgggattagtatcagttcaatatccggcgctcaataatattactcgagcacatgaaggctttaatctgattgattggataagctttctcaagattgcattggatttttttgtaagggctggaggctcattagagatccctgaaaaaattaaatcgtggcttggtatgccgtttccacaaactcgtttagttgatcaagatcgcgtagataaggaaaaaactgatagacgatggccaagagcatattacacattacctaatggaaataagaggctaaattatcaaagtactttggtaagaattttagcatgtgctctcaaggttgatattgaaacttcattaggtgcagataaggttgacgctgcattaacttcagcttggagagcattaacagaggggagtggtattctatattctaattctggagggagaagggtattgcctttaagtcaaattgcatttactccgattactaacgcatggatttgtcctctcactcgccgttttttagatactacaatccaggatataactccatatctacctcttcattacacaaatgaaactgtaaaatgccagaaaatagaaatacctctatatgatcaaccttttggtggtgatgctagtgatcttgcccaagtaatacgagcaagagattggttatcaaaacaagagagtattattcaattcaaagaagaaggattgtggcctgttctgaatgatcgcgcaatagagctctcaccttattttgtaacagcagaacattccgcacagcaaccagcctatcgattagatagatacgaaaaggcctttaaatcaggtgatctaaaccttctttcatgttctactacaatggaaatgggtatcgatattggaggtattgcaacagttgcgatgaataatgtgccaccacatcctgcaaattatctacaaagagctggccgtgcaggacgtcgtcaggaagcgcgatcaatttctctcacactttgcaaatctaatcctcatgatcagctggttttttcaaaaactgattggccttttgtaactgcactcccagcccctgctgtatcacttaatagcgaacttattattcaacgacatgttaattctttgatattgaaacattttttttctactcagattactggcagcgaacaagatgttttgaagttaacttgtggttggttcttcatatcagaggataataatagttttgcagagagatttattgcatggtgtatagcatttaatgatgctaatagtagattacttgacggtatacgccaattagttcgacggagtagatatgagggtgttgacgcaaagatcctgattagagagtcaggcaagatgatgcataacttatacacgagttggtttaaagaatgggacgcgttagaacgtcaaaaaataaatatgaaatgccttggagtaaattcaccagcatataaagcagttcaaaaccaactagatcgtacaacaggtgagtacttattaaaggagcttgctacaggaggttttttgccagcatatggatttcctacacatattacagtttttgataatttaactatttctcaaatcaagagaaacaaattagaaaaggaaaagataaaagatcgtgaagataacaattatcggcatagagagcttgcaagtagggaccgaattacagcattgagagagtatgcaccgggcgctgaagtagtgatggatggattggtgtataggtctgctggaattactttaaattggaaaattcctgctactgaaaaagaggcccaagaaattcaagcaattaggtatgcatggcattgtgataaatgtaatcatagtggctcatctttattgttagatgaaactcgattttgcttggagtgtggtactaagattaaattggatgatccaaagtatcataagacctttattgagcctgcgggttttgcagtagattttcttatggatccagataatgatgtatcaacccaagactttatcccagttgagttaccttgggtaagtgcaaatggagagtggatttctttgcctaatcctgcattaggtcgatatcgagttactactcgtggtcatatgttttaccaatcaagtggtttacatggtaaaggatatgcgatatgcctagcatgcggccgagctgagccaatggtagatgaaaatattcctaataagcttcagtcacactataagttgcgaggtggaaatgatcaaaatgaaaaatcgaaaatttgtataggcagccatgaaaattgggcaataaaaccgggtattacgcttgggcatcagtgttatacggatgttctagaaatacagcttaagtccgaattaggcatttggataaaagataaagaaataacaatgactctagccgttgctttacgtagcgctctcgctgatttaattggaattcaaacaaccgagttaggatgtgatgttaaatctgctcggacagaagataatagtatatgccgatcaatattaatttttgataggtatgctgcgggctattcttcaagtgcaagtcaatatattgaaaatttatttagaaaagcacgtaataatttaaattgtccggtcgattgtgatagtgcttgtccaagctgtattttagattttgaccaacgttttgtatcggaaagtcttaaccgtctaactgctttagaggttattacagaaaattggctttctacattaagacttcctgaacgatatcaattttttggtgtaaattctcgagttgaatgttctaatgttgttgaggctgtcttacgcactagcagaaaattccctgaatccaatatcacactctttgctggaggagctggagatgagttagatttcggtgcttcaaatttacgtaacttaatttatcagattgcagcaagtaatcgttcagtatcacttgttattgagaaagactctttaagctcaatggatatggttgaacgacaccttttagcagggttgattgaatacccgggtagaaaaatatccttacataccgtcactgaattacccaaaactaaagatgcaatcattctcgctgaaatttgtataaaaggccagacatataggtggggggtgaatgagcgttcggctataaatatgggtcttttatggggtaatacagacggaccattgattgttggtaataaactagaaccattaaatttgaaattagagtctcttttagtcgaacaacttcgactcagtgatagtaccttgggcgatattgaaattgaaattctaaaagatttagatggctcacttcaaggttttggacagcgcttttggaagttagtatcttcatccagcccaaatgtagcctcattattttctaacacctcattggatatagaagcaatttcatatcacgatagataccttttttctccacttccagttgcattattattggagttgattacaggtatccgtactttagttggaactagtagatggaataatccttttatagagattactactaacaatgagagcgcaaatcttaataaaagaagttgttttatttgggataattggttggatttggaagcacggaatggtgcaattataaactcgcttgattatttaggcatagaagggaaaattaaattgctagataaaaataaatcactacatggacgtatgttggaggttaagttttcttccaattatgttctgactgtgcgactggatcaaggggtatcctattggaaggcaaataattactcaaagcaaaagatttttaattttggtgaccctgatctatcgaatcagggcattcaacttgctgaattgaatgttgatattgagtcaaactacttccctactcacgtatttattaaggtgcgtcaacagtaa

SEQ ID NO: 29703 - DNA, 3393 bp, Legionella pneumophila str. Lens
atggatcatagtcattctgagttttgggagtggaaaaaaggattgtttgctcagctaaatatccccaatgcagatggtcgaccattatacgcttatcgtttgactgagcatcaatttaatgaacttgaaaaattgttgcgcaaaaatttaactaaaaatacaaaatatggaattctagggatgcttgtagattcaagcgctcagttttgtagtctttttgttctttatgcagctgagtggtggcgtcgccgctttgatgggtctagatggtcttgggaacctattcttttggatttgggtgtggataaggatagttggtccgcttcacaacgagaaaattgtatcatagaaggtttaaaaaggtggaggttaaggttatctaatacagatgggttgcgttatttaggtaccattgctgtgcagggaggtctaccgatgcagcttttggccgatgcaaaaggtagtataggtagaatacttaggaatgtgttaaaacttgctactcatggcactgaacttaatattattttaaattgggtagaaagtcttcatgaggaattacccaagagttatcaaaaaaaagatgtctatcttcttttagcagaagtaattgcaattttgctggctctcaaaaaagaagcgcaattaactaatagcctagaagcagtagataagctgaacaaaatcattccaaattggcgtgagcgatttcctttgcctatagatgacaatgagattaaaggtcttcttgagcagttaatacgtgatgttgcatcagaaagaaacgatcgctgtcagcccctattttcagttgaacgttatttagattgtcaaaatgaggaaatatggcaattacgttctactgtttttttaccagataagatttcaacaaatgatatttataaacaatttgacataaatgaagaaattatacttccgcggattctggagattgttatagaggtgtcgaattggcatcgctcagttactgctagacgaattgctgggcaaaatttgtatttcttaaatcaaagtccttttgaattaaaaggtgattttgctgcagatgaacatatgatgagtttaagaacaatggatggtgcacgctggattatcgctcttcgtaatggaagtgagcttaattctggtttgccttgggtatttgaaaaaatgaaagaaacttttccacgtttaattcgccaaggtggtggtggggtaaaatctgtagaggcatttatagctgtaccatgtggttggattttgaatgctttgtctggttctaggtgtattcaaatatcatatatcgaagagccagaaagagaagtgtatttagtaaatggtgaagtaagggttctagatggtttaggtcgattttggacaatcaaaactggaagagcagactccaatgatgaaagtttttattggtcaggtgatagaatgtggggagagtttattcgacctccattggcatttttaggtaaacctaagttgtataaattttcaggtgaaacttcgtatcctatacaagatacaagtgttacatggactcaaggtagaattttaggctttattgaagcttattatgccgagcatcatgaggaaaaagttagatctaagatggtaatacttccaagtgaggcaaaaatagatataaaacctgagagtttggatcatggtgtaatctatcttcgtcattggagggtagcaaatgcaaacctatctaaagattctaaaattgaattgtgtgtgaaaaatgaaggtgattcattagttttgagttgtaattccataacaaatagacctccagagtggtttgaggttaatttgtcctgggaatctaataccgcaactgcgaaggtgcgcttaccatttcctgctaaaggtgctaggtgttttgatccaagtggtgctgtattgccatcagagtcttgggtatcaataaaacatttggcaggataccgtattataataattagtccaccacatgcttttgtggagctttgtttacgcttacgtcatacttctgatcctcataaggatcacgaatttcgtcgtccacttcgatcttttggtagtaattcagtccagaaagaaattcgattacaagattactctgaagatattgagaatttgttggctgcagatgagttattggatgcatgggtagaagcttcaattttaatagaaagacaaacttctcttgtattgaaaatatcacgctatgattgccctctagaacgagatgattcgttaattaaattaggtataaccagtgcaaaaaaattcaatataaatgatattgcttcacttcctttattggccctaaaactcgaacaacctgcagatgaggctattattttaccccaaagatattcagaaggagttcctgttggctcttgggagttttctccctctgaaaaagaacccggatcatggttgatatttccaatggaggggtccgctattttatttcgaccaaccttatgggtggtagctggtgaaactcatacaagcagatcactagctaaggcattatctgttgagaatagacttgatcgtgcgaaagttttggatcaagtaattatggaaatgtcctttaattatcttgatccaaattggtcttattttgagcatcttgctgaacatctggggcatttgccattagcctctcttgatttatggaagcgatttattcgttctccgcaagcaatggcagcacttgctctaagaatgaataaattaccagatcattttcttcatcgcttctcattggagctaccttttatttgggaaataattacctttgaatgttggaagaatgctactgaatacttgaagatgcagtgtattgaatggtttggagaaatatttgcacccaaacaattatacaatcatataactgaacgagtcgcagaatttacaatggtaaatgaacagccagagttaagaaacttgttaggtgtggttaagtcgactgcattaggagagcaatgcagtgagattttaatgatgaagcgcactgggagtgacagtttttttgaacatcaactatttattggtgaagattgcgcgttacaaaagctactacgtgagcatagtgggactcaatggccaaatgattctgaattgttttatttggttaaaaattatcgaaaacatcatgattttcatcaattatttccaactccactagatgaccataaggatggcgttattgggctaccaattctattagctgctcaggtcgcaactagttctattcatgaatggtttaggcaaagtgaaaatatccacaaactaagaacgtataagagatttgatcctgagtggtttgagttagcatttgatttgacaattgcacgtactgtttcatgcggtttaatgaaaatttag

SEQ ID NO: 29704 - DNA, 6327 bp, Legionella shakespearei DSM 23087
atgaataaagagtacttttcaaaacttttacctcaaattgcagagcgttctgggtctgctgcattaagtcgtttgggattttctcacgtaccactttataggcatttgaaacaacaattttcgagaccatttggtgaagtagggagctttttggctgatccttcttttgaggcaacttttggttgggaaaatgcagagttacaaatgtgtgacctcgccaatactcttttaacaactgacttggttcgtgccatggatcaacctccaaaggaattggcaaaagattatcgatttgcgagcgacctttatccatatatgcatcaattaaaatcatggcaaattttagctaatgaaatccctcaatcattagttgttgcaagtggaacaggttcaggtaaaacagaatgttttatggtacctattctggatcgattaacacgattgcaccaggagcaaaaaagcaggttagtaggtgtgcgggcactttttttatatcctcttaatgcgttaatcaatagtcagagagaaagattacgtgcatggacgtatgcgtatggtgaaaatcttcgtttttgtttgtttaatggaaatacaccaaacaaaattcctgctcatttaaaacaagaatatccaagtgaggtaatggatcgcgattctctacgagcctcaccgtctccaattttagttacaaatgctacgatgctagaatatatgcttgttcgtaccgatgacgcgccaattcttgaaaaatcacaaggaaaacttgagtgggttgttttggatgaggctcatacatacataggttctcaagccgctgagttatccttattaattaggcgggttttacatgcttttggtgtcagttctgattcggtgaggtttgtggctacatctgcaactattggcgatccaaatggtgaagctggtgaaaagcttaaatgttttttagcggatgttgctggagttagtcttgagcgggttcatcttgtatctggtaatagacatattcccttgctcccaccagaagagatatatactaattcattagaagagttgagtgaactgggagactcagatacatcaaaagatttgtataatattttggcccgtcataaaacagctcgtgacattcgtagttcttttattgagaatgaaaaaaagaacaaagaaaaaggtgggagcggcatggtcgctcgattatctgatgtctgtagaaatatttttggaaatagtgattcgttcacccttgaacaacagattaatgcacttcggtggctcgatctattaagtggaacatgcgataaaaatcaatcttcctttttaccacttagagcccatttatttcatcaaacgatttcaggtatttgggcttgtgcagatcctaattgcaatgagaagtgtggttctaaattagaagataaagagtggccattcgggcaaatctattttgaaatgcgaaaacactgcaggtgtggtagtccgatttatgaattagttgcatgtgatgattgtggggcccctcatttaatagctgctcaaagaggtgagcaattagtacctcctattaacattaatatcattgatgaatttgaactagatattgatgcaaatgaagaggaacttaatcaagatgatactaatgttgttaatgatcgatacaacgaagcagagtctagcgttctaatagttaatcgaaatcttaatggagtaattgaagaggtaattgacaagcaaacacgccagtttattgagccaactagtgaaaatgagcatttacgtttgagagtgttgggagatagtggtagcggccttatttgcccatgttgtcaaggtggtagtcatgggaatcgccatcgaaaactatttcaggaagctcgtataggagctccattttcactaggtattatactacctagtttattagagtttgcaccggatggagatgatcctgcagagcatccatatcgtggtcgtcgtcttcttacatttaatgatagtcgacaaggaactgcaagaatagccgcaaaactgcaacaggaatcagagcgcgatcgtgttcgtggccttgtatatcatttagctttaagagatggcttaatgcaatctgatttggaagcaaaacaggttagggatgaaattcaagaattagaaaacatcagggaacattttaaagataaagcggaaggtaaaacatatgttgaaaaccggttagtaaatctgaaaaaacagctcgtctccttatcaaaaccaaagccaatctcatttgaagagatgtcgcaaaagcttactaatcagggaagtgattttgagaggatgttaagtcattatagaaatgatatctcatacgaaaattttaaaggtccggaaggttcgttgtcgttagctagaatgtttcttataagagagtttggacgtagacctaagcgattaaataacttggaatcaatgggattagtatcagttcaatatccagcacttaataatattaccctagcacatgaaggctttagtctgattgagtggattagctttctcaagattgcattggatttttttgtaagggctggaggctcattagagatccaccaaaatattagattttggctcggaatgccttttccacaaactggtttggttgatcaagatcgtgtagataaagaaaaaactgatagacgatggccaagagcatattacacattatctaatggaaataaaaggctaaattatcaaagtacgttggtaagaattttagcatgtgtcctcaaggttgatattgaatcctcatctggtgcggataaggttgacgctgcattaacttcagcttggagagcattaacagaggggagtcgtattctacattctaattctggggggcggagagtattgcctttaagtcaaattgcatttaccccgattactagcgcatggatttgtcccttcactcgccgttttttagatactacaatccaggatataactccatatttacctcttcattacacaaatgaaactgtaaaatgtcagaaaatagaaataccactatatgatcatccttttggtggtgatgctggtgatctcgcccaagtaatgcgagcacgaaattggttatcaaaacaagaaagtatcattcaattcaaggaagaaggattgtggcctgttctgaatgatcgagcaatagaactctcaccttattttgtagctgcagaacattctgcacagcaaccagccgttagattagatcgatatgaaaaggcttttaagtcaggtgacctaaatcttctctcatgttctactacaatggaaatgggtatcgatattggaggcattgcaacagttgcgatgaataatgtaccgccccatcctgcaaattatctacaaagagctggtcgtgcagggcgtcgtaaggaagcgcgctcagtttctctcacactttgcaaatctaatcctcatgatcagctggttttttcaaaaactgattggccttttgtaactgcactcccagcccctgctgtatcacttaatagcgaaattattattcaaagacatgttaattctttagtattgacacatttttttgctactcagattattagtggcgaacaagatgttttgaagttaacttgtggttggttcttcatatcagaggataataatagttttgcagagagatttattgcatggtgtatagcatttaatgatgctaatagtagattacttgacggtatacgccaattagttagacggagtagatatgaggatgttgacgcaaagatcctgattaaagagtcaggcaaggtgatggataacttatacacgagttggtttaatgaatgggacgcgttagaacgtcaaaaaataagtatgaaatgccttggagtaaattcaccagcatataaagcagttcaaaaccaactagatcgtacgacaggtgagtacttattaaaggaacttgctacagagggttttctgccagcatatggatttcctacacatataacagtttttgataatttaactatttctcaaataaaaagaaccaaattagaaaaggaaaagataaaagatcgtgaagataacaattatcggcatagagagcttgcaagtagggaccgaattacagcattgagagagtatgccccgggagctgaagtagtgatggatggattggtatataggtctgctggaattactttaaattggaaaattcctgctactgaaaaagaagtccaagaaattcaagcaattaggtatgcatggcattgtgataaatgtaatcatagtggctcatctttattgttagatgaaactcgattttgcttggagtgtggtactaagattaaattggatgatccaaagtatcataagacctttattgagcccgcgggttttgcagtagattttcttatggatccagataatgatgtatcaactcaagactttatcccagttgagttaccctgggtaagtgcaaatggagagtgggtttctctacctaatcctgcattaggtcgatatcgagtcactactcgtggtcatatgttttaccaatcaaatggtttacatggtaaaggatatgcgatatgcctagcatgcggacgtgctgagccgatggtggatgaaaatatccctaataagcttcagtcacactataagctacgaggtggaaatgatcaaaatgaaaagtcgaaattttgtataggtagccatgaaagctgggcaataaaaccatgtattacgcttggacatcagtgttatacggatgttctagaaatacagcttaaaacagaatcaggtacttggataaatgataaagagataacaatgactctagctgttgctttacgtagcgctctcgctgatttaattggagttcaaacaaccgagttagggtgtgatgttaaatccgctcgcacagacgataatagtatttgccgctctatattaatttttgataggtattcagcgggctattcttcaagtgcgagtcaatatattgaaaatctatttagaaaagcacgttataatctaaattgttcggctgattgtgatagtgcttgtccaagctgtattttagattttgaccaacgttttgtttcagaaagtcttaaccgtctatctacgatagaggtcattacagagagttggctttcttcattaaaacttcctgaacgatatcaatattttggtgaaaaatctcaagtagaattttctaatgttgttgaggctgtcttacgaactagcagaaaatctcctgaatccaagatcacactctttgctggaggaactggtgatgagttagattttgcggcttcaaacctacgtaacttaatttatcagcttgcagcaagtaatcgctcagtatcacttgttattgaggaagagtctttaagttcaatggatatggttgaacgataccttttagcggggttgctcgaatatccaggtggacaagtatccttatataccatcacagaattacccaaaattaaaaatgcaatagttcttgctgaagtctgtatagcagatcagacatataggtggggagtaaatgatagttctgcaatagctatggatatattatggggtaatacagaggagcctttgattgttggcaatcaactagagccattaaatttgaaattaaagtctcttgtagtcgaacaacttcgcaccagtgatacttacttgggtgatatggaaattgaaattttacaagatctggatggctctcttcaaggttttggacagcgtttttggaagttagcttctatgtccagcccaactgtggcttctttaatttctaacacctcattggatatcgaagcgatttcatatcacgatagatatcttttttcgccacttcctgttgcattgttattggaattgcttacaggccttcgtactttagtaggaactagcaggtggaataatccttgtatagagattactactaacaatgagagtacaaatcttaataaacgaaactgttttatttgggataattggttggatttggaagcacgtaatggtgcaattataaactctcttgattatttaggtatggaagggaaaattaaattgctagataaaaataaatcacagcatggtcgtatctttgaagttagattttcctccaagtatgttctgactgtacgactggatcaaggagtgtcctattggaaggcaagtaaccactcaaatcaaaagatttttaattttagtgaccctgatctatcgaatcaaggtattcaacttgctgaattgaatgtagatattgagtcaaattcttttcctacttatgtatttatcaaggtgcgtcaagagtga

SEQ ID NO: 29705 - DNA, 3390 bp, Legionella shakespearei DSM 23087
atggatcatagtcattctgagtttttggagtggaaaaaaggattgtttgctcaattagatatccccaatgcagatggtcgacaattatacgcttatcgtttgactgagcatcaatttaatgaacttgaaaaattgttgcgtaaaaatttaactagaaatacaagatatggaattctggggatgcttgtagattcaagccctcagttttgtagtctttttgttctttatgctgctgagtggtggcgtcgacgctttaatggatctagatggtcttgggaacctattcttatggatttgggtgtagataagaatagttggtccgcttcacaacgagaaacttgtatcatagaaggtttgaaaaggtggaggttaaggttatctaatacagatgggttgcgttatttaggtaccattgctgtgcagggaggactaccgatgcagcttttggccgatgcaaaaggtagtataggtagaatacttaggaatgtgttaaaacttgcaactcatagtactgaacttagtattatttttaattgggtagagagtcttcatgaagaattacccaagagttatcaaaaaaaagatgtttatcttcttttagcagaagtaattgcaattttgctggctctcaaaaaagaaacgcaattaactaatagcctagaggcagtagataagctgaacaaactcattccaaattggcgtgagcgatttcctttgcctgtagatgacaatgagattaaaggtcttctcgaacagttaatacgtgatgttgcttcagaaagagacgatcgcagtcagcctctattttcagtcgaacgttatttagattgtcaaaatgaggaaatatggcaattacgctctactgcttttttaccagataagatttcaacaaatgatatttataaacaatttggcataaatgaagaaattatacttcctcgtattctggagattgttattgaggtgtcggattggcatcgctcaattactgctagacgaattgctgggcaaaatttatatctcttaaatcaaagtcctttggagttaaaaggtgattttgctgcagatgaacatacgatgagtttaagaacaatggatggtgggcactggattattgctcttcgtaatggaagtgagcttaattctagtttgccttgggtgtttgaaaaaatgaaagaaacatttccacgtttaattcgccaaggcggtggtggggtaaaatctgtagaggcatttatagctgtaccttgtggttggattttgaatgctttgtctggttctaggtgtattcaaatatcatatatcgaagagccagagagagaagtgtatttagtaaatggtgaagtaaaggttctagatggtttgggtcgattttggacaatcaaaactggaagagcagactccaatgatgagagtttttattggtcaggtgatagaatgtggggagagtttattcgacctccattggcatttttaggtaaacctaagttatataaattttcaggtgaaacttcgtatcctatacaagatactagtgttgtatggacccaaggtagaattttaggctttattgaagcttattatgccgagcatcatgaggaaaaagttagatccaagatggtaatacttccaagtgaggcaaaaatagatataaaacctgagagtttggatcatggtgtaatctatcttcgtcattggagggtagcacatgcaaacctatctaaagactctaaaattgaattgtgtgtgaaaaatgaaggtgattccttagttttgatttgtaattccatagcaaatagacctccagaatggtttgaggttaatttgtcctgggaatctaataccgcaactgcgaaggtgcgcttaccatttcctgctaaaggtgctaggtgttttgatccaagtggtgctgtattgccatcagagtcttgggtatcaataaaacatttggtagggtaccgtattataataataagtccaccacatgtttttgtggagctttgtttacgcttacgccatactgcagatcctcataaggatcacgaatttcgtcgcccacttcgatcatttggtaattcaatccagaaagaaattcgattacaagattactctgaagatattgagagtttgttggctgctgatgagttattggatgcatgggtggaagctacaattttgatagaaaggcaaacttcccttgtactgaaaatatcacgttatgattgtcctcttgaaagagatgattcattaattaaattaggtataacaactgctaaaaaattcaatataaatgacattgcgtcactttctgtatcggccttaaaactcgaacaacctgctgatgaggctattattttaccccaaagatattcagaaggagtccccgttggagcttgggaattttctccctcagaaaaggaacctggatcatggttgatatttccaatggagggtgcttctattttgtttcgaccaaccttatgggtgatagctggtgaaactcataagagtagatcactatctgaggcattatctgttgagaatagacatgatcgtgcgatggttttggatcaagtaattatggagatgtcctttaattacctggatccaaattggtcctatttggaaaatcttgctgggcatttgggacatttgccattagcttctcttgatttatggaaacgatttattcgttttccacaagcaatggctgcacttgctctaagaatgaataaattaccagataattttcttcatcgcttcccattggagctaccttttacttgggagttaattacctttgaatgttggaagaatgctactgaatacttgaggaagcagtgtattgaatggtttggggaggtatttgcaccaaaacaattatacaatcatataactgaacgagtaacagcatttacaatgttaaatgagcagcccgctttaaggagcttgttaagcttagttaggtcgactgtattgggagagcaatgccgtgatattttaatgctgaagcactcaggaagtgacagtatctttgaacatcaattatttattggtgaagattgcttgttacaaaagctattacgtgtacatagtggggctcaatggccaaatgattcggaattgttttatttggttaagaattttcgaaaagatcataattttcatcaattatttccaactcaattagatgaccataaggatggcgttattgggttaccgattctattagctgctcaagtcgcaactaattctattgataaatgttttagccatagtgaaaatatccacaaattaagaacttataagagatttgatcctgaatggtttgagttagcatttgatttaacaattgcacgcacggtttcaagcggtttaatgaaaatatag

SEQ ID NO: 29706 - DNA, 6294 bp, Marinomonas ushuaiensis DSM 15871
atgagaccctatttttcatcattagtcactcaagcaattagccgtgcgaaagaatctagtttaagtattttatcgataactaatccgtctttaagaaatcacttatctgaacagatgtcagtaactgcaggtcaaggtgatgcctttttagcggaccctgtgttcgaacatatgtttggttgggaaaaagcggaacctttaatgtcagatttagaaggtagcttattaagtcatgaattggttaattcgcttgatcaaaaacagattatgaatcgtaatgatagtgacaaacagcagtttaaaaaaaataaatatcgctttggtaaggagttccagccctacgctcatcagcttaaagcgtggcaatacttaatagaagaagagaaaaaatccgttattgttacttcaggtactggttctggtaagactgagtgctttatggtgcctgtattgaatgatttatgtcgagagcaaaaagagacaaaagctcctttagtaggtgtcagagcgttatttctttatccgcttaatgcgctaatcaactctcaagaggagcgtcttgatgcatggactcaagcctttggagataaaatacgttattgcctttataacggtaacactcctaatgatgaggctaaggtttatcaggcacaaaagaagtgtaagaaccagattctatcccgcgaattaatgcgtaaagagcctgcgccattgctggtgactaatggcactatgttggaatatatgttgatcagacagattgactctccgattattgaagcctcaagacaagctcaatcattacgctggattatattggatgaagctcatagttatatgggctctcaagcggctgagctcgcgctacagttgcgtcgggtgatatatgcttttggtgttgaagccaagaatgttcgctttgtcgctacatcagcgacgatagcgaataaagatgccgagaaacaattaaaaactttcttatcaaatattgctggtgtgggcatagatcaaatagaggtgatcggtggtcaacgtattatccctgagataaatgatacagctaacctttctcagtcattagaagcaatagagagtatccctgctgatctagaccccagtgacaaagaatatgatgaaaaggtatctttagcacgctttagcgcacttgaaatgtcacccatagcgaaagcattgcgatctgttatgacagcaaatagccaaggtcctatgacgcttaatgacatagctagggctatgggtaagatgttaaatcaagagccaatcgagcagaaaatattattgcgatggatagacattcttacaggaacagtaaaggatactaagtttgatagtcaggcttttttgaagcttagagcacatttttttcaacggatgacacaaggtttgtgggcttgtgtggatagccattgtcctgcaaaaaaagatacccatttagccacaaactggccttttggtatggtctacgcgacacaaagaagtcgctgtgaatgccaagcccctgtgcttgagctatcttcatgccttgaatgcaatgaacctcatttattaggtgaaaataaaggaggaaaaatcattcaatggaatacccgtacacataatgagtttgctttagaaaatgatgagttagatgaagatgaagatgaagagcaaaaagcccctgtacatttagagggtaaatcggttctgccagatatttatgcgagttgttatacaaagagcgagtcttttaatcttatagggttagataaagaaggtaatcaagttcatcaaaaagagggttatatcttagctcaagcagatccaaaggtgatgtgttgttctgcttgtggttatcagcctcatcatggtgggttgccttttaaacgagctcttttgtcagcccctttttatgtgactagcgtggtgccaaccgttttagaatattgccctgattttgaaatagataaggatgataaaactaaaaatattgggcgcttaagtctacctggacgtggtcgtcgcttgattacttttacagatagtcggcaagggacagcaaggttagcggtaaaaatgcagcaagaagccgagcgttcaaaattacgcggggctgtattagagtcgctaaagcaggcgcaaaataaacaaccaattgaagatgttctaaatgatgatgtgacacctgaagcgctattagagcaagcaaaaatcctaagaaacctaggtgctattagcaatgctgaagatctagagcaaaaagcattaagcctaaaatcgggtgtaaaatcattaaaaccgattgagttatcttggtctgaaatggcgcaagagttagccggtctaagtgattttaaaggcagtattttgatctccaataaacaactgtcacctgaaatttttgatcaaacagatggcgcatataagttggcagatatgatgttatttagggagttttcaaggcgcccgaaacgacaaaatagttctgaaacccaaggtttagttaaagtgggttaccaaggcttaagtcgcataaagaaagtgccagaatattgggagcaatatggccttgatttaaatgactggatagattttctaaaagtcagtttagacttttttgtcagagaaaactcttatgtcaagcttgaggatgacggttggaaaaaatggataggtcaacgcttttcatctaaagaattgattataccttcttcggaagaagcgaatgaaatgcgtgttaaaaagtggccccaagttaatcgaaaaggcgctcaaggtcgtttagttaaattattaatgcttggtgctggtttagatcttcagcacttgctccatgtagaattgatcaatgcttggttaaagcaagcttggttggatttaacccaaacatctaaagtgttaagccatgatggaaatcgttttcatcttagacgacatgagatgacattttccctaacgaataaagtttatatatgtcctataacacataaattatttgatacttgttttaaaaatctcactccttatttacctagaaaaatagatggtcataatattatatgtgaggaggtaagttaccctctcctgagtgattttgatttatctcagaaagattatgatgaaggtattgacactattcgtgactctgtttcagaagatgaaaacattcaggttctaaggtcacaaaacctttggacggatatcaatgacagagctgtagaaggtggtttttattatcgtactgcagaacactcagcacagcaatcatcaagtgctttaagtaaatatgaggatatgtttaaaaaaggtcaaattaatgtattaaattgctcaaccactatggaaatgggggtcgatattggcggtatatctgctgttgtcatgaacaatgtaccacctcatcctgctaattatttacaacgagcaggccgagcgggtaggagtaaagagtcccgtgctatctcttataccttatgtaagtcaaaccctcatgatcagcaggtattttccaaacctaagtgggcttttgagacagatattgcagctccttatgtggcatttaattcacctcgtttagttcagaggcatgtgaatgctatcttgttatcgatatacctcaaagaggaagttggagataccagcacagataaaacatctcttaaacttgagtggttttttagtggtcaagactctatctgttctcgttttatcctttggcttaaagctgggtcaaatagagtcaataaggcgatactggggataagtaaaggtactgatttatctgaattgccagcctctaagttacgagaaaatacagctaaagcaatagaagtacacatgcagaaatggcaaaaagatcacgaatacttaataactgaacaagtgagtgcggagaaagggagtccgttttcctatcgtatagaaattgaagtaaaacgcttgtgtaatgagtatttactaaaagaattagcagctaaagcatttttacctggttatggtttccctacagatgtagtgacctttgataataataatattgtcgactttaaacgtagtaagaacagagggaaaggcaaaacatctcaagaaagacgagaagataatcttgcgagagtaagggggttacctagccgtaatttggcagttgctatcaaggaatatgcacccggtactgaattagtattagatggccgcgttttcaagtcaggcggtgtatctttgagttggcacaatatggtggatactgatattaaggaagcgcagcagtttgatatggcttggcgatgtggtcactgtggtcaaacgggttatgagaaaggggtaacacaagcatctaaaaacttagtatgtagtaacagcacatgtgcaaaacctattaagtctgcgaatacacgaaaagtattgcagccaacaggttttgtgagtgagttctatgcagaaccaaataatgatatttctgtccaaagttatgtgccaattgagccagcttggctgtctacacgaggcgaaaaacatgcattgccaaaccctgctatgggacatatgacggcggatgtagatggtacaatattttatcattcatctggcgttagcggtaaaggttatgcgctttgtttgtcatgtggtcgcgcggcttcattagataaagatggtaatccaccatccacgtttaatacaggtgtgagacatcatccacttgtgccaaacagacagagtaaagagactgaaagtgatagttactgtcatggggaagcgaccattcaagaaggtatacaccttggctatcatactaacaccgatgtatttgagttggtgttaagacaccctgtgactcaggagtatatagcggaagataaagacggccgtattattgcaaccacgttggcggttgctttacgttctgcattagctgagaaattggggatttcaacaggagagcttggctatgcgacacgtccagcaattgtagatgaaacgaatactgcgacggttattcagctatatgatgcgattagtggtggcgcagggtttgctacatcagcaccagaaagaattcaaactttattagaaatgatggcaagtaagttaatttgcgagaagtgtgaggcttgctgtaacgattgcctgttggagtctgactctcgccacgatgtcgataagcttgaccggatgaaagcgctggaatggttaggcgctgattttctgaatcataatggtagttctgaagtgcttaatttgcttaatgatgggcagtattaccacagttccattggtgagtttattaaaacctatatggatagaggtttatccagcataaatttgtggctaagtgataatgtcactgattgggatttgaatgcgctggagtttaaaaatatcttgttgcgatatatgtatgaagataattgccaggttaatttggttgtcccagaaaatgcattaaatgatcagctaaaagaagtgatttaccgtttaaatatacagggttttgaattcttcacaggtaaacctgataagcatgaaatagtagctcagtttgaatgtaagaataaaacgataaccattgctaatactgagttgggagtaaattgccccagtaaagattggcatgcgagtaatggggttgtgatattttctaatactgaaaaagcagtagcgttaaagaaaattgatatgtcagactggaatgttccagacacaactcatctcattctgaaaaatgactgtgatggtagtattaagcaatttcctgaaaagttttggcatgctattaatcgtagaataaaatctaatttgttcgaaaaaggcatgattaaagagatctattttagggataggtacttggtgacacctttacatgcctcgttattatttaacttgctgaatggcctgacagagcaaataaatcaatatagtctaatcgaaattgagactgcgaattttgcttataatactaatgctcagtcatttaatgataactgggatacattagaggctagaaagcaagcggttaaatgcgttctagaagatattacaggtaagtcgatacggtttgattcatctagaaagacggaggtagctcatagccgtattatgcaaatcacctttgattcaggtgaaatactaaaactttacttagacgaagggcttggttgttgggagacacgctcaagcaagacctttgattttaaagctagtgtaatgagccaagcgagagctattaaatcatgttctgaaaatatcaatatccgatccagaaccaagggtacttctatatttatagtaaacgaaaagtaa

SEQ ID NO: 29707 - DNA, 3432 bp, Marinomonas ushuaiensis DSM 15871
atgggtgatgtaacaaacggtctttcacaaattaatgtggctgttaaagtagatattataaagcctaaattatggctgaagcagttttttataaagcgagctttatcaggtgtaacaggaaaaccattatatcaatatcaggtaagtgctgatgagtacttaagtttaaagtgttgcgttagcaaagctgatgcccaaaattcgtttggagacttgtgccctgactggagcgctgcgtttgttttattttgctcagaatggtttcgccgtgaatatacaaaccaatggagctggcagccaatttggcaaagcttaagttttcaattaaacccagtagatgtcaaaaatatcgtagagaaaggattaagtgattattggcaaaggtctgttttacagtatcaaagtgagcacaataactatttaggctcagtattcagcgaagggggcttacctttcaaattactgattgataaaaacaatcattttcaaaaactattcaaacaagtactgagtcgctatcaacatgcgactttgttaggaaagacaacccatgagctggtggaggaatgtgttaataaattgccacaggcttttaaggaaaatacctcgattaagttgattggcgatatggcagataaactcttgtctatggtggatgtgtttgagctagaaaacaaagaagacccagctaagcatttagatcaagttaatggtcattggcgctctcaattcccattaccgttagatgaccagataggttctgattttttaaataacttattaactagtgccaccaaagaagttaaaaaacaaggtattaaaagaggagagttacaggcaaagcatttcctgtttttgcaatctgatgtaattaaaagtgaagttactttacccacaaacctgacgtttggcttttcaaaagaggacgtcaacagtgcacgtattgagttggctgtatatgagggggatgtctgccttgctaatgcaggggtctttcatggtcattttgaaggtttgcatacgcgtttaaaaatgcgcttggagaagtttcaggtaacgcgtcaaaatacagacaaaaacctctatttagtggcgatgcaagcaggtcagcaattagccaaaatgcttatcccttattcctggctagaaatcggacaggtcccagttggttttatccaaaaaaatgacatgctgatatacgcaggccaagccagctttaaggttaaaacgcctaatgtgtggttgttattaccagaaaactgccaagtaacgaatgttgtcgacacacatttaaatgatcttaatagtttggataagaattcaaatgatgttgaacctagtatgatccaagaagggcagtacttagggcttagtctagtaaaatgccaaggtaaggtgtgttttgagaatgagactaaggaatgttttactattgaaactaatgcacctaatgacacgggtgatcagttatctttgcaagggaagtttctagaatggtcaagtgagccttcccatgtatttgttggtattcccagttatcagtgggcaaccaatgtgccatttgaacaaagagaaagtttaaatttatttctaaatggacaggcccaaaacaacctttcgttggcagaaaattatggccgccaatccttatcctatcgcaatgccaaaaaccaaacattattacgcaaaagagtgggggttttaccgcaagattttgaactgagtttaacctcagccgataaaccgaatgaaggcatagtgacacttaaaaccaggagtttgtgctgttatcaaataaaaggcgtgactgaagttagaagagataagagtgaagcgaacacccaacatattcacttgaagggagagggcataccgccagattactttaagttagtcgtgtttgttaatttggccagtgatccgattgttttaaccctaccttttccttcaaagggggcggttgcatatgacaaagaagggcaagtgcttaagcgccaaattagtttagatgccctattgggtagtcgtttacaccttttttcagatgcaggacagtcaaattactttgagctagaaataagccttaaagactatcaggtgaattatgccaatacaccaactttccaatggcgttatcgggtggaaaatgagcctaaggtcatttctctatatgctttaaaagaatacatacaagaactcatgtcacttaaacccgagctagatagtgaagttctagtgacagtgcgtgggccagcaaaaaatttggatattatcgttaagcgatatgaggcggtacttgatcacgacagagcgcgtaatcttatttgtttacaagaaggctctggctttgattcatcaaagattaagcctcaactatttaagttggccgcgcccgaagaaagagcttatctacttgatagtcgacgcagtgaaaatgctgcaacaggggattacgagctaccaagacaattagaggatactggcccttggttagtgatcccgcaagctgggtctaaaattagctttagacctaaatttattttaggtcgaccacagaagtttgatgttgggcaagtgttaaaacatatttctcaagcagtgatggcttatcatcctcaattttgccctgatgcattcaccccaattattgcttgcatggcggataagccgagccattcaagttggcaatattttattacgcttaaaaaacaattttaccatttaccgcttacgacgtttcaagcttggggggagttagttaaacaacctaaagcattatgtttagcaattttaaagtttgatgcggatgctggcttaatcgctcgattagaaaaagagtacccgattgtttgggagttaatcggaatagaagattggcgatatgccattgaacattataaatcagaccttttagaggctaagttacctgaggctgtagttactcaggtgataggggggttaattgatagaatctgtactcaaataggggtttatgaaggggcctatcaagcgtatttgaaggatggtagtaaaccccaagcgtttcctactcaaataatgcaaggtttgattattgataatgaggatagttggtatcaaaagctgttacagcagcatctggatgcaaaatggccagaaaaatatgaccaagaattaaggcgttggtttaattttgattcgaatttcaatctttctattcatacttttcatagacatcatcaagcggttgttttattacctatttatgcagcggcggtagcggctggtaagttggattcagaggcgctttttaataaaaataacagagtaaataataaattagatgcaacaaaagcttttcatcttcgcactattcgagacttcgacatggattggtttaagcccatgtatcaatttgcagtatttcaatttttaaataaggacattaaatga

SEQ ID NO: 29708 - DNA, 6024 bp, Mesorhizobium sp. LNHC220B00
atcagacccttcgagaccctaagccgcttgcgccagcgcatggcggaagccgtgatagcccaatcaggtctgcggcatccggcgttgacggctcatctaagagaaacgctgcccaacccgcaccatgaaggcgcgctcataccgccacccgttctggaaggcgcctttccattcgtcacagccgacgagacgctggcggcactgtctgggagacttctcgatgagcgaactgtcgcagctcttgccggagacaacagcggcgaaggctattcctttccgcacaagcgctctccctatcagcatcaacttgaggcgtggcgcgtactaggagatccgaaaccaaggagcgccatcatctccgcaggcacgggctccggcaagaccgaatgcttcttcgtccctatcctcgacagcctctacaggagaagggcgcgtgtgagtggtgtcgaagccatcatgctttacccgctcaacgcattgatcgctagccaacaggaacgcctcgacgcctggacgaagccggccaatggcgccatccgctactgcctatataacggcaacttgcgtgagaagctgaaggcaaacgaacaacgagaggcattgtcgcgagcgccgcagaatgtgccggaccgccaggcgcttcgcagagatccgccaccgcttctcgtgacgaaccttacgatgcttgagtacatgctcgtccgcccgcaggacaggccaattctggaagcatctcgcggtcgtctgaaatggatcgtgctggacgaggcccatacactggtcggctcggcggcagcagaagttgcgttgctcttacgtcgagtcatggaagccttcgaggtcgaccccacgacggtccgtttcgttgccacttcggcgacgatcggcgagggcgccgacgttgaagataaattgcgccgcttccttgcaaacataggcggcattcagctcgaccaagtgaccatgatcacgggacatcgccggcttccgcgccgtccaggaactggtggcgtcgcgccaaaagtggccgatctcgggacgatgtctccgcaagctctcttcgacgcgctaggcagccacaatcctgtgtggtcgttggtggaagggcttaaggatcgatcggttccagcggcagagctcgaacgattggccggcgcgatcggggtgaacggcgaaacactggcaatggctctggcgcgcgcccagaatgcaaatggagaaacattggcgcctctgcgcgtccattccttccatcgcgcctcacctggcctttggtcctgcaccaatccagattgtcccgccaaaatgggtgaaggatggtcggccggaagtgttctttacgagcgtgaagaaacctgtccgtcatgcggcatgcccgtcgccgaactgttcacatgcaacgagtgcggcgaagccttcatgattgccgaggagaaaggcgatcgccttactccgccacgcaatctgccgccctctgacgagttccttttcgaagcggtccgcgaagtcgaagatgatggggaggatcaggctatcgaggaagtgcccgcgttagacatgccgtcggttcgtcactgtttttcgctgcaagatgcaggtctgctgccccttttcatagacaaggcgactggccgtacggcagattcgggcggtgagggccgttaccgtctaacatctcatggcgatggaacgggaccttgcccctcgtgcagcgccagaaacaagtcaggtgacaagctctatcctttccgctttggcgctcctttcatcattggcaacgcggctccaatgctgcttgcggccatgcctcctgccgataaagtggtcgtacctcttctgccgcaaacacccccggaccttccagccagcgggcgccaactcatcagctttaccgacagccgccagggcaccgctcgcatggccgcccgcctgcagatcgagtcggagcgagctttcgtccgctcgttcatctaccaggctgttcagctgaaggctgcgggtgacggggagagcgagaaaacgatagaacttcgcgggaacatagctcgggtcaaggaacgcgagggatggcaggacgacgccttattcgcatccctcgtggctggctgggagaaggagcttgggcagcagtctggcgacgggactatcagctggcccgaccttcgcgcgagcttggctgaccggattgagatacgagaatggctgccgcaggtctggggtgatcgcgctgacatcttcaaggcctccgggtcgtcgcctgcttcgcagttggcgaacgcactcctgctgcgtgaactgctgcgacgtccacgcatggcgaacacgcctgagaccatggggctggcgcggctcgtctatccaacggtcgagaggattgttgacgccccgcgcgggttcctgcaacgaggcgccacgcttgaggattggaaggcctggcttggcagcattttggtattcgccgtgcggtcaccctttgctgtcgccgtgtcacgtgatcttctccgttggattgcgcgcaagggatttccgaagaaactctcgtcgccaggccttgagccggcgagaagacaacaggcctggccacgtgcttccacgtcggcgaaaatccctcaggtagttgagttgcttcgcctgggccttggtctcaatccgggttcgaaggaagaccggatggagatgaacgattggctggagaaagcgtggaaccagctccttccactcttcccggcgaatgaaagcggcgagcgcgccctggattttgacctcctgcagcttgcatcgctcaagaaggcgtttctctgtcccgtcacgcgacgtatcgtcgacgtcgcacctttcgggctgtccccgtacgcccgtatcgcaaaggatcgcgccgagcctatcaaattgccgacttgccccgttgacggcgatgaggcgatccgccgtgctttcacggaagacgatgcgaccgtcgcggagctgcgggcgcggggtctctggaccaacgtgcacgaccgtatcgcgctgttctcgccctatgcgcgatccgccgaacattcggcccagctctcgccggcacgcttgcgtcgctacgaggcacggttcaaagccggagagatcaatttcctaaattgctcgacgacgatggagatgggtgtcgacatcggctcagtgaacggcgtcatgatgaccaacgtcccgccctcgatcgccaactatcgacagcgcgtcggccgtgctggacggcgcggtcagcctctatcgctcgccttcacgtttgcgaaggatagaccgctggatcgtgaggctttccgagatcctgcgacctatctgaaacgcgaaatcgcggcgcccagagtagcactggacagccgacctatcgtgctgcgccacgtgggagccttctttctcggtcgcttcctagaggcaaatagcggcaacgccctgaaaatggctgctggcgatttcttcggctgtcctgaggtgccacgcgccgctcgcgccgtgaaggcggaacggcccgtcgcgcggtttctagattggctaggtttggctacgaccgcaaatgacaatgaagccgcgctccatcgccttgtgcgcggcaccgtgctggacgggcggcgggacctggcggacctcaccgccgaagccatggcaggcgtggaatccgagttcgccgacgagtggcgagcgcttcaggaacaattgccgggggcgacggaaatcggtgcggcgaaatcccttgaactccatctgaaacgcttgtgcggcgagttcctactgtctgatctcgcagatcgaggatttctgcctgggcatggctttccaaacaacattgtttctttcgagcttggcggttctctccctgacgacgatgtgccggatggcagaattggccagcgtcacggcggaccgaagcgaccgctcgacatcgccatccgtgactacgctccgggttccgagacggtggttgacgggcaagtctatcgtgttggcggggtcacgctgaattggcatcgcccttcaagcgaacagggcatgcgtgagattcaagcgttgcgctgggctgcccgttgcgcacattgcggcgattcatggacgggtgccggctcgtggcccgaacagtgccggacttgcgcggacgcggcgattaaagtcgacgattacctgaagccagccggctttcttcgcgacagccatatcgagacgcatgccgatatcgaccaagtcgcctatgttcgacccgagccgccgcgcatttcggccggatccgccccatgggaagccctgaccaagccgaccgcggggcgtttgaggctcaaccgccgtggaaccgtatactaccatacgaaagggccgggctcgcaaccctctggctatgggctatgcctgtattgcggccgcatggaaccgatgaagccaggcgaaatggtgtgctcgggacttgatgaccataagccgcttcgctcgccggagaatttcatggagccctgcgagggaaacgaaaagccgttcaccatcaagactggcctgcatctgggttatgagattcacacggatgttctggaactacaaccggcagcgacacctgacattggtgccgcaaatgcgctcgcgatcgccatgcgcgaagcgctggcgcggcacctgggaatcgatccggacgagatgggttacggcattggcgcgtcgcgcaatgccatgaccagcaccacgctttccatcttcctctacgaccgagccgcgggaggtgcaggctatgtggtacgcgcggcagatgacatcggtgcgatgttgaagagtgctcgcgcaatactcgactgtccgcgcaagtgtgcccatgcctgctcagcttgcgtcctcgtctccgatgcgccggagaaagaggaggaactcgaccgaaagaaggccattacctttatggatgcgcatctttgccttccggacgtgatcagcccagaggacgttttcgcgccgcgggccgacatatccgggcgaccgctcgcggagatcgacgaatggctgaacggtcgcggccaatcgaaactctttttctgggctcagttgcgcgatttggtagcactggaggattggcccccgacctctctgttccggcgctgggcaggcaacggccgggcagtcacgctcgtccttcctagaggcactgtcgacgcgctcgacgcgtctcaacttctttatctccgggattacagttcgaggcatcaggttgttatcgccgagggggacaccgtacgctttagcaatggtggcatcttgtttgcctatgcgacggatgggcagggcggtcatgcctgggcgagccgggacgacgcgatccaattggccgcacccgactggggcgccagccacagtcttcccgttgcacgcgcgcccctgaaactcgagcctggggtagcgacggtcagccccgaacggttggcgccgaagagcggtgccgcagtggttatccttgatcgaacctttgacggccctatcagcgccttcggcgagaagatgtcgaaagatatccgcaaggctgcagctgattgcggtgtctcggggaaggaccggcctatccaagtttcctaccgtgatcgcttcgcgcggtcaccgctagttcttcgtctcctcgttgataccgtgtcagttctcgccggaggcgagacgatacctctgtcgatcgagaccgcatcgcacaaggactcggggtattcgcgggatgaggtcgcctctgacatcaccgacaacgacatgttggacgcttttgcgggagcctacggcgaccgtcggaatctcgacgtcaagctgacagttggccagccgccccacaagcgaagtctgatcctcgtgtacgagtcggaccggaagctgactgttgatctcgaccaaggattcggctggctggtttatgaaggccccgaccgaagcttcgacgcaggtgcagcgccgcattccgcggcaagccgcatcgccaatctgtcagggagacttcgtcgccgacatgatcatgacagccagatggtagtgtggcgatcttag

SEQ ID NO: 29709 - DNA, 3102 bp, Mesorhizobium sp. LNHC220B00
ttgcatcgctaccgtatcagtgatgctcagtatcgttgtggtcttgatctggtacagaggaactctgcactcctggaccctgagaaccgccccctttgcgccattttcgcactcgtcacctccgaatggttccggaggcaggccgacactttatggcggcgctggcaggatgtcggcgtggtgccggagaggatttcagtcggcgaacggaatgagatcgctctcgccgggcttcgctggtgggggctgaagctcatcgtaaccgagggtctctatcgtacccgaaacgagtatttgatgacactcgcccgcaatggcgggctgccgtcgacgcttctggtaggtgagcgggccaatgccgtccgcgcctatttcgagaacgtcatggcggactcgctcgcgctaccctggtcttctgcccatactgactacctgaccatcgcacgtaggcatgcagaggggttgccagtcagttaccaggacgacggcattctcgacctagctgcggagctcattgctggattgatcgagtgccgccgtgtattgccgaaggaccagctgaacaacaatcctgccggttggcttgatgctcaggcgaaaggctggcgtgagcgccttccgatctatcttcccgaagaccaggcggcatgcagtcggctgttcaacgacctgcttaccgttgagccgaagtctcgtggtgggggcatcggtctcaggcgcctactcgcgcgtgatccggagggcagatggcgcgaaggattcgttgtccaagcggacggcccgctccagttcgacgcactgcgcgatcaaaaagagggccgatttcgcgcttatttcgcaggaagcgccgcgcggctgacgtcgcgggaattcgcattgatctaccgctcggaaacagactccaagggtaggttcgaggtaacgtcccagtcgctcggccatcctgggtttgttggcccctttgctttctcggaaatggcaacggtcgcgctctcgcgagaaggccggacgctgccaaccgtctgctggccaggcggccgcgccgtcgcttccgcatgccacgtgctaaggtcaactgagagggaggatcgcctcgagctcgttggtaccggatctgtccgctcgaccgccgaagtgctccatgtatgggtttcgggacaatcgagggtgctgggccacgacggtggtggcgtagagtgcctatggcaatccgacgggcgggcgctctggcgcgtcgagggcatggcgctcgtcgagacggaagagggagagcgctatcgtgtgcaggccggagcttcgtcggacgacgagcgacggctcgatttggagacaatcttcgtttctggtttgtccttcgaagacggatcaattcaacctgtggccgcacctctgcggccgcgaactcgcgggagcggcggtgaaccgcgcttgcgctttctcagagaaggacgtgaggtcaatgctcgaggagccgcagaaggcctagttaccgtacaatggcttgatgacgaaggatttcttatcgagcgggctcgggttctcgccctgcctccgggctttagtctggagggccgcatcgagactggcggcgcgcgtgtgtcttggcaaggattgcagggctggcaggttgcggcagtcgatgcgtttggcacgcaaatcgagaccgagcgcctcgacgccggtttggtcgcgccatggcagggacaacccactgcgcaactgcgcattaggttgatcgatccgtatggatctgcggtcatggccatgttggacctggcggctaacgagaccgtcctcgtcgacgcatcaggcaggatccgcaaggacgcgccagaattatcgcttgccaatttgcgcggagccgttctcctcaccggtcgggcggtgacgatcgatctcgatttgcgaggagcggcgagtgcgcgcgctttgatcgcccgccgtgtcgaaggcgagacgccaatgatcaagtttggtgcgctggcggaaagcctgctgggcctgtcggccgaacgtggccccagcgtggtgatcagggacgatcgcaatcggccgctatgcaccatccgccgtagtcaaaccgtgccgtttgtcaatgacggcaaggccctcttcgcgagtttggctgcagatgcgttcgcagtggcaaggtcactcctccttcctgaaactgagctggccctcacccagatcggctccggactattccagctgccaacccagcccgatggcccctatctcgtgtattgccgtaaaggcgacgcagttgtgacacgtccctggctgattgacgctcctgtagccggtggcagctcttcgaccacaacgcgcctgcaggcgaattcattgatctcaaaggaagacgaacggcgactggcaatccaggaggagctttccagcattgcccatcggacggcatctagcgcggagctctctcaccttatccgtgttgtcgcgtcgcttaaggggctcagtccgcgagcgctcgacctcacgcgggagttgacttcctgtcccaagctgttgtgtcgtttgctgttggccgcgagccccgaaagactagaggcaatcctgacgctggaacgcgatctgccgttcctctggatggccttgcctgtggacgcatggaaacaagccgcaggcgcagaatgggatcgcgctgtgcaggaattgtcgactgtgttcgattccgcccaagcgtcgaaacaagctacgatgcagatgcagaagcgatttgaaaccctggctgagcgcaccttatggtttgccggtgtgtcacgttcaatcggcattggaaagacgctgcctcaagaccttcggtccgtcgcccagaattatgtccgccttcgccacgaccaagtggacgatctgccacgcagccttgctgaatacgctgctcgactgggcgccccagccgggctccagggcttcgattacaatcacttcccgatgctactgatgccgctttgtctcgccggcattgcttgcggaaaactggagatgacgccggatgtggcggcaggcctccgcaacgcgctggacttcgatagcacctacatcgcgacagcttaccctcattgcctcgagttcctttccaaatga

SEQ ID NO: 29710 - DNA, 6105 bp, Mesorhizobium sp. LNHC232B00
atgacccagttcgacgtattggatgaagtgaagcgacgcacggctgaagccgtcgttgcccaatccggcctcgcgcatgaaggactgcgacggcatctccgcgaactgctcggcggaaataatcctgcgagcggcgctttgatgcagcaggcgataatagagggagcgcacccatttgttgccgcagataagaccatgcaggatttctctgggtcgctgctccatcgtgatctgatatccgcattggatgggttgccggacggtcacgactaccggtttccgcgatcgcggaaacctttccagcatcaggtcgaagcctggcagctgctcgcggaaaaggatccgcaatcggtcctggtgacttcgggaacgggttcagggaagacggaatgctttttgtttccgatcctgagtgatttggccgcgcaagcaggcacgcagcgcgaacctcttcaaggcgtgcaggccattatgctttatccattgaacgctctgattgagagccagcgcgagcgtctatccgcttggacgaagccgttcggcggcaagctccgcttttgcctatacaacggcgatcttccaagggatgcaaaagagtccgatcgccgtcgctccccagagcgagtggtcgacagggtgcgcttacgctcaagccctccgcctgtgttggtcacaaacgtgaccatgctcgaatacatgcttgcgcgcgccgaagatcagccgatcattgatgtttcgaagggaaagctgcgctggatcgtcctcgatgaggctcactcgctcgtcggtgctgccgccgcagagatagcactgctgctccggcgagtattactcgcctttgatgtgaaaccagaagatgtccgcttcgtagccacctcggcgacaatcggatcgggcgaacaagtgcgtgagcagctccagagcttcttagccgacgtggctggcattcctgacggccgagttcatgtgatcgagggccgtcgcgtaatgcctcgtcgccccgagggtcggcactcgccgatatcagatgatattcgaactgcggaccccaatcggctgtatgaggccctcggccgtgatccgcagacttggagtctagtcgaaaagctgttcgagggaagcgtgccgcttgccgacttcgagctgcccgctcgcgcctatagcatatccgcccccgaactcgtttcagcgatgtcacgtgcgacgcgaaaggctcctggtggtgaggtcgagccctttgcgccgatgcgtcttcatgcgtttgaacgcgcggtcgctggcatatggagctgcatcaacacggactgccccggcagaccttcggactggccgtttggaggtatcttgtccgatcgctccgaccattgcccgttatgcctagcgccggtgctggagatcataagttgcaccgagtgtggtgaggtattcttagaaggaacggaaaggggtgaacggctagcggcaccgttgcgcaaccccccgcgcgacgaattcgccttcgagaatgcgcgcgaaaacgatgccggatcagaggccggcgacgagatagaggaagaggtgccagaggaagaggccgtcttccagcgcgatcgtctgttcgccaccaacccgacggctgctgctcgcggattttggctggatcgaaaatctggttggcgggtgtctgatgctcctgccgagggcggcgcatctctgttgtccgaggaacatgcgggaccgcgtcactgcccgcactgcagtccggaaggccgcaaaagatctgaaatgttgcgacccttaagatttggtgctccctttatcctcggcaacgcagcaccgatcttgcttgaaggagtggaaccagcgcgaccaacagacggcgagaaactcccttcagccggacggcgcctgctgtcattcactgacagcagacaggggactgcgcgtatggcggccaagctacaggtcgaggcggagcggaattttgtcagaagcttcgtctaccatcagctaatagcatccacgcagccccaagcaggcgccgatgaggagatcgctcgaactacgactgagatcgagcagctcgaggccgcgttcgcagccacgcgcttgcccgcgctagagaatcttatcgcagagaaaaggcgaacgctggctgggctgacgtccggaaatctagacggtgttgcttggccggaccttgttaaccggctgtccgagcgggtggaggtcgccgaatggataaagtccatttggcaagtgcgtgacgaggccctcttcgctgacgccggaaaggtcgccgagttcttattgttgcgcgaattctccaggcggccgcggcgagccaattcgctggaaacgatggggatggcgcggctgcgcaacccggccgtcgacaggctgacagaactgccagacgccctccggcgcaggggcaagacaatcgcggagtggcgatcttaccttgatgccgtccttactcattttgttcgggccaatggtgcggtttcgatatcgcgtcagttgcaacattggatatcaccgaaagcgaaattgaagtcgctaatcgggccggaagaacacaccgacggcgaccagagccttcaggcttggccaaacggttattttcgtgctcacccacgatcgcggccggttgcgctgcttgttcatggcctaggcctcgagctaagtgacccaggcgatagagctgatctcaacgagtgtctgagtatggcctggcgacaggtccagcacacgttttccgccgatcccgaacgacgcgtctttgatttctctaaaaccttcgtcgctccagtcacgaacgctttctattgcccgtcgacccgccgaattctcggcgccgcaccattcggaatgacgccttacgggctggagagcaagctaggggatcgacgccaggctgttcctgttgtcatgcccctacatcccgaagccttgcttgggctgcttgacatggacattgcaaggcaggccgttagtcagtggatcgaatccgacgcggctgttgtcggattgcggaatctaggcgcatggaacaacatctctgatcgcgtagcactgttcgccgactacgcgcgctcggcggagcattcagctcagcaaacaggcggacggctgcgccgatacgagcgggacttcaaggccggcaggatcaacattctcaactgctcaaccacgatggaaatgggcgtcgacatcggctcggtctcgtcagtaatgatgaccaacgtgcctccgtccatcgcgaattaccgccaacgtgttggtcgcgccggccgccgcggccaagcaatttctcttgccttcaccttctgcaaggacagaccccttgaccgtgaggcttttcgaaatccgcacgcatttcttcgacggaacttgtcagcgccaaaggtgacgctaagcagccggccgattgtgcaacgccatgtaaatgcttttctgctgagcgggtttatgcgcgagcgaggaggcgacagtctcaagatgcaaatcggcgctttcctcggctgtccaaccgaaccctcagagacccgcccgctcaagtcggaccgcccggtcgagaccttcattgagtggcttgagcgaccggcggtagcaacagcctacgaaatgggcctcgcggcactgacaaggagagcaatcctgtggggcgaccagacactggtggaacatacccgtagtgcgatcgtggacctctcaaaggcgttcgtcgcggaatgggagggcttagtagcactcgcaaaggacgaaggagttagagaggcaggcaagtcccggatggcgatcgagctcaagcgcatgtgcggcgaatttctgcttagcggcctagctgacagaggtttccttcccggccatggctttccgactgacgtagtctccttcatcccaggaaaggagttcaaatcaccggaagatactcaggatgggacgaggcaattccgaacggtcggccctcaacgttcgcttgacttagcgattcgggactatgccccaggatcggaagtagtgctcgacggccttgtgcacaagtcagccggagtgacgctcaattggaaacggcctgcaagcgaggagaatttggctgaagtccagagccttcgctttcactggcgctgttcagagtgcggagcaagcgatacgaaacgcggctctggccctgagcaatgtcaggcttgtggcgccgagcatccactcagccacgagttcctgcgaccggctgggttctccgtcgatccgagagcacgtgtgcacgctgatacagacacgttgtcgtatatcccaccagaggatccggtggtgtcagcccgggacacggcgtggcggagtcttccgatccctgaactaggccgctatcgatgcagccgagagggcctcgtatactattccaaccgaggcggccaaaaaggctttgggtatgctatctgcttgcagtgcggccgggcggaacccgataccgacaatcgcgggctagcctcaccgccccctgcgctcgttgatcataagcccttgcgttatcgtcaggggcaagagctctgtccgggcaacgaaaagccgttcagcatcaagcggaacatctcccttggttacgaaatcaccacggacgttttcgagcttcagccgcagcaccccttgcgacgggcggccgccaacgcgttcgtcattgccttgcgcgaagctctttctcaggaacttggtgttgaggctgacgaaatgggctttgccgtcgccgaaagccgtaatgccttgggggcatccaccgcatccctgttcatcttcgatcgggcgactggcggagccggctttgcggtgtcgttcgagtatctgatgcggccaatccttcgccgagcagagcaaatcctggattgcaagacgccgggttgtgaaaaagcctgcgccgcctgcgtgcttacctcggatgcaccggatggtaaggatgacctggaccggaaggcggcgctcaactttgttcgcaatcatttcacgtttccggacgacctctacccggctgattgctttgttccaggcgctgagctgtcgctcgccccgatcgacgaaattgacagggaactacgacgttctgcgcaatcaaaattaacgatctatctacctcatcaaagcatctcggcatcgatacaagattggcctttggccggacaattccaacgatggggcatgcgagggcacttggtgcgtctggccgtgccctctggagaggttgagaagcttagctcggccgacagactgggtcttcgagatttcgcaatcgggcacaacgttgatttgatctcagcggacgcgccaatcttcgaaaacggggcatcggcgttggcggcagtcgacaaaggtgatttgggttctgtctgggcatcgcgcgaactggagcccagcctgccaggaaagcggtggggaagtccgaaaatccatccagtggtggttggcaacgtctcggtggaatcgcaatttgcaactattgatcttaagacgcttttgccggctcccggggctcaattcgttcaaatcgactcggagctcaactgtgacattgccgcgttcggcgccaatgcgtccaagatcatggtcgatcttctaaccagatgtggtgcttggtcaaaagctggcatcaagaaggcgacctatcaggacccttatgtttcctctccgctagtggcacgcctcttggtcgacacgatcagtcaggtagtccttcaatccggggcaagtgatgcgtcactcactctcgaaactcgatcgacccgtattaatgaacagcgaggtcagccttggcagatcgtgcatgattggcgtgatgcgggcgaccagaaggccgtgattgacctctttgggcagcacaggggaatacgcgtatcggtagttcacaaggatgtgccgcatggtcgctacctggatatcgaattcaaagacggaagtcgcgctacgatcgttcttgaccaaggtttcggtgcttggtcagcaccacgacatattccggtccggcacgatttcggagctgatgcggccactcaagtgaggagacttgccaccacaaacgtagttctgcagagaaatggcataggcaagacctatttcgtcgccgcgccgcgctag

SEQ ID NO: 29711 - DNA, 3144 bp, Mesorhizobium sp. LNHC232B00
atggccgacggcgaatttgaccaggcgaaggagctcctgcgctatctcgcggctcaagggcgactaactgttccggacgacagatcgggcgcactgttcgtggctttttgctcggaatggttccgtcgcgaatcggattcaacctttcttaaatggaacgaccctgccccggacctatttcctgctatccccgattctgcaaaacgtgatctggccgatcgtgggctgcgattctggcgacgcgagttgagacgcagtgaatcaggccgcgaattcttgctcacggtggcgctcgaaggtggctttccggtccgtattcttacgagcggcgcgagatcatggcttcgcgactatctgcgttcaatcatgcgccgcgcagtcgcatccagagtggacacccttcaggagatcctcgatatctctgaagaagaacgcggccgaatgcgtaagagttatcagagtgccgattttgtagctctctgctctgaactagtcgaaaggcttcttgatctacggcgagccgccgaggctgagggcgttagcaatatcagcaattctaccctgctcgacattaggcggccgggctggcgggaaaatttgccgatatacgttccagcaaaagatgaagccctcgtggcagagttgctgaccggactgctcgatgaaaagatggccgggctatccaccgagggcgttgagacgcgtcgctacttggtaaaatgcgacggtaaatgggttccggcgatacagttgctcgccgatggagagatcgcgccccagaaactgccgaacctgccgacgcagggtcgagtgcgggcggttccaaccggcgaactcggcaatcatctctcgggagagctggcgttgtttgaagcgccgataggggaacagcggcgctggcgcgtcctgccattcactcggaccggtaaattgctgaagaatttcccgttcacatctccggtcaccgccacgctgacttctccaaacgtagccccctgtccctggacttggccgcatggagagccgcttaggtcggatttgctagtttttcgcgaggacgaaggatcaacggcagctacaccccttcttcgttttttccgatcgggatctgcaagttctgcgatcaagactctccatgtgttgtttccagacgactggacgattgagccgacgtcagaaagcgcggtcgtcgaaatcgaaagcttgccctatcttaaccgcaaacttgcccggctggttgggacggcatatttccggagcggtgaaagcgatgcgatccgctttagagtagaaccagacacagagggtcgcgaacacgaccttgaatttccatctggctcgccgaccgggttcgagctcgcagatgagcagtgcgaactagctgtctcgccagctgacccacttatccgcgatggaggaaagcagccaaggccaccacgcgccggcgaactattctctcggcgccccggagggaaatgggtgccattgtccagtcgcatcgacagcgtcggcctgacagaattttcgttgcgcgacccggaggctggcgttcaaatcgagaggcggctggtagccctattcccgattggtgcgcgcatcagcgggacgatgaacgatgcgcgtcgtggacaaatccggttggaaggactaccgggctggacagcttcgattgccaatgcagcctgtgaagtcgatcaggtcaattcaactacgctttcgttcaaatttttaggacgcccgctatatcgccttccaatgatggttcgccccgccgtaggccagccattcgagatcgtcgttcccctgatcggtcgcgatgcggccatcgccctggccgatggttcggttctggaacccggagcccaggttgatcttgggacgctcaggggtgcggttgccatatcaccgcgaagaaccgtcctgcacgtgaccggcaagggggccaagtcgggcggactgagcgcagcggtcgacggcgagctgcctttgggcgttctgcgaagcgccattgatgagatcctcacaaccctgccaggccaggacgatctggctgagctcgaattcgtaggggacacgcgcctgcccatccgcatcagccgctaccgcaacaaacaactcgctcacgatggtggcatagtgagctggtcagaagggtctagctcacccaaagtcctccctgtggcaaggatggttctcgatcctcgacacgaacatgcactggaacaagaggctgaggggctttggcgaatccccgagcgatgcaaggggctctgtcttgtctatctccggcacggtgtggatgttgtttcgagaccactgcccgttccgcaaccgggatctcccgttgctcatactggaaacctagtgtctgcgctcgcaatagctgactatgaaactcggcaagccgagatagggaatgcacttcaccatatcgttgaagatgtggggggcttcagattcctgcttgaagccgccacgaccctgaatggcctcccggcaaacgcctttgatgctctgaaactgctgccgtcctgtccgcaggccttggttggccttcttcttagcgcccgggatgctggagaacgaggcaccatttggtctcttcaaaacgagttgcctttcctttggttgggattgccactatccgcgtggcgggcagcgcttgaggccgactatgctgctgtctttgtggcgctcgaaccacttctcggtgcgggaaaggctggtgcggaggcgctagggcgggtggctacattacgtgccgaactgaatgcgctggaaccggcgctggcatggattttcagcctagcgggaattgccacagtagaggcaactcgatttccgtcactgaacgatctcaccgggacctatattgcgagccaaatccaccgaagcagcgaagggcgaaatgatcttgccgctcggctcgagcttgccggcttgaagctgccatcggaaattctgaccaaatcgcacgaggacttcgatggcctgttcgcaccgatcctgctcgctgctagcgcccagggaagactgactattaaacgcgacctggcgctacttgcccgtcgcacgctccgagagaacccggcctacgtgtccggagcctacgctcaccttctgaagttttatgattcgaaatga

SEQ ID NO: 29712 - DNA, 6114 bp, Mesorhizobium sp. LNJC384A00
atgatcgactttgatcgcatgatgaagcgcctgccggaacaggctgccgatgcaatcttagggatgttgcgcccgaaatcgcggaccctcgtgagtcacctgcgaaccaagtggggcgcgcccgccggaagtgccgactcgctgattgcagagcctttcgtggaaggcgcatttccatggctaacgttggagggtggctggcaggcactcaagccggggttactcgatccacggacgatcgacgtcctcagatccgtttcgtttcctccttacgagcatcaggtggaagcatggcaacatctcacggccgaacgcccatcctcggtgatcgtctccagcggcaccggttccggcaagaccgaatgcttcttggttccgatcctcgatcgactagtgaggcagtcggatggtggcaggcgatcgctgaagggcgtgcgcgcgctgatgctctacccccttaatgctctgatcagcagccaggaagagcgacttaaccgatggttcgagccgttcggaggaacgctccgatactgtctttacaatggcgagacgcccgagacagcgcgtgcggccgttcgtgccaataagccttggcaggtcggggatcgcagagcacttagatcttctccgcccccgatcctagtcaccaacgccacgatgctagaatacatgctaatccgccagaacgacgcgccgatcctcgcggcgtcgcaaggaaagctcgacttcatcgttctcgatgaggctcattcctacatgggcgcgcaagccgccgagatttcactgctcctgcggcgagtcgcgcttgcgttcggccgcacacccgaccagatccgctatgtggcgacgtccgcaacgatcggaggtgcgagcgctagggcggatcttcttcgtttcctgcaagacctatcgggtgcgccggcccaggcaatccatgttgttgaagggcagcgggcgccgctcccgccagaaccgccacactacgacgatcgtccactccaaccgagcgccctcgccgaactccgtcctctggacagtggtcgcctactcgcccagtctgctcagttgcgcgccacgcgcgaagaactgcgaacaggcaagatatattcgtggcgcgcctggaacgaaacggcatcgacacttgccggtggcgttgttgatgcgacgcaattactcatcgaggctgcacgcgcgaaggatccgcatgccgaccctgtgatggcggccagcgggggcgacgccatcttacccaatcgaatccacttgtttcatcggactgtcgcgggtttgtgggcctgtatcaatcccgtttgcgctgaaagtccatctcgtcagcagggctctgattgggcctatgggccaatcttttccgaggcgcgggaacattgcccatgctgcgcgtcgatcgtgctggaatgggtgtgctgcactctttgcggggacggcgcccttagggccgaagagtatgacgggggggcgcgaattgccgcgtggagcgacggcgacaacgaggacgagttcgaacagacgcttgagcgcgaaaatcctatcgacgccgccgacgatgaagaaggggacacgcgtagcgccgacgcaccgacgatcgtctcacgaaggtatttgagcctgccgatcaagcccggctccccgcatttgagcgtggagcccaccacaggcatcgccgacagcgaggcagagcggcagatcatttactccgccagccgagacatctctgagtgccctagctgcaacaaggcccccaatcgcgtcgatccggagcgcggcgcgatgcggccggtggtagccggcgcgcctttcctcatggcgcagatcacaccggggtttctcgccgacctgtcgccggagcccgtgtcgggggatccccttccattcgagggtcgccgactaatcacctttacggatgcccgtcagggtaccgctcgacatgctgccaatatccaaatcgcgtcggaacgcactttcgtacgcggcttcatctaccagtttgttcaggaaaggtcagccgttgacgctgaggcgctagcagctatcgacaaaaagatagctcggcttagggaacatccagacgatgccatgttcgctggtatggccgacgatctcgaacgtgaacgcgcgaaaatggtcggtggcaatgcgcgaccctggcgcgatctcgtccggcgactagccggacatacgaccgtcgatcatttcctgcgggagctctggaccaccaccaatcgcgacgatcgcttccaggacactaatacgctcgccgaattccttctctaccgtgaagcaatgcggcggccggtgcgcgccaattccgcggaaacactcggtctgtttcgtttcgagctacccgggatcgatgacgccccgccgcacgttcccgcatcggctctcgcggtaggcatgacaggggaggaatggcgagatttgcttaggcttctcgtcactcatttcctgcgcaccaacgtcgcgcttgacttcccccgctggtggctgaactggatcgatcgccgccaaagccacatagaggtcaagccttgggcaccgggtgagaaatctagcctgtatgtgcgcctctggcccaatccctatggcatgcgaatgacaagagtcgttcggctgctcttccaggcattgcagctggatcccgacaaccaagtcgataaagacaaggtcggcgaaatccttagcgatgcttggcgttccctgcaacgctatatgacgtcgaccgacaacggattccgtctcaaactcggcgatctcgccgtagcgaaggtcgagaaagcgttttggtgtcccacgacacgacgcgtcctcgacacgacgatgagaggccggagcccttacgacgtagatggcatccacccgatggccgagccgatcacgctgccacgtctaccgtttccatggcgccgtagcccagatggccataatgttaacgaagacgcgatggatgcatggctcgcaaccgatcctgccgtcgttgcactccgcaaggcgggtcagtggggtgaccagcaagatcgaacagccaaattctcgccatggctgcgcgccgccgaacattcggcccaacaggccagcacaacgctcaggcgctacgagcgagaattcaaggcgggcaaaatcaacgtgctcggctgctccaccacgatggagatgggtgtagacataggcagcattgaagccgtcctcaataccaacgcgccgccgcagatcgctaactaccgtcagcgcgtcggtcgcgctggccgccagcgccagccgatcgcggtcggtctgacattgtgcaaggatcgtccgctcgatcggatggcgattgccaacccgctcgactatctggaacggcaagtcagaacgcctagggtcagcctcgaaagtccgaccatcgcgacgcgccacgccgccgcgttccttctcgctcgcttccttgcgagcctcgggagtgaactccacaaactcagcaatggtacgttcttcgcgctcaccgtcgaggcgactatggaaaccggagcgccccctgccgtttccttcctcgcctggctcgacgctgtaccgtcggaccctgcgcttacgggcgcattgtcgactctgcttgcgggaacacctgtcgcgccgggctgggacttgattgaggtgcttcgaacccgaatggaagggatcacggccgaattgcgagctgaatgggaggcgctcgcatccgccaccagcgagagtccggcaggtgacgtggagctcgcagccgtcaacaaggctcgcgaacttcagcgccggcgcctagagcgcggctacctgctcggcgaattggccggcagggggttcctgccttcctacgggtttcccaccgacgtcgttcagttcgttaccgaaactgcgagcgagaaatcggcgaaggagcggttgagtgacgatggcggcgagccgcaagagcgcagcttcgggcgcggctatccttcgcggtcgcgcgaagtcggaatctacgaatatgcgccgggccgagccattgtcgtcgatggcgtggtgcgcgagtctgctggtgtcacgctcaattggcagcggccagtgtccgaagcagggcttcgcgaaatccagagtctgaggacgatgtggtcttgtaagacctgtggcgccttgtcgtcgaaaccctccgcgatcgaacagacaccttgcgcccagtgcggatcgagcagcctgatcccaactcgctatctgagccctgggggcttctctgtcgacgtccgtttcaagatccatgacgatccatccgatgttggtggcggcaaggtggtcgatccttgggtctcggcgcgcgaagcgccttggcggtcgttgccggatccgtccgtcgggcgggtgcgtgctagtccgaatggcaccgtcttctggtttaaccccggcgagaacggtctcgggtatgcgctgtgcctccattgcggccgcgcggaagccgaggccaacgactcagagggtccgggtttgtcggagcacaagcctttgcgaggcgctccaaccgcaatcgacggcttcacctgcacgggcgctcccgaattcgcgccctatgcagtcacgcgcaatcttatgctgggtcatgagatccggactgatctctgtgaaatccagctttacgactgccgcacgcgggacatcgctttgacgatcgcgctcgccttgcgagaagccgtagcgaagcgtcttggcgtcgatgccgacgaaatggggttcgcggcgcccgccgcacccaacgttcggggtcgggataattggagcacggtgattttcgaccgggcgagcggcggcgccggattttccgcaacagtcgcacgcgatccagttggcctcctgtacgatgcgcgaacgttcctcaattgcggccttccaggccgatgcggcgatccaaatgccgagcgcgtttgtccccgttgcgtcctcgcgcctgacgcgcagcacgccgtcgaggcgaccgatcgggccggggcgtttgctctgctgaccgacacgttgtcgcgcatagcactgcctgaggaacatcggctattcggacatgcgaccgcctacgagtccgcgccgctggccgacgcgctgaacgaacggatggcaaccaacccggcagccgaactctacgtcatacttcatggcgagccagctgattgggatttcgatgcgtgggcggtggcgcctgtcgtcgagcgttggggtgcgcgcgggcgctctgtgacggtcgaagtcgaccaagcggcgctggagcgcgccgatgctgtcacccgccgtcgaatagctctgtggatcgaacgagcccgcgcgtcgctccgtgtcttgccaaaagcggatgtggacatgctagccatcgtgaccgccgccgaccaggtaaccgcctggcgttcgctcgatcgcggcgcgtatgggatcggctcggactgggcgagtacgtcggatgcaccggtagtgcgcggaccgacggaacagaagcgcctgctcccggcgacgatcgattcgcgatcgcttctcgtcgagcgggttcgagaaacgatcttcgagttggctgcagagctcgacggcccggtgagcggtttcggccagcggctgagagcgttcttgatcggccgcaacgagacgctcgcgactttcttttccgagccctgcatcgaactgcggtactccgatcggtacctgttcagtcccttggtagtgcggctagtcaccgaactcttcgcaggtttctcggaccctagcacgaccctttccgtagagaccctcatacagcgtcgagacaaccgccgtcctcgcattgggaagacattgaaggacgactggccggacgtggccgatcgcaacgtggtcttccagcacctacttgcgcgggttgccccgaccgccaggctcgtcctacatcaggacgtgccgcatcggcgacgcctagatttccgcacgtcgaaaggatccgggacgatcttcttcgatcagggcgtcggatcgtggagaactgctggcgacgtggcgttcgatccgttggcgccgaccgccgaccagcttcgcgctgtggatgtaccgttcattgtggagaacggtcccagtggcaccttcttcgcatccagattggattga

SEQ ID NO: 29713 - DNA, 3267 bp, Mesorhizobium sp. LNJC384A00
ttgggagcggaaggggagctggaggctgggctaaagtcgctgctgaggtcgagcggcctgacgcaccccgatggtcgcccgctctatgcgtacaggttcgcgcgcgcggacttcgatcgaatcggagcgaccttgcgacgatatggtttttcggcaattcatgatcgcaatggcgcggccctcatcgtttcgcacgtagcggagtggtttaggcgcgagcggagtggcggtcactgggattggattcgcccactgcgaaccatcggcctggattacggaccccacgccagggtgcaataccgtgatgtcgagagcttggtaagcctcgggttgcgcgtttggcgtcggcctgagccaaaagggggcgagcggctcctcgctatcgtacgtgaggcaggttttccggtagcatcggtccgtgaggatccgcgaatttcgtcatggttgaagaactcggtgctttgcgctgaaagaggcttttcgacccatgatgccgttggcgccgaggcttggcgtgtgtcggaccgtcttgcccaagcgcttttcgatcccgcgatcgacctctgcgacaggatcatcgagctgcgtgcgtcgctcccgccacccgaagcgcgcggcgatccggtcgactacctcgatcagctcaggcccggctggcgagtcgaacttccattcgatgtcgaaagcgaggacattcgatcgatggtcgagcagatcgtccgccttcgcgacgatagtgctgcggcgctcgatgtcgttcgacacctcgtacgtgccggcgacgcctggttggggcgggcaacgctcggcctgtccggccggatcgatctcaggcgtttgcctccctcggttgttgagtctattcgagagggccgccgggtcaggatatttccgcgtccgccattctccgaggagctgatggcagtggccgccatcgagacattccagaaggacgatgcgccggtgcacgagctgcgtgcatttgtggccaagttcgacgcgccgctcgcgttggaggacgaggcgcgcctactcgtgcagtcgggcaatacctcggtcggagagttcatcgcgaatggtggggaggcgctgcccgatgcggtcatcgcactccagatcgaacagatcgacgaaaacgaatccccgacgagcctgcgtgtcctcggatcgtcaccagcccagacgagccgtcccgcgctcgtactcgctgtacgcgacgagcttttcaacgctgtttcgttctcggcaggtttcaccgatcttgggcgttgcgctggatcggatcgtcgactcgtcagcttcagcggttctgctgctttcgatttggacggagcgcgctggtcgtggaggacgggggcggagcgtgacatcgacgcccgccctgtgctcgtaggcaatctcctgcccaaggtacgggagtccgtattcatcggtttgccgcagctatggatcgagcgagatggccacctcgctgcacctaggcgtcaagcgctccattggcgtccgcgtggaagaggaacatggcggccggtcgatggcagcaagccttggggccgcgtggagcttgctgtgatcgagaatggcgagctccggttggcgataggggcctccatcgtcccgccggcttttgacgtcgtggtggatcgcggccggagggagcttcgtattacagggctcgacacacgagtgctcgcggcgcgcggagcaaccaatctggatgtccggttcgaaggcgagttggcggtcgttcggctcggcccccctgcaggaatggccacgatcaccctccgaccccgttgggatgctgagctcgcactgaccattaccgatccaagctatgatctgcgtttaatcgacggcaacgacgtcttagtctcgccgcgctccaccttctcggttgatggcgtgaaggggctgcgcattctcgccacgcgcgaggtatctctgtgcatggaattgcgcgcgaacgatgctccgcgcctgacaattgcgcgtcgcatatccggcgagattcctctttcagccttcaccgatgcgatcacgcaactgctcggcagctcggagagcctcgacgcccgcgtcggcctctgcacgatcggcggaacggcagatatcgccgaagtgcgctggtacgccgaggatatcgatcccttcgcctcggcccagcctaactcctcttctgtgcttgcggccacgcacgggctagaactccatgggattgcggtcgcccatcctgccgcaggcgcagtgtccctcgtgggtccccaaagccaggctaccatgcgcgctgaactgagccgcatgctcccacccggcccatggctcatctacggtcggcgtcggcaaggcgcgaagatacggccgaggatcgtgcccgcgacggcgagggcgcctagggaagaggaaaccttgctcgaacgagcgatcggcgttgatggatacgccgctcgagagactgctttcattcaggcctatgcgcgaccggatcaaatttcgccgcgggaccggcgtataatcttcgatcttctcacgcttgctcgacgtgagggcttgcccatctcgtctattgacgcgctgaaggcactcggccgctcgcccggcttcgccgtgctgctgctcgcctcttgcgactccctggatgagcgcgcggggctgctcgacctgcagcgcgacttgccgttcctatggtcctcgacgattgtgggggactggttgcgcgccttttcaattcggatcgatcatgcgcgcgcacggttgaccgaagttggcatcgatagcagcattgtctaccgcagtctgatcagcgccctcggcgatattgtcggcttgagacccgaactggcgggccatgcaaaggcggtctttctgatgcagatcgcccccgaaatggcgcgggagaacaaggctgtcgacggcgcgagcgtccatttcatgcaaatcgggagcggtgggccgcgacgcgagatcgaccgcctgatcggccgccacgacgacgccgacttaccaccacaaggcttgctcggccccagaagccgagccgcccagcaattgcattggggaccctatgatccgagcttcgcggatgtcatcgcggcgccctttgtggtcgcagaccatgcgagcgggcgcacgaccctcgatcgaggcgaactgcgccgatgccgcgatgcctggctctacgaccctgaatatttcgaagcgatggtgccgataggcattgatgaggttcttcggggtttggcgcgggttggagaaagaagatcatga

SEQ ID NO: 29714 - DNA, 6129 bp, Mesorhizobium sp. Root102
gtggggccttttgaaacactccggcagatcaggcgacgggccagcgaggcggtgatcgcgcagtcaggcctctcgcatgcgggcctgcgcagtagattgcgcgaactgttcgattccgcggacgctggcgagggcgcgctactgcaacgcccggtaatcgaaggcgcgcatccgttcctttcctgcgaccaaacaatggccgagttgacgggaagccttctccactctgattttgtccaggcgctcgaccggaccgatgatgccgaataccgttttccgcgcgaacggaagccatttcgtcaccaactggaggcgtggaaccagctcctcaagccgggagagccgcaatccgtactcgtttcctccggcactggctccgggaaaactgagtgtttcctgtttccaatcctcagcgatctcgcccgccagattgaacccaataatgcgaggctcgaaggcgttcaggcgataatgctctatccgctgaacgccctcatcgagagccagagaatgcgtttgtccgcttggacaaagccattccggggcaaaattagatactgcctgtacaatggtgatctcgaacagaacaccccagcctccgaacataagctcagacctgaagaggtccccgatcgtgttgacctgcggcgcagcccaccgcctatcctcgttaccaacatcaccatgcttgagtacatgctcgcccgcgacgatgatcgtccgattgtcgaaaagtcgaagggaaagctgaagtggatcgttctcgacgaggctcattcgcttatcggtgcagcggctgcggaaatcgcgctgctgctccggcgcgtccttatggctttcgaagtgaagcccgccgaggttcatttcgtagcaacgtcagccacgatcggtggcggcgaaaatgttcgcagtcagctgaagcggtttctcgccgatgtcggaggcattcccgacgctcaggttcatgtcatcgagggcgcccgtcgcatgccgctgcgccccagcggttccgccactccaatgccaaagaatatcgcttcagccgatgcaaatgaactctacggcgcgctggcctcgcgcgacgatatctggcgcttggtcgaacgcttatacaaaggcgccgtttcccttgatgacttcgaagctgccgccaaagctcaggagctgactgccgaagaactggcactggcgctgtcgcgcgcgacacgcacggacccaagaacgcctgagggcgaacgtcttgcgcctatccggatccacgcctttgaaagagccgttccgggaatctggggctgcatcaatccccaatgtcagcaagccaccctggaatggccctatggagggatattggcccagcgcgccgaccagtgtccgcactgttctgcgccagtccttgaaatcatcaactgtacgtcctgcggcgaaccctttctcgaaggattagaaagggacggtcgcctgaccacgccagtgcggaccccgcctcgcgacgagtttgagttcgacagcgacgcatacccagtggccgacgatgatactgatcccgacgatgcccagcccgacgatggcgatttaggtcttgatcggttgtttgcggcgaggccgagcccatcagcgaggccattctatcttaatcggaaagactggaccgtatgtgatcaggcaactgaagcaacgttgacggtcgtgagtgacgagaagcgtggcggtgcctgtccttgctgcggcaaggggccgacgcgagagatcccccgcgtgctacgcccgcttcggttcggcgcgccattcatgatcggaaacgcggcacccttgcttctccaaggcgtagaggcgacgccgctttcccacactggcgaccggaggccttcaggcggcagacgcctgctttcgttcaccgacagcaggcagggcacggcacgcatggcggccaaactgcagatcgagtcggaacgaaacttcgttcgctccttcgtttatcatgccgtccagaaatccatgcatgcgggtacgggcgcgacagtcgaggcggaaagcgttcgctttgaaattgcaagcctcgagagcatattgaatgaccaatcccgcttgataatcgagccgattatcaaacagaaacgcgccgcgctggaaaagctgatcggtggcggaactgacggtatcgaatggggcgacctggtcgataacctcagccggagcatcgaggtcgatgagtggattaaggatgtctggcagggccgcgacattgacccaaccctcttcgccgactcgcggaacctagcagaattccttttgctgcgggaattcgcgcggcgaccgcgggcggcaaactccatagagacacttggactcgcgaggcttcgcttcccctatatcgacagccgcggggaaggcgatttgcccaggccttttcgcgatcgaaacaagactgcggccgattggcagtcctatctgtcagccgtattaacattcttcgtgcgtgcgaacagcgcgattgcggtcaagcgccagacccagttctggctcttgccaaaggcgccagtgaagacgcttaagggtccgggggtggacgtatccgccgaaagaaatagccttggctggccgcaggctgccggaaagggtcgccgtccgcgaccggtctctctcttggtcgagggattatcgctgaatctggccgaccctacgcatcgcgatgatctcgaggaatgcctcgaccgcgcatggcgcgatatccagccctgcctggccgatgatccgcggggactttcgttccgcaaggccttcgtcgcaccagtcacggacggctttctgtgcccggtgacgcggcgcgtactcgacgccgcgccgttcggcctcacgccatatgggctggatcagcttgatgcggggctaaaaagggcgactgcagtccagatgccgcggcatcctctgctgggagaagacccgattggacgcgaggaggcgcgtgcgaaaatcgacgaatggcttaacgccgacaagacgatcgtcgggctgagagagctcgcttactggaacaacttatcagaccgcatcgcgttctttgctgactatgcgcgcgcggcggaacattccgcgcaacagccgagcaaaaggctccggcgctacgaaggagagttcaaggacggccggatcaatatcctgaactgttccaccacgatggaaatgggcgtcgacatcggatctgtctcctcagtgatgatgaccaatgttccgccgtccatcgcttcctaccgccagcgggtgggacgcgcggggcggcgcaatcaggctacatctcttgcattcacattctgcaaggatcgcccgcttgatcgggaggcgtttcgggagcctgagaaattccttcaacgtgcaatggcagcgcccaaggttgctctgaatagccggccgatcgttcagcgccacgtaaatgcctttctgctgtcagccttcattcattcgcttcgcggtgacgcgcttcggatgaccatcggcgcattcttcggttgtcccgctgatccgtcgatgaatcggactttgaaggcggagcgttcatccgccctgtttgctggatggctagacaagccatcgacccgccagctgacgatggaaagcatcaataccatcacacggcggtcggtgctcgacggagatgtcaccctcgtcgatgaagcgctggtggcgctcgacacggttgagaagcgattccttgaggaatgggaaggccttcggctgatggcgcgggaggaaggaattcaggaagctggccggacgcgcatggggatcgagttgcagcgacactgcgacgaatttctccttagcggtctggccgatcgcggttttcttcctggccatggatttccatccgatgtggtgaccttcatccccgctcgtcaatcaggcaaagaatccgatcattcgacgcgcgacggacggcgacagtttcgaagtctcgggccgcagcgctctctcgatctggcgatccgggattatgcgcccggatccgaggtcgttatcgatggacttgttcataaatcagctggcgtaaccctgaactggaagcggcctgcgaacgaagacaacttggtcgaggttcaaagccttcggcaacactggcgctgcttggactgtggaacggcggaaacccgctcggggcgcaaatccgacagctgcgctgattgcggttcgcgctccatcgagcgcagcaaatacataaggcccgccggctttacggtggatagccggacggtcgcccatgcggagaccgacatcgttgactatgtgaaaccacaggaaccggtggtgtcggcgcgcaacgctccatggcgaggactgccggatccatcctcgggccgctatcgctctagccgcgacggcctggtcttctattctaacaagggaccaaccggccacggttatgcgatctgcctgcattgcgggcgtgcggaagcagaaacggcgccggagccaaattcaccgctcccgggccaaatggcaggtcatctgcctctgcggaggagaaagggtgacctgtccgatatatgcgcaggaaatgacctgacgtggaaaatccaacggcattttgctttgggccatgaaatcacgacagatgtcgtggagattcagcttgcccagaactgcacacgagccgttgcaacagcgttgatcatagccattcgagaagcactggcgcacgagcttggcgtcgaagctgacgagatgggattcgcggctacagaatcgaccaatgctgcttcgggaaaatcggtctcccttctgcttttcgacagagcgtcgggtggtgccggattctcagtcgcgctggaacaacatctcgcagcggtgttgcgcggcgcggaagacatcctcgattgcgcaacgcccggctgcattcatgcttgctcgtcgtgtgttttgactggtgacgcgccggacggcgtcgacgcgctggaccgcaccggcgcatacatcttcctgaagactttcttgcggattccggagctcttgatttcggacgacctcttcgtaccaggtgcaatcatcagcaccggaatctacgatgagatcgacagcacactgcgggcaactaccgcgactcagctgactctctttctgcacggagctttcgaccccgcagatcttgtggactggcaaggcgcgaaccaactctcgaaatggacgtcgagcggaagaaagatctcgattggcctccccaggaacgcggtcgcgagcatggatgacgcgtcgcgccttgtattgcgagactttgcggtcaggcacgggattagcttgatggaggtcgatccaccccgcttcccgaacggagctgccccgatcgccgcaattgaggccagcctcgcgcctacccatctgtgggtcagcagagaccggaccgcagctcgcctcggacgcggctggggtgacccgctggatcatccgatcgcgcgagccgcctacaatttaacgctggataagtccgaacttgatgatcggctgttccttccaactcaaggtgcagagttcgtcgagatcgacagtgaactcgacgttacggccgcagagttcgggaaaactgccgcagcaatgctgcgcgccaagctgagaaattgcggcgcatggcgggacgagccgatcgagcgcatctgctatgaagatccgtttgttttgtcacctttagttacgcgcctactgatcgacactgtggccgaacttggtctcggttcggacggtagcctgcgcctttctatagaaacacgtgccccaaagccgtatgacgcagggaaattccccttccaactagcccaagattggcctgatccgggcattcaaaccgcaaccatattggcctacgggtctctgaggaacgtcaaggtcgatatcgcccataagaacgttccgcacggccgtttcatgacgatctgcttttcgtcaggacttgaggcgaaagttatctttgatcaaggatttggtgcctgggcaatcgcacatggaattcgtgtgcgccatgatttcacggcgccagccccagcgcaggcggagcagatgcttcatggcagttatgttcttgcgcgacgcggtgttgggaaaacgtaccttgtttgcaaccgaggcaaaacggtttccatcaagtaa

SEQ ID NO: 29715 - DNA, 5325 bp, Mesorhizobium sp. Root102
gtgacacgagcaacggaaatagccgacgcactcgggcggtatgcgctggcgctgcagaattggggagcgcctgacgaccacccgttcaatggcgtatacgcatccagcgtcgatgttgttgaaagggacggtctacagacacgtcagcggaatcttgtaacgcgcattggcgcgcttctcacgaactacgagaaagtgggatcgtttcttaaaatcgcaaccgcgccgaccctcgcagcgatcgcccgcttggacccaatattgcggcttgccgcaagtggtgccgaccttgatcatgacctgcttatacgtatcgtcaacagcggaaagcaccgggaaatcgctgccgccgccgcggcgggaatagcctggcgagttctgtacaaccaaagtcaggcgatttttcagcgatcggcacacgtggctgagatcgtgcaccttcgcaagccgctggaggcagggcgatcctcgttgatccggcgcattggtccagcctaccgccacgcgagcatggaacttgcttctcatctgaacggtcggctgcctgcgtccgcccttgaccgaattggtctcgtagagcgattggctgcaatccaggccgcgaaatccgtcctctcgcaacaggaaacgcttctggagcggacgcttggccagcactaccgtggagaagccacggattttgaacaggtagctgcagcctgcgattgggtcgcatcactggatagcacacgcttgctgccaaatccgctcaagctgattgccttgagcgcgaaacgcgaaattgtcgcgaagtcgatttcttacttcaaagatcagagtgccaggattgaacgcgagctgagcattcttgcgaaggcgtatagccttgacccgctcgcgttcttcggagcgtcggagttttcagccgcccggctcgacaaggtcgcgtttcgattcgagcgaatggcagccgaaatgcaccgactgcccgagtggctcgaactccagcgcctcaagaaggcgatcgacgacctcggggttgatgagcttgtctccgcaggagaattgaaaaggaaagcacccgacctcgtcgaggcgatagacggtgctttcattgaggacgaactccctacgcccacagaagaagtgctcccggtccccaaggacacggaggtcgccagtcctgccaaggttgacgatcccgaggatgtgccgccagaaacctcagagcaggcggtactaacaagcgcaggcgaaagtattccagccgagctgactgccgcacgccacgagcatttcgaccggagcgaatcccgggatctgctggaagacaacggactttcgccgtcaaacgttgaagaatcgattggaccttcgggacactcggccaacttggacgtcattgttgccgaaccgacggacgaaagtgcaacgtctcctcgccttactacgagttgggcggatcaggaaagtgacgctgacaacgaacagcttgcggtcaggcctactgcctccgaagaggctgccctcgccgatcacgcgtcgacaggtgccttgcgacttctcgatcccctgtcgccggaggagccggactcccccacccttgcaacctcagtttcggaacttgatgaaggcggcgtcgacatccagtccgccgcatatgacacaggctcttcatttgacgcgcctgcaacagagatctccgacgcggcagattttgaatcccctgaagaagatgagctttcccacttaatcgaaagtaccgataatccggatgaactcgctggtgaaattgatgaaccagtagggacttcgctcgacgcgtctgaagctgaggcgtccgccgcccctcaaatcgcgtggtctacttctgaatcttcaacacccttcgatctgtccaggctttcggatttagggctcgcacagcatttcgtaatgcaccgtgaaagttcagaagagttgcggaagctgaacgaggtactcaaatcgcgcaactcggatgcggccagcgatctgcacatcgaggtccagcaagcactgcgccagttgcgccatctcgacaatcgtcagcagcgtccggcgatcgtcgccacaggaagcggtcctgtgcgtgactggatccgcgagttcctgtcggcgcggggactaacatatgccgacgggaggccgctttatcggtaccgcatgtcggatgaggaatacgccaaggccaaatcaacgctcgtcaagcttggccgcgacggaaggctgaacaggccagacgatcgatccggtgcgctttttgtcatctactgtgcagaatggtttcggcgcgaaagcagttccaccttcctgcgttggaacgaccttgcgcccgacattttcgataccctggctcaaaataaaaaggccgatctgacgagtcgcgggctcatccattggcggcgcgacctacgcatgaacggctcaacgcatgagtatctgctgacgctcgcactcgagggcggatttccggtccggcttttggatgagtcatcgcgcgggtggctgaaggaatacttgcgatcgattctccgaggagcactgggcctactgcaacccgagaccagtgaaatcgagagtattgcccatgaagaaaaggggcaaatgcgcaaaagctaccgccacaacgagtttgtcgcgctgtgcgctgaattggtcgaacggatactgttttggcggagaaaggccgaaagcgaggcccaggccaatctcccccatgcccagttgctcgacttgaagcatcccgaatggcgagaggacctgccactatacattcccgcaggcgaaaccgggatcgcgagcgaaatcctttccggactaatgaatgagcccgccgctgggctccccacctctggaatagaagccacccgattcctcgtgaagatcgacggtatgtggcaacccgcaatccagatccgggccgacggagatatgccggcagctcgaataccacatgcgtcgaccggacttggccgattgcgcgcggtcgcatcgggcgcgctggccaataaggtctccggcgagttcgccttgttcgaacccccctctggcacacaaaagcgctggcgtgtacggccgctcgttcggctcgacaaaataattccggatatcccgttctcgatgccgatattggcaaacctgacgacgaatggagtcaactgccctatcgtctggccacgaggcgaggccgtcaactccgagatattggtgttgcggaaagtcccaacggaggccggcagcgcggaggcgctgagccttgctggcaggggatcacaccggagcagtgcccacagactgtatgttttatatccggaaggatgggccgttcggcccgccgatccggacacaattccagacatcgaactccttccccatttgcaccggtgtctcgccacgatttcaggcgccacttattttgaaagtggcgagagcggcgctgcgcgatatcgcgttgaacccaactctgacgaacgtgatgcggaacttgatctcggcggcaagccgtctgggcaattcgaaagcgcggatccggattgtgacctgatagaaggtccgcttgcgccctcgatcgtcgagaacgggggtctgaggcagccacggaagggagagatattctggcggcgaccgggggacaagtggacggaatatgtgcgacctatcaaggcagtcggtcgaattgacgtctcatggagggatccggaagcgagcattcagctcgaaaagcgccaagtcgccatgataacaccgcttgcgggcatatcggggcgcatgacctccgcgcaggcgtgcgagatatcggtaaggggcctagacgactggacaatccagttcccgcaagatctcttcgagcaatctgtaacatctgccaatcagatgaagatgcggtttcggagccgaccagcctaccggatacgagcggttctcatcccgccagagggacacggattctcagtctggctaaagattgccggtcgcgatgccgcaatcgtcctttccgatggcactgttctggctgcaggtcagtcgatcgacatcggcatgctccgcggggccgtggcggtatcgccctcccgcacggctcttgacgtcacgctcaaagggtctcgctcgtccggcctcactgtgcaggtcgatgaggaatatcccctcggcgctttgcgcaatgggatcgacgaaattctggctggagcgacagaacacgacgccgtggcagaaatggtcttccttggccagcagatgcctttccggatcggccgctaccgctatccgcccccggcatatgttgatgggcagatccgcttcagcacgtttggattgaacgacacgacccgccctgtcgctcgcatgatcctctccccgagacacgatcacgcgcttgacccggctggcgacaacacgtggacgctcccggagagatgcgttggtccgtgccttgtctatctgcgtgacggaacggaggtcatttcgaagccgattgtcatcggaaagagcgaggcgatgccatcctcaagcatattgctgactgcaatggcaaaatccgcgcatgcggaacgccagaccgcagtcctgtcggcgctggctgatattgcagggagcacgtcggcaaccttagacatcaactggctgaccgaactgatcgcacatctgaatggcttgcccgcttccgccttcgatgtgcttcggctgttgccgagatctcccgtcgccctgatccggctattgctgggctgccgagatgacgtagagcgaaacttgatttggagtctccagaatcagcttccattcctctggctgcaatttccgaaggattcatggaaggcggcgttaacggcggagtatcacacatacgaaagcgcaatttcgggtctcgcagatgatctgcggttgaaactgtgcggagagcggatgattgcgttgatatccgcggtttgcgatctggaacccgccctttcatcgatatttcagagcctaggattcatccgggcccaggttgcggcgcgaagcgtccgcgatttagctcaagactatattcgcgatcaacggctacgggacgctgatggacctgctcggcgcacacaaggcagcgctgtgattgcggaaaatctcgtgatttctaaggtaacacttcccgaggaactgcacccgcgcttcgacttgcagtccttcgaagggctgcttgtgcctgtgcttatcgcggcatgcgcgaatgggcgcatggcgatcgatgcgcagtgcctgctcatcgctcgccgaatgatacgcgagagccctgcatatgtttccggcgcctatccgcatttcctaaagaagtatgaggtgatttga

SEQ ID NO: 29716 - DNA, 6243 bp, Methylobacterium mesophilicum SR1.6/6
atgaacctcgtgcgacccgccgccgccttcgggaccctcgatcgcatcgcggcgcgctcgaccgctgcggtcctcggttggtcggccctgcgctcgcaggctctgcgcgcgcatctcctcgccaccatgccggcgggcggcgatccgaacgcgttcctggccgagccgatcatcgaggcggcgcacggctgggcgatggcacgcgagaccttcgggagtttggcaggcacactcctgagcgagagcgtggtggcggctctcgacggccgcgatctgcccgatccggacgggcgcgagcgctaccgcctgccgcgcgaccgccacccttacacgcatcagctcgccgcttggcgtcatctgctagccgatacgccccgttcggtcctcgtgacctccggcaccggttccggcaagacagagtgttttcttgtgccgctgctcgagcacctggcgcaggccgcggccgcccggggcggcccgttgcgcggtgttcaggcgctcatgctctatccgctcaacgcgctgatcaacagccagcgcgagcgcctatcggactggacgcggcccttcaaaggcgatctgcgcttttgcctctacaacggcgaaacgaaggatcaaatcccggccgccgaacaggcgaagacgccggaggaagtccgctcgcgccacctcttgcgccgcgatccgccacccgtcctcgtgaccaacatcacgatgctggagtacatgctgatccgcaaagaggatcagcccatcctgcagcgctcgcaaggacagctgcgctacattatcctcgacgaggcccactcctacgtcggctcgcaggccgcggaattgtcgctgcttctgcgtcgcgtgatccgggccttcggcgtcgagccggagcaggtgcgcttcgtggctacgtcagccacgattgggcgcgcgaacgatccgcgcacactcgacgcgctcgccgcttttctcgcggaggtcgccggcgtgtcgcgagacgctgtcagcgtcgtcgagggacatcggcagcccccgactctgccgccagtgcgcgacgccctcgccttgcccacgcccgaggagctggcggtcgccgacccgctgtcgctgttcgaccgcctgggcagcacgccggcgtttcagcgcggcttcgcgagccttgtagctggtccgcgcacggcagccgagtggttcaagaccgttggtgtctcccccaaccacggcgacgcgctgctcgccgccgcggcccgcgcgcgcaaagtcctgtccggcgagaccccgacacacctgcagccgctcaaggtacacggcttccaccgtacacaaggcggtctatgggcctgcgccgacagcaattgccgcggacgggccggaacccttctcgatggaccggactggccgttcggcgcggtgttccaggagcggctcgatcgctgcacgcactgcgaggccccggtgttcgaggtggtcttctgcaaccagtgcggcgagacggcgctcgatgcgctgcgcgaggcggatcgtgaggggattgagcgactgacgcctgcgcgcgcggcgcgcacggaggacgaattcctcactgaactcgtcgaggagacgcccgaggccaactccgaggatccattcgccactaaagagaccgtcgatccccaccgcgtgctgatcaccgcgccggcggcgtcgaaggcgcgaccggtcgtgctagcgcgggcgaccggcaccatcctcgacgcgggcgagccggggacgctcgcgctgcccctgacgagcgcggaccaatgcccgcactgcggtgtgcccttcgacggcaagggcctgcgcctgcagaatttccgggtcagcggtccgtttctcctgggcagcatcgtgcccgaactcgtgagcggcgccgagccgttggctggcaaccgcgagacgccgggcgtgctgccggcagccggccggcagatcctgaccttcacggatagccgccaaggcaccgcccgcctcgcggccaagctgcagcgcgacgcggagcgaaatcacgtgcgcgcgctcctctatcacggtgtgcaggcccagcctttcctgacttcggatctgcgccaaacgctcgaagcgaaacaggcagaacttgctcaagtcgatgcggcgatcgcagctaacccggcactcgcgagcgtcctgtccctcggtcgccggccaatagtcgacgagatcgcgcgcctacagccgagcgagatgcgcctgacctgggcggacgcgctgcagatgattcagaaggatgagatctgccggcgctggatccgagaggcgatctggacggagcgcgaggcggccttctcggatgagactaccttcgcgcgtttcctcgtcctgcgcgagatcatccggcagcccaggacggcgaacagtctcgagaccatgggacttctgcgcctatgctttcaccacatcgaggagagggtcacgacctctcccagcgcattcgctcggcacgggggcacgcttgccgactggcgcgacttcctgacactcgcgctgacgcgggtgtttcgcggcaacgtcgccgtcgacacggaccgggagatcctgcattggatcatgccggacgtcccgaagcggttcatcgtcccgcccggcagcaacacatacggcgataagaagctgcgcgcgtggccgcagccgtacgcgacctcggcacgacggcccatcatcgtctcgctccttgccgcgggtctgaagctcgatttcgacaatccggcgcaccgcgacgatctcatcgcctgcatgggacacgcgtgggaggcgatttggccgctgctcaaggccgactcggtctcgggcacgcagctcgatcccgagaagatcacgctcgcgccggtgcgcgcggcttatctgtgcccgatcacgcgtcggatcgttgatcgcacctttcgcggcctctcgccgaacccgcgcgcgcccggcgacgtcttcctcccagccgaaccgatcgcgatgccgagcttcccattcgcgttcgggcgcagcggcgtctccgcggtggaaccagacgcgatcgaggcttggctgaacgaagatactgacgtgcgtgcgttgcgtcagcgcggccactggagcgatctgcacgaccgcatcgcgcgccaggatgccttcttccgctcggcggagcactccgcccagcaacccggacgccggctgcgcgcctacgagacggcgttccggcgcggccacatcaatgtgctcaactgctcgacgacaatggagatgggcgtcgacattggcagcattggcaccgtcctgatgaccaacgtgccgccctcggcggcctcataccggcagcgtgtcgggcgggcgggccggcgtggccaggcgatcgcgctctccctcacgctgtgcaaacaccggccgaccgagctgtcggtgtttcgcaaccccctctctctcctcacccggacaatcgcggccccaacggtctcgctcgacagcgccgtgattgcgcagcgccacgtcaacgcgctcctgctcgcgcgcttcctggccgcgacgggcgccgagttgcccaagcttgaggtcggctacttctatgggctctacgccgacggcacgcgcgccgctcccggcgaatcccctgccgagggtttgctcggctggatcgatgccccgacgacgcgcgccgacgctggcctcgtcgctgacctcagcgtgctcctgcgcggcaccccgtttgaggcccgtgccgaggtcgcaatcgacggcacgcgggatcagctgagcgagctccggtctgccttcgagcaggagtgggacgttgttcgcgccgatctcctcgtggctgcgaaggagcggagcgcagcacacacggcgctgaaaatcgccatgcagcgcctgactggggagtacctgctggccgagctcgcctcgcacagcttcctgccagcgcacggcttcccgacagacgtcgtacccttcgacaactcgaacgctttcatcaaggagcgtcgggccccggatcaagacgacgacgcttcgaaacgcctgcgccatcgcgatgcgccttcccgccagctcgacctcgcaatccgtgattacgcgccaggttcggagatcgtgctcgacgggattgtctatcgatccgcgggcgtgcgcctcgactggaagcgtcccgcgagcgagtcgagcgtcccggagattcagtcgctgcgcttcgcctggcggtgtgagcgctgtggggcgactgacactgcgcaccggcagcctgaggcgtgcccaagctgcggcgaggccggacgcgcgctcaagtggcatcgttacctacgcccgtccggattcacgtgcgaccccgtgacgaaaccacattccgagatcgagagcgtcgccttcgtgccgccacgtctgccctgggtggcggcacgcggtggcgcgtggacgtcgttctccgatcccgaggttggacgatttcgtgcgagccgcaacgggatggtgtttcactacacaaccggagcaacggagcacggttacgcggtctgcctgtgctgcggacgcgcggctccggaaacgggtccgcgggaggacgcaccgccgctgcccggcgagatgctggcgcatcgccccttgcgcacaagccgcaaggagcagccgatctgcgatgcgcaagaccgcccattcgccattcagcgccatcactaccttggtcacgaaacgattacggacgtcctcgaactgcagctgaccgggcttgagggcccggcgatcggttacccaattgctgcggctttgcgcgatgccctggcccagaagctcggcgttgagccgggggagatcggcttcgggatcacgcaaacccgcgaggctgaaggcaccgaaccgcgctggtcgatcttcttgttcgatcgagctgctggtggcgctggtttctccgtgtgggccggaccgcatctcgtcgaactcttggggtcgactcgtgcgatcctcgactgccggcatggtcagcattgccgacaagggtgcgtggactgcgtgctttcgcgcgaccttgagaaccaaacaattgaccggatcggcgccctttcgttcatgaaggagcgcgtcttgccgcgcttggcgatcccggcagaggaccgtctgtttgccccggcagagacgtttgcggagatgcagccgcttgccgacgccatcatgcgcgagatggagaagaagcctgacgtcggactgacgctctggatcgatggcgatcccaaggactgggatgtggcgcgctggcctgccgtttcgctcgttcggcgcttggccctgcgcgatcgcaaagtcgagatcgttgggccgaaagcacttctgcaaggggcagacgagagcctgcgcctcacgatcttcggcttattgatgcgctcgggtgccacggtgcgccaagtgacaaagccacgtaccgtcggagcgggggtcgcactggcgcaggtcggcgatgcgacaagcgggatcctctgggcgagccgctcgcgcgaaggttgccttcccggtccagcttggggaggagacgccgaagcgccgatcgtccgcggtcatagcgaaggcctcatggactctggcgacgtcatcgacgccacagcttttttgcgtcccgcgcccgacacagtgctgattgatgtcggctcggagctgaacggcgcgattgaagcgttcggatcgagcttctggcagctcctaatcgccaaggttcccgtgctggcacattacgcgcgagggcagacgccactcacgagcatggactattcggatcgctacctcctcgcaccactcccgttgcgtctgatcatagaagtgctcgcgcacgcaccgggccgcacgtcgcagacgacgatcagggtcgcgactgcccagggtggattgaaccgccacgccacgtctccgagctacatcgagcacgattggcagcacgatccccactgtcacgcagtcacggggactctgctccgaggtctcagtacgcgcgccgtcctacaccgcggcgacaaacgaaaccttccacacggccgcacactcacgctgcgctacgcggacggaaccagtgtgcgcatcgttctcgatcaaggtgtgggctattggcgcccgcttcagcgcggcacacgcttcggctttcagctgtccgcagcgggacaggcggagaatttgcgcaccgccaagctccaggtgcaggcttcatccacacatcgcacttggatcgtggtgacgcggaccgccgctgcctccagctcgaagcctgggtga

SEQ ID NO: 29717 - DNA, 3426 bp, Methylobacterium mesophilicum SR1.6/6
atgaacccggcaacgctcaacccgttcgcgttcacggccaagcagtttctcacccagcacgggctcgaccagcctgatgggcggcaactctacaaataccgcttgagcgatgaggctttcctcgctctgcgcaccttgatcggccgctggcccgcgcgctcgcagatggtggattcgtcgtcgcggtatatcggtgcagtgttctgcctgttcgtcgcggaatggtttcggcgcgacttccaggaggggcagtggagctgggacggcccctgcggcgccgtcgggctggcgaaggacttcccgacgctgcatggcctcacggcgaccggtcttggcttctggcgccagggcctcttgcgcggcgtggataacagtcgagagtacctccactcgctcatcgtgcagggcggcatcccaaccgcgttcgccgcgcgaggcgagggctggctctccgcgtacgtacgcgccgtcatgggtgatctcgaagccggtgcggatctgtcatccgagcaggcgctgcgccacgcgcgcttccacgatcaccgcgtgcccgtctcgttccgcgtggcgccgttcgtcgagatcgtcgcgcagctgagcgcccgcctgaccgagctgcgacgcgaggcgcgggcgggggcgggtcagagtgacgttgtgggctggctcgacggattctcgccgggctggcgcgagagcctgccgatcgcgatggccgatgggtccgccgcgcgcatgatcgagggcctcgtccgcctgcgacctgatgccgaggccaacggctccgtgacggtcgagcgtctgctcctgcgcgatcccgcatgtggcgggtaccgcttcgcggctcgcctagcgctcgacgggacgctcgatctcacccaaccgctcccgcccgacgtgtttgccgacctcgcgcgccagacacgcgcgcgcctcttcccgagcggatccaccgccgagcgcgtcactggttgcttggcgatccttgagccgcccgagtcggacgagacgacgcgacgcgcggatggccgccgtccctggtcggcccgcgctgtcctgagcgaggcacggcggctcctcgcgccgttcccgttcgacgcagacgtcgaggtgcgcctgcacgccgacaaccgcgatgtagcgacgttcgtgcttccggccgggcgccgcgttcttgagagcgtcctaagcttccgcgcaatcgatgacgaagacacgccccgcgagttgcgtctgatcggctcgggaagcgtgcgaacgcgcgaggctgccctttacttcacggtcgcggacgccgcggacgcgcagatcacctgcgacgccggcacggccgagaccatcgcgcggttcgccggcctcaccctccaccgtcttaccgggcaggcccgcatcaccacccgcgatggcgtgatttaccgcctgcgcacggccagcgacgacgaggttgcccttcgcctagatctcagtggaccggctccagacgatctgagcgcgacagtacctttgttctgcggcctgcccgcgattcgcgtcctgcgtccgggcaacgtcatgacctcggcccccgtgggcgggctgcgctggcgcccgctcggagttggggccgggtggcagacgctcgatcgcggcagctccccgatcggcctcatcgaagtcgggctgtttgaggacgacgcgttacaggaccgtgtgcgcctagccatcgtgccggcgggtgcacgggttcgtcgaccgcgcccgccgcgcgatgccgccgccatcgtcctggaaggcttcggcgcggtcacgttcgaaccgcgcccgcgcgatccgcagatcaccgtgacgcaatcgcgtgatccggtcgctgacagcgtcgccttgaccgcgcggtccgatcgcccgctcccgcagcgcctgcacatcgagttgcgtcgaccgggacgggccgggttcgaggtgcaggtccccctgatcggctgcgaggtcgcgttctatgccgccagcgggcgtcggctgcgtgagcgtgctgagatcgggctagcggatctgcgtggcctcaccgttgaagcctcagcgccgggtcgcatcgacggcgaagtccacgcacgcggctcgcgcggcgagatcttgcgcttcacccgccggttcgagaggagcttgccggccgcggctctgcgtgcagagatcgaggcgctgctggctgcctccgacgacctcgacgcggtgatgcgactgaccgcgtccgttgggcccaccgaatgccgcctcgatgtccggcgctacgccctggcgttcgaaccggacccggcgggtttgcgcgtcgaggcgcgcagcggtcaggcatggcgcgcccgcccggaggatgagggcggcgcgatagcacttgtcgcccggcggttcgcggacctgtgcgggccggaaatcccattgtccgtgctggcgtccgcagacttcgcagcgactgcgatagggctggcggacgtcgagggtcccgtactgtactacgcacgccggtgtgcggacgggcgcgtcgcctcgcgtccgctcctcgctgctgggggtcgcgctccggaaacggatgccgcgccggcctccgatcgccttgcgcaggctctgctgatgccggcgcgcaacttgcgcgaagaggccgtccgcgcctgcttgctcgacctcgggcggggccggtatcctgaggccgcggacgcgatcctcgcgctcgtgcggaccttcagcgacgttctggctccgcagaccttcgatctgctgcgccacctgagcgccgaaccacgggcgatggtcgaggtgatggcgcacgcgcaggctgacgacttgccgctcgtgctctccctcgaagagcagctcccgttcgcctgggtgtcgagcccgctcaccgcttggatgaaagccttcgtccggcgtcgggaacgtctcgaggccgcgctcagcgccgcctcatccgatccaacctggcgtgcggacctcgccacgcgcgaggcgtgcggctttctcgacgggctcgaggcgatcgcgcccgccctcgcgatccacgtgcgcgccgccaagctcggcctcggggtcggagatgccgccgaagtcttcgggagggggctcgacgggcgcgtccttgcgcaacgcgtcaggaccctggcgagcgcgtgcgtcggacgcaaccaaggtcgcgatgactggccgcggcacgcctggatccgaggcgacagcgcgatcaagaacctcctgccgctcgagctttccgtcttcgctgagatggcgctgccgatgctcgacgcgccctacgtcgcggctgcgcttgctctcggtcaggcgaaaccgagcgcggatctcgagcggcgtctgcgcgtctgccgcttctacgatccggcctatttcgagctggccttcccgcatgctgtgcgctgcctctgggcgcggttgagcgcagcctga

SEQ ID NO: 29718 - DNA, 6243 bp, Methylobacterium mesophilicum SR1.6/6; identical to SEQ ID NO: 29716

SEQ ID NO: 29719 - DNA, 3426 bp, Methylobacterium mesophilicum SR1.6/6; identical to SEQ ID NO: 29717

SEQ ID NO: 29720 - DNA, 6240 bp, Methylobacterium sp. Leaf121
atgaacctcgtgcgacccgctgccgccttcggaaccctcgatcgcatcgcggcgcgctcgaccgcggcggtccttggctggtcgtccctgcgctcgcaggggctgcgcgcgcatctcctcgcttccatgccggcgggcggcaatccgaacgcgttcctggccgagccgatcatcgaggcggcgcacggctgggcaacagcgcccgagaccttcggaggcttggcaggcacgctcctgagcgagagcgtcgtggcggccctcgacggccacggtctgcccgatccagacgggcgcgagcgctaccgcttgccgcgcgaccgccacccctacacgcatcagctcgccgcttggcgccatctgctagccggcacgccccgttcggtcctcgtgacctccggcaccggttccggcaaaacagagtgttttcttgtgccactgctcgagcaccttgcgcaggccgcggccgcccggggcggcccgctgcgcggggtccaggcgctgatgctctatccgctcaatgcgctgataaacagccagcgcgagcgcctgtcggactggacccggcccttcaaaggtgacctgcgcttctgcctttacaacggcgagacgccgaacgacgtccccgcggtcgatcaggcgaagacgcccgaggaggtccgctcgcgccatctcctgcgccgcgatcccccacccgtcctcgtcaccaacatcacgatgctggagtacatgctgatccgcaaagaggatcagcccatcctgcagcgctcacagggacagctgcgctacatcatcctcgacgaggcccactcctacgtcggctcgcaggccgcggaactatcgctgctcctgcgtcgcgtgatccgcgccttcggcgtcgagccagagcaagttcgcttcgtggccacctcggcgacgatcgggcgcgcaaacgatccgcgcacgctcgaggctctcgccgtgttcctcgcggacgtcgccggcgtatcgcgcgatgccgtcaccgtcgtcgaggggcatcggcagcccccaaccttgccgccggtgcggggcgacctcgtcctgcccacgtccgaagagctggcggtcgccgacccgctgtcactgttcgatcgtctggggagcacgccggcgttccagcgcggcttcgcgagcctcgtggcgagtccgcgcaccgcggccgattggttcgagaccgtcggcgtcacgcccacccacggcgacgcgctgctcgcggccgcggcgcgcgcccgaaaagtcttgtcgggcgacacgccgacccccctccagcctctcaaggtgcacggtttccaccgcacacagggcggtctatgggcctgcgtcgacgccggttgcatcggacgggccgggacgcccctcgacgcgccggactggccgttcggcgtggtgttccaagagcggctcgatcgctgcccgcactgcgaggcaccggtgttcgaggtggtcttctgcaaccagtgcggcgagacggcgctcgacgcgctacgcgaggcagatcgcgaggggatcgagcggctgacgcccgcgcgcgcggcgctcgccgaggatgaattcctggccgaactcgtcgaggaggccaccgaggccggcgtcgacgacccgttctccggtcgagagaccgtcgacccacaccgcgtcctgatcaccacgccggtctcgtcgaaagcgcgaccgatctcacttgcgcgggcgaccggcgccatcctcgacgcgggcgagtcgggggcgcttgcgctgcctctgacgagcgcggaccagtgcccgcactgcggcgtgcccttcgacggcaagggcctccgcctccaaaattttcgggtcagcggcccatttctcctgggcagcatcgtgcccgaactcgtgagcggcgccgagccgctggccggcaaccgggagactccgggcacgctgccggccgacggccggcagatcctgacctttacggacagtcggcagggcactgcccgcctcgcggccaagctgcagcgcgacgcggagcgcaaccacgtgcgcgcgctcctctatcacggtgtgcaggcgtggccttacctgaccgccgatctcaaggcgcagattgaagccaagcaggccgacctcgcgcgcctggaggccgcaatcgtgtcgagtccttcggtcgcgggcgccctggagcccgtgcgccaaacgctcgtcgcggagatcgcgcgcctgcagccgagtgagacgcgcctggcctgggcagacgtcctgcagatgattcagaaggacgagacctgccggcgctggattcgggaggcaatctggacggagcgcgaggcggccttctcggatgagaccacgttcgcccgcttcctcgtcctgcgcgaggtcatccggcagcccaggacagcgaacagccttgagaccatgggcctcctgcgcctgtgcttccgccacattgaggagacgatcgccacgccgcccgaagcgttcgcccggcacgggggtacgctcgcggactggcgtgacttcctgacgctcgcgctcacgcgggtctttcgcggcaacgtcgcagtcgacacggaccgggagagcctgcattggatcatgccggacgtcccgaagcgcttcattgtcccgcccggcagcaacacctacggcgataagaagctgcgcgcttggccgcagccgtccgcgacctcggcgcgcaggcccatcatcgtcgcgctcctagccgcgggcctgaagctcgatttcgaaaatccggcgcaccgcgacgatctaatcgcctgcatgggacacgcctgggaggcgatctggccgctgctcaagtccgactcggtctcgggcactcagctcaatcccgagaagatcacgctcgcgccggtgcgcgcggcctacctgtgcccgatcacgcgccggatcgtcgatcgcacattccgcggtctctcgcccaacccgcgtgcgcccggcgacgtcttcttgccggctgagccgatcgtgatgccgagcttccccttcgcgttcggccgcagcggccccgccgcggtggaaccgaacgcgatcgaggcgtggctcgatgaggatgcggacgtgcgcgcgttgcgtcagcgcggccactggagcgatctgcacgaccgcatcgcgcgccgcgatgtcttcttccgctcggcggagcattccgcccagcaacccggacgccggctgcgcgcctacgagacggcgttccggcgcggccacatcaacgtgctcaactgctcgacgacaatggagatgggtgtcgacatcggcagcattggcaccgtcctgatgaccaacgtgccgccctcggccgcctcgtaccggcagcgcgtggggcgggccggccggcgtggccaggcgatcgcgctttccctcacgctgtgcaagcaccgaccgaccgagctgtcagtgtttcgtaatcccctctcgctcctcacccgaacgatcgcggcccccacggtctcgctcgacagcgccgtgattgcgcagcgccacgtcaacgcgctcttgctcgcgcgcttcctggccgcgacgggcgccgagttgcccaagctcgaggtgggctacttctatgggttttacgccgacggcacgcgcaccgcgcccggcgaatcccccgccgagggtttgctcggctgggtcgatgctccgacgacgcgcgccgacgctggcctgaccgccgatctcagcgtgctactacgcggcaccccgtttgaggcccgcgccgaggtcgcgatcgacggcacgcgggatcagttgagcgagcttcggtccgcattcgagcgggagtgggacgtcgtgcgcgccgacctcctcgtggcggccaaggagcggagtacggcgcacacggcgctcaagatcgccatgcagcgcctgaccggagagtacctgctcgccgagctggcctcgcgcagcttcctgccagcccacggctttcctaccaacgtcgtgcccttcgacaactcgaccccattcatcaaggaaaggcggaatccggagcaggacgacgatgccacgaaacgcctgcgctatcgcgatgcgccctcccgccagctcgacctcgccatccgcgactacgcgccgggctcggagatcgtgctcgacgggatcgtctacaggtccgcaggcgtgcgcctcgactggaagcgtcccgcgagcgagtcgagcgtcccggagatccagtcgctccgcttcgcgtggcggtgcgagcgctgcggggccaccgacaccgcccaccgccagccggaggcctgcccgagctgcggcgaggcggggcgcgcgcttcggtggcaccgctacttgcgcccgtccggcttcacctgcgatccggttacgaagccgcattccgagatcgagagcgtcgccttcgtgccgccgcggctgccctgggtggcggcgcgtggcggcacgtggacatcgttttccgatcccgaggtcggccgattccgcgcgagccgcaatgggatggtgttccactacacgaccggggctacggagcacggctacgcggtctgcctgtgctgcggacgcgctgtcccggagacgggctcgcgcgaggacgcgccgccgttgcccggcgagatgctggcgcatcgccccttgcgcacaagccgcagggagcagccgatctgcgacgcgcaggatcggccgttcgcgatccagcgtcatcactacctcggtcacgagacgatcaccgacgtcctcgaattgcagctgacgggcctcgaaggtcccgcaatcggttatccgatcgccgcagccctgcgcgacgcactggcgcagaagctcggcgtcgagccggccgaaatcggcttcgggatcacgcagacccgcgaggccgagggggccgaaccgcgctggtcgatcttcctgttcgaccgggctgccggcggcgccggcttctccgtgtgggccggcccgcacctcgtcgaactcttggggccggcccgcgtgatcctcgactgccgtcacggacagcattgccgagggggatgcgtagactgcgtcctgacgcgcgacctcgagaaccagttagtcgatcgaatcggcgctctcgcgttcgtgacagagcgcgtcctgccgcgcctggccgttccggtcgaggaccggttgttcgcccctgccgacacgttcgcggagatgcagccgctcactgatgccatcatgcgcgagatggagcggcccgccgccggtctgacgctttggatcgacggcgatccccaggactgggatgtggcgcgctgggctgcagtctcgctcgtccggcgcttgaccctacgcgaccgcaaggttgagatcatcgcgccgaaaacggccctccagggggcagacgagagcctacgcgtcgcgatcttcggcttgttgatgcgctcaggcgccacggttcacatgggggcaaatccctgtgccgttggggcaggggtcgccctggctcgagtcggtgacgcgacggacggggtcatctgggcgagccgcgcaaaggaggcgtgccttcccggtccggcatggggcggagcatcccagacgccgatcgtgcgcggtcgcagccagggctcgttcgatgccggtgaggccgtcgacgccagcgccttcctgcgatccacgcccgacacggtgctgatcgatgtcggcccggagctgaacggcgcgatctcggccttcggttcgagcttctggcggcttctaatcgccaaggtccctgcgctggcggccgctgcacgcgggcaaacgccgctcgcggggatggattattcggaccgctacctgctcgcaccgcttccgctacgcctcatcatggaggtgctcgcgcacgcgccgggccgcaccgcgcagacgacgatcgccctctcgaccgcgcagggcgggttcaaccgtcacaccgcctccccgaactacatcgagcacgattggcagcacgatccgcattgtcgcgcggtcacggaggccctgctcaaaggcctcagccccagcgctacgctgcgccggagcgacaggcgggacctcccgcacggtcgcacactcacgctacgctttgcggacggcacaggtttgcgcatcgttcttgaccagggcgtcggctactggcggcccctgcaccgaggcacgcgcttcgactttcagtcgtcggccgccggacaggcggagggcctgcgctcggccaaactccaggtgcaggcctcgtccacccatcgcacgtggatcgtcgtcacacggctgccgccgcgctctagcccaagggtgggatga

SEQ ID NO: 29721 - DNA, 3426 bp, Methylobacterium sp. Leaf121
atgaaccccgcaacgctcaacccgttcgcgttcacggccaagcagtttctcagccagcacgggctggaccagcctgatgggcggccactctacaattaccgcttgagcgatgagggcttcctcgctctgcgaaccttgatcggccgctggcccgcgcgctcgcagatggtggatccgtcgtcgcggtatatcggcgcagtgttttgcctgttcgtcgcggaatggttccggcgcgacttccaggaggggcactggagctgggacggcccctgcggcgccgtcggtctggcaaaggacttcccgacattgcacggcctcacggcgaccggtctaggcttctggcgccagggtcttttgcgcggcgcggataacagtcgagagtacctccactcgctgatcgtgcagggcggcatcccaaccgcattcgccgcccggggcgatggctggctctccgcctacgtacgcgctgtcatgggtgatctcgaggccggtgcggatctgtcctccgagcaggcggtgcggcacgcgcgcttccacgatcaccgcgtgccggtctccttccgcgtggcgccgttcgtcgaaattgtcgcgcagctgagcgctcgcctggctgaactgcgacgcgaggcgcgtgcgggagcgggtcagagtgacgtcgtgggctggctcgacgggttctcgccgggctggcgcgagagcctgccgatcgcgatggccgatggatccgccgcacgtctgatcgagggcctcgtccgcctccgacccgatgctgaggccagcggctccgtgacggtcgagcgtctgctcctgcgcgatcccacgagtggagggtaccgcttcgcgacgcggctcgcgcttgacggaacgctcgatctcacccaaccgctcccacccgacgtgttcgccgacctcgcgggccggacacgcgcgcgcctcttcccgagcggattcaccgccgagcgcgtcaccggttgcttggcgatcttggagccccccgggtcggacgagacgacgcaacgcgcggatggccgccgtccctggtcggcccgcgccgtcctgagcgagccacggcggctcctcgcaccgttcccgttcgaggcagacgtcgaggtgcgtctgcacgccgacaaccgtgatgttgcgacgtttgtactgccggccgggcgccgcgtcctcgagtgcgtcctgagcttccgcgcgatcgatgacgaaggcccgccccgcgagttgcgcttgatcggctcgggaagcgtgcgaacgcgcgaggccgccctctacttcacagtcgcggacgccgcggacgcgcagatcacctgcgacgccggcacgaccgagaccatcgcgcggttcgctggcctcaccctccaccgtctcactgggcaggcccgcatcacgacccgcgatggcgtgatctaccgcctgcgcacggccagcgacgacgaggtcgccctccgcctggatctcagcgggccctccccagacgatctgagcgcgacggtaccattgttctgcggcctgccagcgatccgcgtcctgcgtcccggcaacgtcatgacctcgccccccgcgggggggctgcgctggcgcccgctcggggtaggggccgcgtggcaggcgctcgatcgcggcagcccgccgatcggactcgtcgaggtcgggctgttcgaggacgacgcgttgcaggatcgtgtgcgcctagccatcgtgccggcgggtgcacgggtccggcgaccgcgcccgccgcgcgatgctgccgcgatcgtcctagaaggctttggtgcggtcacgttcgaaccgcgctcgcgcgatccgcagatcatcgtaacgcaatcgcgcgatccggtcgctgacagcgtcgcgttgaccgcgcgatccgaacgcccgctcccgcagcgcctgcacatcgagttgcgtcggccgggacgggccacgttagaggtgcaggttcctctgatcggccgcgaggtcgcgttctacgccgcgagcgggcgtcggcttcgtgagcgtgccgagatcgggctcgcagatctgcgtggcctcaccgtcgaagcctcggcgccgggccgcatcgagggtgaagtccacgcacgcggctcgcgcggcgagatcctgcgcttcacccgccggttcgagaggagtttgccagccgcggctctacgtgcagagatcgaggcgctgctggccgcctccgacgacctcgacgcggtgatgcgactgaccgcgtgcgtcgggcccaccgaatgccgcctcgacgtccgtcgctacgccctagcgctcgaaccggacccggcggggttgcgcgtcgaggcgcgcagcgggcaggcgtggcgcgcccgtccggaggatgagggcggcgcgattgcactggtcgcgcggcggttcgcggacttgtgcgggccggaaatcccgctgtccgtgctggtgcccgcagacttcgcagcgaccgcgatcgggctggccgacgtcgagggtcccgtcttgtactacgcacgccggtgtgcggacgatcgcgtcgtctcgcgtccgctcctcgctgccggaagccgcgctccggaaacggatgccgcgccggtctccgatcgcctagcgcaggctctgctgatcccggtacgcaacatgcgcgaggaggccgtccgcgcctgcctgcacgatctcggccggggccggtaccccgaggccgcggacgcgatcctcgcactcgtgcggaccttcagcgatgtcctggctccgcagactttcgatctgctgcgccatctgagcgccgcaccgcgggcgatggtcgaggtggtggcgcacgcgcaggccgacgatctgccgctcctgctcgcccttgaagagcagcttccgttcgcgtgggtgtcgagcccgctcactgcttggatgaaagcctttgtccgacgtcgggaacgtctggaggccgcgctcagcgccgcctcatccgacgcgacctggcgtgcggacctcgccacgcgcgaggcgtgcggctttctcaacgggctcgaggcgatcgcgcccgcccttgcgattcacgtgcgcgccgccaagctcggtctgggggtcggagatgccgccgaagtcttcgggagggggctcgacgagcgcgtcctcgcgcaaggcgtcaggacgctggcgagcgcgtgcgtcggacgcaaccaaggtcgcgatgactggccgcggcacgcctggatccggggcgacagcgcgatcacgaccctcttgccgtccgagctttcggtcttcgccgagatggcgctgccgatgctcgacgcgccctacgtcgcggctgcgctcgccctcgatcaggtgaaacccagcggggatctcgagcggcgcctgcgcgtctgccgcttttacgacccggcctatttcgagcaggccttcccgcacgccgtacgctgcctctgggcgcggttgagcgcggcgtga

SEQ ID NO: 29722 - DNA, 6009 bp, Methylobacterium sp. Leaf86
gtgctaggtcaaagcggcctcaaccacgtggccctcgtggctgagatccggcgtcgcttcgcctgcacggacgcggaggccggcgcacttgtgcagcagccggttgtcgaggccgcactcccatacgtcaccagcgctgagaccctggccgacatcgcaggcgatcggctacatcctgcggtcgtcgacgcactcactgcggtggggccggaccgccgctactcgttcccccgtgacctcaaaccttaccgccaccagctgaaggcatgggcgctgctttccgacccgacgccgcagtcggtgcttgtcactagtggaacaggctcgggcaagacggagtgcttcctcgtcccgctcctagacgacctcgcgcgggaggctgacaaggtcggccgtttgaagggcgtgcgcgcaatcgctctttatccgctgaacgcgctcattgcgagccagcaggagcgcctgcgcgagtggaccgcgccgttcgccggccgcattcggttcggactctacaacggggaaatgccggaggacgccgctgtcggagtgagccggccagagcaggtcggtgatcgccggacactacgcacggacccaccaccaatactcgtcacaaatgtgacgatgctggagtacatgactgtccgccatcaggaccgcccgctcatcgaggcatcgcggggccagttacgctggatcatcctagatgaggcccacagctacgtcggctcagccgctgcagagattgctctgctaatccggcgagcactcctcgccttcggcgtcacgccctcccaggtgcggttcgtagcgacgtcagccacgattggcgagggcaaagagctcctcggcaagctccgaatgttcctgcgggacgttgccggcgtgcccgaggagcgggtgcacgtcgtcgtcggcgagcggcgtctgcctgccctcccaaaccccgatacacatcgtaccctgaccgccaatgaccttgaggacaccgccaccctttcacgccacccgggtattcaggcgctgatccgagggctcaccgcgggccccctgacctgggcgtcgttcacgaccactgcgcgtgcagctggggtcgagccggaagcattactaggcgcgcttgcacggcgtggcgcggaccaacgcgagccgcttctcccgctacgcatccatggattcatgcgcgcagtgccagggctgtgggtctgcctaagaggggactgcctaggccggccatcgggcgactggccgttcggtgcccttctgcacgagcgtgccgacgcctgtccgcactgcgccgggccggtgctggagatgatatcctgctcggaatgcggcgagccctaccttgacgctgttgagcggaacgggcggctacgctgcaacaccggcctggccgaggaagacgagtttgcctccgcgagtgagacggagggcgtggtagagagctccgcggaggaggaggccgccgttggtgcggcgggtgaggcgaacgtttcggcccagcgtcgacccgacatcgcgcggctggtcgcggtgcgagggctacccggcggccgccccctccacgtcaccgcagcggacggtcttgtccgcgacagtgtcggcgagaatagcctgactctaagtgtccacgaccgtggcccgccggagtactgcccagcctgcaccgctagcgcgcgaccggatcaggcgcgggggacggtgctccgaccgttccgctatggcgcccccttcctgatcggcaacgctgcccccgtgctgctcgacggcgtcgccccccgcgaagccgatccggacctcactgtcccgccgccggccggggggcgccagctgctgtcgttcacggacagccgacagggcaccgcccgtttcgccgccgcgctccaggccgcttccgagcgcaacgcaatccgggcgataatctaccacgcggtacaggacagcctaaggcctcccgcgatcgatgggacagtcgcagcgaagctcgacgacgagatccggcagctcgaggcagttgcggtcccggccctcgccgatttgttgaaggagaagcgagaccagcgcgcggtcctaggtcgaccgagcgacgacggtctgccttggcgtagcgtgcgcgacatcctcgtgcgcagaccagaagttgagcactggatgcgccaagtctggcgcgtgcgcgaccggcgcttcgaccaggaccccgaggagttcaccaacttcctcctgctgcgggagctcgcccgccgcccccgccgcgccaacgcgctcgaacccctcggcctcgcgcgcttgcgctttgcagtgatcgagggcttggacgagaaacgcctgcccaacacctttcgcgtacgggggcggtcgatcatcgactggcgcgactttttgcacctgctcatcacggtccacatccgcaaccccttcgcggtccgcatcaacccggccgaccagcattggcttatccgccagggcttcccgcgcatcctggtcgggccgaaccgcaagaaggtggtggcccgcgatctcccttggccgaaggcgcggcttgtgggacgcccgtcgatggcggttcgcctgctgtcacagggcctcggtctcgacgtgagccaagccgagcaccgcgctgagatagatgacgtgcttagcgccgcatgggacgccctgctcccgctgcttgcttgccccggcgagggttccatctatgccctcgatttcgcgaccgcgcacatcgccccgatagtccaggctttcgcctgccccgtgactcgtcgcctgctcgacacgacgtttctgggcttgtcaccgtacgcgactgagcgcggggatcggccggccggcgagcgttgtgcatcgattgtcatgccggcccacccgaatccttacctgctgcccgagcggggcggggcggaggtcgtgcagacttggcttggcaccgacgaacgggtcgcagcactgcgcgcccgcggcctctggagcgacttacacgaccgcatcgcgctcgggtcgccctacgcccgggcggccgagcactccgcacagcagcccccaagtcgcctccgccgctacgaggacgcgttcaagcggggcgagatcaatattctgaactgctcgaccacgatggagatgggcgtcgatatcggctcggtgtcgtcggtgatgatgacgaacgtgccgccttcgatcgccaactaccgccagcgggttggccgtgctgggcgccgcgggcaggggctctcaacagccctaacctacgctcgcgacacgccgctcgactgcgagaccttccgcgatcccgcggcttatctaggccgccggatcgaggcgcctaaggtgacactcgactcgcgccgcatcgtgcagcgccatgtcaacgcgctcctcctcgccgcgtggttccgggaagcacagggccaggtgctgaagacccgggccggcgactttttcggctgcccgccgaccgtcccggcgggtcgggtacaggacccaccctctgccctgttccgcgcctgggtggtcctgccgagtaccgcgcaggcccatatgcccgcagtcgaaacccttttgcgcggctcggcactcgctgggcaccctgacgtatgcgccgctgccgcggccgcggtccaggaggcggagacggccttcgcgacggaatgggacgcgatccagacccaggccgcgggcctcgaccgcgacgccgcgcgcaaggctctcggcatgcaggtgaagcgcatgtgcggtgagtacttgttgggggagctggcagacaggggcgtcctgcccggccacggttttcccaccgcggtcgtgcctttcgtgcacaaggaggatccagacgaggaggccgcccctcagggcgatggcaaccgcttccaccgccgcggctacccgacccgaaacctagatctcgccattcgggactacgcgcccggtgccgaggtggtggtggacggtttggtctacgcctcggccggcgtgaccctgaactggcagcgccccgcggccgcaaacgcagtcgctgaggtgcagagccttagatggttctgggaatgcggccattgcggcacagctgacacgacccggttgttccccgagcagtgcgcggcctgcggccagactttgggaggtggggacacccaccgattcctccagcccgctgggttcacagtcgatccccgggagaagccgcacgccgagatcgagcaggtgcgtttcgtcgagcccgaacctgagcgcgtcgtcgcgcgcggtgcagcctggaagccgttccttacgcctgcacgcgggcgcatgcgcgcgagccatgagggtctggtcttttacgcatcgtctggcgagcacggcgccgggtacgccgtctgcctcgagtgtggccgcgccgaagctcatgatcatccgattgaccctgccgcgagaccgctccgcgaccacaggccgttgcgcttcactaaagccgacgccgaaggcttctgtccgggcaacgaccgcagcttcgccatccagaccggcctcgcactagggcacgacatcgccactgacgttgccgagattcagcccatggctcttgcctcggacggcgctgcctgggcgctagcatccggccttagggaggcgctgactcgccgccttggaatcgaaaccggggagatcggactctccgtcgtacggcgctcgtccgcgctcggcggggcgacccactccgtctacctctacgaccgagccgccggcggggccggcttcgccccacgcctagttgaaatgttcgaggaactgctgcgcgacgcgcgcgccatcttggattgcctcagacccggctgcgacggcggatgttcggcttgcgttctagcgagcgaccttcatcggcaggcagaaatactcgaccgtcgcgccgccctcgacttcgtgaaatctgagcttgaggccatcgccggcccgtcgcacgaagatcgggccagcgagggggcggtcctcgcgcgcgacgtcgccaacgaagtcgcgacccaagccggtgcgggaagcgaagtcgcaatcttgtggccggccgcgcccttcgatcccgcgtccttgtcccagccccgcctcctcagcctcctccggcgtttaatagactcgggcagcgcaatcacgctctgtgtgcaaggcgatctgctgaatgcgctcgacccagcccagcgcctcgcccttagggatgccgctgttcggtacgggctacatttggctaccggggatgcgctgcgctaccccaacggagcgcgcgcgatcgccgccttatctggcgggcgcatttgggcttcgcgcgacgacgcatcagctcggttcggcgacaactgggggcttggccgcgaggcgcccgtcgtcacctttctgggacaacctccagtctaccagccgttcgaccccgacagtctgttgccacggcacggcacgcggttcatcgaaccggggcgccggcttgacggtccaatccgcggactgggtgatcgctttttaaccctgcttaggccggaactcgatgcagcgggcctttggcggccgggtcagctgacagcaataagctacagcgaccgctatgttcgctcgcccctcgtagcgctactcgtcacgcgcgtcgcggcccgcttggcggcggcactgtcgggcccgcaaaggcggccattgttgctgatgacgacaccgctcaaatacagtgacagtgtccctcaccgcttgtcacacgactggcgaacagaggccgatcgtgcagttgttatccgacatctctgccaaactgccggacttgatctggagctcaaaattgaaccctgttcgcactcgcggcgtctaactctcagctatgcggacggtccggacgccgtgctcgtcctcgaccaaggtttcggatttctgaagccggcagcatcagtgccacgcttcgattttcaagaggcagcgcaaatgcaggctaagcgcctcagtggcatggatgtgtcctgctcctccgacggagcgagctatatggtggtcgtcgcaggttga

SEQ ID NO: 29723 - DNA, 3486 bp, Methylobacterium sp. Leaf86
atgtcaggggacacgctgcgggagaccgccgaccggatcacggcgtgcgctggagacgccgccgcgctagccacaatagactccctgctgatacaccgccccgagccggaagcccgccgactgcggatcaaaattgccaatctgcgccgcatgctccgggatcgcggggcgcaaagtagcgcgtgtccgccgcgcacgccggttcattcgggcgttatccgacagcgcgggtgcctgcccgagcgatgggtcgtcatcctgacgcgggccgggctcagctcgccggacggacgtccgctccaccgctaccgcctcgacgaccgagagcacgcggcgattggcgaggagatccggaggcgtgcccgctcgaacttggccgacgctgaccgggagaccggcgcgctcttcgtgttgtgggccgcccactggtttcaccgggattaccgtggcggaatccggcgctgggacgacctcggtgccgcccttggcgtgcacctggacggcacagcggcgcgccacctgactcgtcagggcctctcggcttggcgtcgtccgccccagaagagcgaggcggcgttgcatcagtggctgatgaccctagccgtcgaggggggcttcccggccggcgtgctcgagcacgccgaagcctgggccccgcgctacctgacgcgcgtcgtcggcgcgctgttgagcgtggacccgctcgacgaggacactgcgctcgccgccgcgcggacgcagggggaccacgcgccgcgggcataccgccaagaggtattctttgccctcgccgccgatcttggggcgaccatcgtgcggctgcgcagggtcgtcgaggccgacgcccgggcgcgaggcgttccggcgagcgcctggctcgacgcgatgcggccgggctggcgcgacgacttgccggttcgagctggcagcgaggcggccgcgcggctggttgacgggctgctggtagccgaggcgcttcatactgcaggggacggacggatcggctgcgagcgggtcctatggcggcgggacggactctggcgacccgctcttaagttggccctggatggcgtagcccatggcggtgtgtgccagaccctgctggggcagcggcagcgactgcgcgcccaccctaccggtccctttgcgcgctacgctgccggggaattagcaattttcgagccgccaaccgacccagacgacggctggcgcgtgcgcccctcgcgccgagatgtgctgctgagcggcgtgccctttgcggtgccagtctgcgtcgagttgcgcgacgatggacgaccggttgcgacgacggcatggcccggcggtgaagcggtgcgcggccgcctcgcgatccttgcccccgaagacggcgtcgacggcgtccttaccctaatcggcgaaggatcggggcagtatagaccggagcctctaatcgtcgttgtaccgcagtcttggactatttccccacacggcgaggcgtcgacccgcgacgccctccctgatcttgctgaggatgggcggcagctgtggcgggtaacgggcgccgtcatcttgcgctcgcccgacggagacgtgtaccgcgtcgctgcgggtcagggcgggaccaggcgcgatcggttgagccttggcggccccgaaccgagaggactagtcagcgccgagcccgatgtcgaacttttcgccggaccgccctcgattcgggtctgcgaggggcagaacgtgcgggccgcgcgtccggaggaaatccgctggcgccccgagggagagcgcggatggcgccgggggccatacggcacgggccggatcgtcatcgcctggcgcgatcccgagacgggctacatccgcgaccgccgccatgtcgcgctcctgcctccggacgcgcgtctcgcatgccggcgggacggcgccggtgcagtctacactccggaaggctttaccgccgctgtgcttacgtctccggatgcggatttgctcctggagctgcgcggcgacgaggtcgtcgcccgcttcacaggtcgcccctgtcggaacgccacctttgaccttgcccttgggggcggcaaacccgtccgcgtgagcgcgccgttccccttagaggcgggtatcgcccgttggtcgggcgcttgcgttcggggcggcccccgccccgctgttgcggcccgcctatccctctccgatctcgccgattgtgtggctttcgggcgcggagtgtgcaccctgcaagctatgcttcttgatcgtgatcgtcgccccctgcgcggtggggcggcgcgctggacatttgacgaggagctgccgctacgcggcgtcgccgacgatctggcggcccttctcagacccttctccgacatcgacgtcgtggcggacctcaccttcgacaacggcgccgagtactggcaggtgggccagttcgagacgtctctggttctgcacggcggccgtcttgtgcatgtggcaggatgggtggaggacgccgacctgcccctcgtggggcgctccctcgacaacctcgcggtcgaggtaacccttggcacgagtacggctgccgaccggatcaaccagagggcgccacccctggtcgaagggctggctggcatttggctgctctatctccggcgcggggacgcagtaatcgcccgcccatcgatcgtgtgcctcggaccccatcgctcgacggaagcggagggcctgcctgcggctgtgatgatcgcgcataccgaggaccgggaagtgcggctgcagagccgcctcgccgagatggctgacggcgcaccggggacgcagtcggacgttggctggcttgcgacactcgcagccggcctgaatgggctgccgcctgcgaccctcgacgtcctcaagctgctcgcccgcttccccggcgcgctggcgcgcctcgcccttcatgcaggggaggcagagcggtcggccgtgctcgccttggccgacgcgctgccgttcgcttgggccacggtgagccacgccgactgggcgaaggcgtcggcggtcgcggaggccgagctcgttgcacagctccagggggcggtcgccgacgctgctcccctggctcgggcagcggtccggcatgcagccgagagactcgcccgcgcggaaccccttcttggctggcccctctatgctgcgggtctgatcccgccgcctgcggctcacgggccgggccttttggaagcggcgcgcgaccacatccgacgccacggcgaccgcgtgagtgagaacggcccgcgcggcagcatgtttcgaaccgcggacgcgggcgagttgccgcgcgagttcctggaagcgtttcacccggtccacctcgagaccctcgacgccccgtgcgcggccgcctgcgccgcggccggccggggacggccaagcgacgacgcggtgcggcgcatcaaaacggcagcgcgcgccgataccctgtatttcaccgctgccttcgacgctcagttcatgcgcttggcccggtcacgcaaactgtga

SEQ ID NO: 29724 - DNA, 6108 bp, Methylobacterium sp. Leaf90
atcgtgaggttccccgtgtcgtccccgcgcttcatcacgcccgttgccacgctcgatgccgtgcgcgagcgggccaccgaagcggtgctcggtcaaagcgggctcaatcatccggccctcgccgctgagatccggcgccgcttcgcctgcacggatgcggaggccggcgccctcgtccagcagccggtcgtcgaggccgcgctgccttacgtcaccggtacggagaccctggccgccctggcaggcgacaggctgcatcccgcggtcgtcgatgccttgaccgcgccggggccggaccgccgctacgcgttccctcgcgacctcaaaccctaccgccaccagcgcgaggcgtgggcgctcctctccgatccgacgccgcaatcggtgctcgttaccagcggcaccggatcaggcaagacggagtgcttcctcgtcccgctcctccacgacctcgcgcgtgagtcggacaggatcggtcgcctgaagggcgtgcgcgccattgccctctatccgctcaacgcgctcatcgcgagccagcaggagcgcctgcgagagtggaccgcgccgttcgccggccgcatccggttcgggctctacaacggcgacatgccggaggacgacaagttcacggcgagccctccggagcaggtcggggatcgccggaccctgcgcctggacccgccgcccatcctcgtcacgaacgtgacgatgctcgaatacatgacggtgcgccatcaggatcggccgctcgtcgaggcctcgcggggccagctgcgctggatcatcctggacgaggcccacagctacgtcggctcggccgccgccgagatcgcgctcctgatccgccgcgccctcctcgccttcggcgtgacgccggcccaggtgcggttcgtcgctacgtcggccacgatcggcgagggaaaggagttgctcggcaagctccggcgcttcctgcgggacgtcgctggcgtgtccgatgaacgggtacacgtcgtcgtcggcgagcggcgcctgccggacctcccgaatgccgatgggccacgcacgctgacggccgacggtctcgcggacgcaagcatcctcgcgcgcaacccaggcgttcaggcgctgatccgggggctgaccgcggcccccctggcctgggaatcattcacgatgaccgcgcgggccaccggggttgagccgcaggctctgctggaggcgctggcgcggcgtggcagcgacgggcgagagccgcttctgccgctgcgcgtccacggctttatgcgcgcggtgccggggctatgggcctgccttgggcgcgattgcgccggccgaccgccgggcgactggccgttcggtgccctgctgcacgcccgcgccgacgcctgtccgcactgctccggaccggtgctggagatcgtctcctgctcggaatgcggcgagccctacctcgatgcccttgagcgggacgggcggctgcgctgcggcaccggactttccgagaaggacgagttcgcctcggcgagcgagacggagagcatgcccgagcccgtggaggacgaggatgccgcggccgcagacccgaacgaggcgggcgttctggctcggtctcggcccgacatcgcacggttgatcgcggtgcggggcttgcccggcggccgccccctccacgtcactgcggcggacggcctcgtccgcgacggcgcgggcgaggacagcgtgaccctgagcgtccacgaccgaggcccgccggagcactgcccggcctgcgccgcgagcgcgcggccgggtcagccccgggggacggtgctgcgatcgttccgctatggtgcccccttcctgatcggcaacgccgcccccgttctgctcgacggcgtcgccccccgcgacgccgatccagccctcccagtgccgccgccggccgaggggcgccagttgctctcgttcacggacagccggcagggcaccgcccgcttcgccgccgcgctccaggccacctccgagcgcaacgccgtccgcgccgtgatctaccacgcggtgcaggatagcctgcgcccgcccgcgatcgatctgacggtggcggagagactggacgcggagattcgcaagctcgagccggtgatcgctcagtttcccaacctggccgaaatgctgcaggacaagcgggagcagcgcgcggccctcgctcgaccgagcagtgatggcctaccgtggcggcgcatgcgcgacatcctcgtgcagaggcccgaggtcgagacctggatgcgccaggtctggcgcgtccgcgaccggcgcttcgaccgcgaagccgaggccttcgcgactttcctcctgctgcgggaactcgcccgccgtccccgccgcgccaacgcgctcgaaccgctcggcctcgcccgcctgcgctttgccgacatcgaccgcctggaggcgaggcacctgccggatgccttccgcgcacggggacgaacgatcgccgactggcgcaacttcctccacctcctcgtcacgatcaacatccgtaaccccttcgcggtccgcattgatcaggccgaccagcactggctcatccgccagggcttcccgcgcatcttggtggggccggaccgcaagaaggcggcggcccatgaactcgcctggccgaaggcacggcccgtggggcgcccggcgattgcggtccgcctgctggcgcagggctttggccttgacgtgagccaggctgagcatcgcgccgagatcgacgaggtgctgcgcgctgcctggaacgccctgacgccgctcctcgcccgtcccggcgagggcgccctctacgcgctggacttcgagaccgcgcacatcgccccggtcgttgaggccttcgcctgtccggtaaatcgccgcctgcttgatacgacgttcctgggcctgtcgccgtacgcgaccgagcgcagggaccgctcggccggcgagcgtctggcgccgattccgatgccggtccatccgaacccctacctgctgctggagcggggcggggtggaggtagtgcagacctggctcgacaccgacgaacgggttgcgaccctgcgcgcccgcggcctctggggcgatctgcacgaccgcatcgcgctcgggtcgccctacgcgcgggcggccgagcattcggcgcagcagcccccgacccgcctgcggcgctacgaggacgcgttcaagcgcggcgagatcaacgttctgaactgctcgaccacgatggagatgggcgtcgatatcggctcggtctcctcggtgatgatgacgaacgtgccgccctccatcgccaactaccgtcagcgggtcggccgcgccgggcgtcgaggacaggggctctcgacggccctgacctacgcccgcgacacgccgctcgaccgcgagaccttccgcgaccccgtgggatatctcggccgccgcatcgaggcgcccaaagtgacgctcgattcacgccgcatcgtgcaacgccacgtcaacgcgctcctactcgccgcatggttccgggaagcccaggggcaggtgttgagaacccgggccggcgacttcttcggttgccctgcgaccgtcccggccgtgcgtgacccggacccgccctcagcccggttccgcgcctgggtggtcctgccgagcacggcgcaggcccacacggctgccatcgagacccttctgcgcggctcggcgctcgctgggcatcccgacgtctgcgccgccgccgccgatgcggtcggcgaagccgagacggatttcgtagccgaatgggatgcgatccaggcccaggccgggggcctggaccgtgaggccgcgcgcaaggctctcggcatgcaggtgaagcgcatgtgcggcgagtacctgctgggggaactggctgacagcggcgtcctgcccggccacggctttcccagcgcggtcgtgcccttcgtccacaaggacgatccggacgaggaggctgccccgcagggcgaccgcgacggcgaccgcttccgccgccgcgggcacccgacgcgaaaccttgacctcgcgatccgggactacgcgcccggtgccgaggtggtggtggacggcctcgtctacgcttcggccggcgtgaccctaaactggcagcgcccggcggcggcggccaaggtcgccgaggtgcagagcatcaagtggttctgggagtgcaaccactgcgccgccgccgacacgacccggctgttccccgagcgctgcgccgcctgcggccaggcgctagatggcggggacatccgccggttcctccagccagctgggttcacggtcgatccacgggagaagccgcatgccgagatcgagcaggtgcgtttcgtggagcccgagcccgagcgcgtcgtggcgcgcggtgccgcctggaagccgttcctgacgcccgcccgcgggcgcctgcgcgcgagccacgagggcctcgtcttctacgcctcctccggcgagcacggggccggatacgccgtctgcctcgaatgcggtcgggccgaagcgcacgcgcacccgatcgatcccgccgcaaggccgctacgcgaccatcggccgttgcgcttcaccaaggccgacatcgacggctactgtccgggcaacgggcgcggctttgccgtccagactggcctcgccctgggacacgacatcgccacggacgtcgccgagatccaacccgcggcgctcgcctcagagggtgccgcctgggcgttggcctccggccttcgagaggcactgacccgccgtctcggcatcgataccggcgagatcggtctctcggttgtcaggcacgcctcctcgctcggcggtgcaacccattccgtctatctttacgaccgcgcctccggcggggccggcttcactccacgcctcgtcgaaatgttcgaggaactgctccacgatgtgcgtacgatcctcgattgccgccgaccgggctgcattggggggtgctcggcctgcgttctggcaagcgacctccaccggcaggcggaaacgctcgaccgccgcaccgccctcgacttcgtaaaggccgaactcgaggccatcgccggcccgtcgcccgaagatcggattaccgagggcgccgtccttgcccgcgatgttgccgacgagatcgcgacccaggccgttgcgggcggcgacgccgtggtcctgtggccagcggagcccttcgatcctgcaaccctggtccggccccgcctcctcagcctcctccagcgcttgcgcgaagctggcaccgcgctcacgctctgcgcgtcgggcgatctgttggctgggctcgatccagcccagcgcctcgccctccgggatgccgccgtgcggcacgggctgcgtctggccaccggggacgcaccgcgcttccccaacggcgcgcgcgcgatcgccgctctgtccggcgggcgcatctgggcatcgcgcgacgacgccgcggcccggttcggcgacggctggggactcggcggggaggctccggtcgtcacctttctgggacggttccccgcttgccagccgttcgaccccgacagtctgctgccgcggcaaggaacgcgttttatcgagccggggcgtcggctcgacggaccgagccgtggattgggcgagcgcttcctcgccctgctcaagccggaactcgaagcggcgggcctgtggcggccgggtcagctgacggccatgagctacagcgaccgctatgttcgctcgcccctcgtggcgctgctcgtcgctcgcgtcgccacacgcttggcagcggcgctatcgggctcgcagcggcagccgttcctcctgacgacgacacccctcagccaaaatgacggtcttcctcaccgcctgtcccacgactggcgtacggagaccgatcgtgccgtcgtcctccgtcagctcttccaggccggcgggctcgatctggaactcaaggtcggttcctgctcgcactcgcggcgcctcacgctcagctacgcggacggccccgacgccgtgcttgtctttgaccaaggcttcggtttcctgaagccgctggcatcggtgccgcgctatgattttcaagcaacagcactgatacaggccaagaacctcagcgccacggacgtatcctgctcgtccgacggcgcgagctatatcgtggtcgtcgcgagcaaatag

SEQ ID NO: 29725 - DNA, 3486 bp, Methylobacterium sp. Leaf90
atgttggaggagacgctgcggcagacggcggaccggatcgcggcctgcgctgacgacgcagcggctttggccgccatcgacatccgcttgattcaccgccccgagccggaagcgcgccgactgcggatcaagatcgctaccatgcgccgcgcactccgagatcgcgagccgcaaggcgacgcatctccgcagcgcacgccgatgtcgccgatcatcgttcgacggcacggatgtctgcccgaagcctgggccgtcatcctgcagcgggtcggactcgacgcaccggacggacgcccgctccaccgctaccaccttgaggaccgagaacacacagccgtcggcgaggagatccggcggcgtgcccgctcgaacctggccgaggcggatcgggcgaccggcgctctcttcgtgctgtgggccgcccactggttccaccgggattaccggggcggtgtccggcgctgggacgacctcggcaccgcactcggcgtgcagttggacggcaacgcggcgcgccacctcacgcgtcagggcctagcagcttggaaccgtccgacccagcggagcgaggcggcgctgcatcaatggctgatgaccctggctgtcgagggagggtttccggccggcgtgctcgcgcaggcggaggcttgggcggcgcgctacctcgcacgcgtcgtcggcaatttgttgaacgcagacctgctcgacgaggacaccgcactcgccgccgcccgggcgcaggcggatcatgcgccgcgggcctaccgtcaggacgtgttcttcgccctggccgccgacctcgggacggccatcgtgcagctgcgccgggaggtggaggctgacactagggcgcgcggcgtaccggcgagcgcgtggctcgacgcgatgcagcccggctggcgcgatgccctgccggtgcgggcgggcagcgagacggccgcccggctcgtcgacgggctgcttcaggccgaggcgcttcaggttgcaggcgacggacgggtcggctgcgagcgggtctttgtgcgacgggacggcctctggcggcccgccctccaattggccctggacggcgtggcacacggcggcgtgtgccggattctggcgggacgacaggagcggttgcgtgcccatcctgctgcactcttcgctcgctacgcggcaggcgaactcgccctgttcgagccgccgaccgagcccgaagacggctggcgtgtgcgcccatcacgacgcgacacgctgctcggcggcgtgcctttcacggtgcccatccacgtcgatctgcgcgtcgatggacggccggtcgcgacgacggcatggcccggcggcgaggccgtgcgcggccaactcgctgtgttcgccctcaacgaggggaccgacggagtcctcaccctcattggggagggatcgggccagtacaggccagaacccctcgtcgtcgcggtaccgccgagctggacgttcatcccccatggcgaggcgtcgagccgcaatctcctccccgagcgcgccgaggacggacgggagctgtggcgggtgaccggcaccgtcatcctgcgatcacccgacggcgaccgctaccgcgtcgcgtcgggccagggcgggacccggcgggaccggctgaatctcgacggacccgagccgaaggggctgaccagcgccgagcccgacattgaactcttcgcaggacggccgtcggtccgggtccgcgaggggcagaacgtgaggaccgcgcggccgggtgagatccgctggcgccccgagggagagcgagggtggcgcccggagccgttcggcacgggccggatcgtcattgcgtggcgcgatcccgagaccggcttcatccgcgaccaccgccacatcgcgctcctgccggcgggggcctgcctgacctgtcggcgggacggcgtcggcgccgtgtacacgccggaaggcttcaccgccgcagccctcaccgcgccggatgcggcgctggtcctggagcagcgcggcggcagcgtaggcgcccgcttcaccggccgcccctgccgccgggctgagttcaacctgtcctttggggccggcaagccgctgcgcgtgagcgcgccgttcccgctggaagcggggatcgcccgctggtcgggcgcctgcgtccggggcggcccgagacccagacttgcggcccgcctggccttgtccgacctcgccgactgcgtggcgttcgggcgcggagtgtgcacgctccacgaggtgctgctcgatcgacaccaccgcccccttcgcggcgggaccgcgcgctggactttcgacggagagctgccgctgcgcggcgtcgccgacgatctagccgccctccttcgccccttcgccgacatcgacatcgtcgcgaccctttccttcgacgacggcgccgagcactggcaggtcagcccgttcgagacatccctgattctacgcgagggctctctcgcgcaggcggccggatgggtgggggacgccgacctgcccctcgtggggcgcgccctcgacaacctctcggtcgaggtcttcctcggcatgagcacggccgaggatcggatcaaccagcgggcgcccgccccgcccgaggggctggccggcacgtggctgatctatctgcgccgcggggacgcggtgatcgcccggccatccatcgcgcgcctcgggccgcctcgcccgacggaggcggagggcctgccggcggccgtgatgatcgcacacaatgaggatcgggaagcgcggctgcagcgccgcctcaccgaggtggccgacggcgcaccggggacgcaggcggacgtcgtctggctcgcgacgcttgccgccggcttgaacgggctgccgcccgcgagcctcgacgtcctgaggctgctcgcgcactgtcctggtgcgctggcacgcctcgcccttcacgcgggagaggccgagcgctcggccgtgctcgacctagccgatgccttgccgttcgcatggccgacggtgagccatgcggactgggcgagggccgcgtccgccgtcgaggccgggatcctcgcacaactcgagggagtggccgtcgacgccgccccgttggcccaggccgccgtccggcatgcggccgaaaggctcgcccacgccgaacccctgctcggctggccgctctacgcagcgggcctcatcccgccgcctacggcccgcgggccgggtctcgtggaggccgcccgcgaccacatccgccgtcacggcgaccgagtcagcgagaacggcccgtccggcagcatgtttcgcaatgcggatgcgggcgaactgccgcaagaattccagcagctgttccacccggcccacctcgagaccctcgacgccccgtgcgcggccgcttgcgccgccgcggggcgggggcggccgagcgaggacgcggtgcggcgcatcaagacggccgcccgcgccgacaacctgtactttgctgccgccttcgacgcccagttcatgcgtctggcccggtcggtccaatcgtga

SEQ ID NO: 29726 - DNA, 5085 bp, Neisseria mucosa C102
atgaataccgacaccatgcaaactctttccggattgatagagcaaagtctgaaccgtatcaaggaagctactattggcgtattggatattacagataatcaattgcgcagtcacctgcgacaattgattagcaatgaattgggtaatgaaaactgttttcttgctgaccctgttgttgaacatacctttggttggaaaagcgcggactgtacctttgcagatttggtaagacaaaacctgttttctacaaaacttacagatgtgttagcagatgcagacagatatggttttcccaaaactgcccgcccttatactcatcagttgcaggcatggaagcatcttctgggggatgctccaaaatctgccatcattacgagtggcacaggatcaggtaaaactgaatgttttatgattccgatcttagaagatctgatacgtcgccaaacgttggagaaaacagcacttatcggtgttcaggctctgtttctctacccacttaatgctttaatcaattctcaaaaggaacgtttggatgcatggacgaaaccttttggtaacaaaattcgcttttgtctttataacggtaacacaaaagaaagtgctggaacacgtgacaaagatcaacctaaccaaatcttgtcacgggaattgctacgcaaagagcctccgcctatcctacttactaatgccactatgttggaatatatgctggtgcgccaagtagatgcccctattttggaaaaatctcgccaaacaggttcattgcgctggatagtattagacgaggcacatagttatatcggatcgcaggcggcagaaattgcactgttattacgccgtgtagtacacgctttcggcaaaaagcccgaggacatacgctttgttgctacatcagccaccattgcttccgacaaagcagcagacgaacttcgctgctatcttgctgatttggctggggtaccaaaggaacatgtcctggtagtttctggaagccgcgattttttgccgattagtgttgccgatggtagacagagcatcgcagatatcacatctattaaggacgaaaccgaacgctttgcagccctttgtcaaagtgtaatggccactactctgcgtaattgtctgacagctaatacccaaccttacacgttgaaccaattgatacaggcaacgcaagcatatttgctttctgatagcctttatgaacagcagcgtgaagttttagactggctggatgttatgactcagacaaagccgtctgaaaatgctgaaccatttttaaaactgcgtttgcatctatttcaatcaatgctgcacgggttatgggcgtgtgctgaccgtcattgcagcaaaaaagaaggttaccttaaagactggctatttggacaggtttatcttaaccgcagaactaaatgtgattgtggtgctcctgtgtacgaattagtgttgtgccaagattgcggtacaccgcacttgatggcgcaggagcatgacggtattttgcagcagtgcgatacctacatcaccgatgagtttgcactcaatcctgagcctgcagctaatgacgaagaagacagtggtgacgacgcaaacccaatttcagatggtctacaattcatatcccgcaataaagtgcttgcagccccagtcgatatgcagtctgaaggctatacggtacaaaaaatcgataaagaaactgcgcaaatcggcgtacagcaaggtaaaacttttgagttggctttggatttctccctacaggcctgctgttccgcctgcggcaaagaaaaccaaagaatgccgttttatcatggacaatatttgggtgcaccgttttatgtaacccacgctgttccgactgtattggaattttgtagtgatgctgaaaatgatccgcaatcgctacccgctcgtggacggcgattaattacttttactgacagccgtcaaggcacagcgagaatggcggtaaaaatgcagcaggaagcagagtattccaaattgcgtggtatggtgtttgatgtattggtgcagggaacaggcaaagcagaagccatgttgcctgagttggttgcactgatgcaagctaatcctgatttggttgcattgatgcaagctaatcctgctttggcagaacaaattctatggaaaggttctagtggtaaaaaaactcatcttacttgggatgatatgtgccgtacactgcgcgataaagctgaaatgacgcaagatttactgccttacaatcgagaaaccaatcccagcatatttaatgatcctagtggcaacggagcagaaaagctggcagagttgctactggcacgcgaatttatccgccgcccaagaaatgccaatagtttggaaaccttaggtttgacaatgatttgttatcctagtctggataaaatcagcacagtgcctgatggttgggtagagacacgcgttttaaatcaggcagacaatccaagcaagccgctggatttggatgattggaaagcatttttaaaaatgattttggattttcatgtccgtgaaaattcctttaccaatttagatgagcagaaaaaacgatggttgggcaaacgcttttcgggaaaatccctgctgccgcccgataccagagaaaagcaaactttgcgtaaacgagcttggccgcaagttcgagataaaggccaacagcctcgagcagtcaaaattttgcaggcggttacaggtctggatattcaaaaccctttggctaaacacaaaattaattcgtggctgaaaactgcgtggaaacaattgactactggtagcaatatcctgtatcccgatgctgatgcttggaaaatgccgctttcagcaatggcgtttaagttacctgaaaaagaaatgtggatttgtccgcaaagtcaccgcctgatcgatactactttgcgcggtgtgtctccttatttgcctggtaactggcaggaaatgccgtctgaaaaactgttttgcagcaaaactgagattccagattattatcgttttaaacaggatgccactgctgaacctcgtcgtagccaaatgcgtcgtttgctgaggcaagataaagatgtaggccacttgcgccaagaaggtttgtggagcaatttgaacgataaaatcgtagaaggaggtttctactatcgtgcggcggaacattcagcacaaattgcatctacacaattaaacagatacgaacagatgttcaaagaagggaaaattaatgtattgagctgctctactacaatggaaatgggtgtggatatcggcggtatggcagcagtggtaatgaataatgtaccaccacaccctgctaattacctgcaacgtgccggtcgtgcaggccgtcgtagcgaagcagctgcaatagcttatacactatgcaaaaatgatcctcataatcgccgtgtatttaccaatccaaaatgggcgtttactactgctattgctgctccgaaagtatcgttaagctctgaaaaaattgtcagccgccatatgcattcgctcttattggcagcatttcttgccaagcgcagcgatacaggcaaagaccgtactaagctgaatactgcttggtttttcaatccaacccaatctgtttggcagcagttttgcgactggatgaactcaccagaatgctctgctattgaccaagctttgggtaaactggcggcaggtactgctttggaaggagtaccattgacacgtatcaaagcaagtgctaaacagcggctgctggaattggcagagaattggcaggctgattttcacaatatcaaccataaaattaagcaaactaacagcgattcatacaagaaagccttaaatcgcgagaaacaactacatgaaaatgagaacctgcttggctatctggcggtaaacgcatttctacctggttatggtttccctactggcatagtagaaatgaaaatccgtaaaatggaagacttacgccgtgaacgagaggagcgagaagataatctgttcatccgcaaagaaaacccaagtcgtagtttggatattgcactgcgtgaatacgcacctggttcggatgttgtattagatgggcgcgtataccgttctgctggcatcaatctacgggtaaaatcggatgaacgaggtaaaaacgaagaccaacgtttcgatactgcgtggcgctgtaaaaactgcggtacatctggcgtgacgcgttacaaatatagctgtaatgatatccaatgttctcactgcggtgaaaatattccttttgatgaacaatgtacggtactaaccccaacaggttttttgactgacttttttgaaaaaagtagcaacgatgtttccttccaaacattcgttcctatccagcctcctagagtacaattggatgatgaaactgtagcctttctaaaacatgagtgtggtgaaattagatatggtagtgacggtagagtactgtttcgctctagtggcaagcatgaaaaaggttttgcggtttgcatgagatgtggtagggctgattccatgactgacgtaggtgaactgcctaatgtatttttgggtgagtatcataaaaccttgggtggtggtttggatcttagcagtaatagtaaagattgtcctaatagtaatgttcagatcaatatccatctgggccatcatatctcaaccgatgtattggaaattgctctgaaaaatccacaaaccaaggcatggctaggcagtggagataaaactaccgcccgcacgattgccgttgctgtacgcgatgaaattgctgcttttttggggatagaaactactgaaatgggctatgccgtgcgagcagatagagatttggaaacaggtgccgttcgctgtttgattcagatttacgacaaagccgaagggggcgcaggtttcgttttatctgctgtagatgacatcaacggtatcataagtcgcgctttagaccgtttgaattgtccagctgattgtggtagcgtttgtcagcattgcctggcgggtagtgatagcaatgtggagcgagaagaactggaccgtcatcatgctttacgatggcttgaggaagctcaattgaagcaacatttgaactaccagtaa

SEQ ID NO: 29727 - DNA, 3348 bp, Neisseria mucosa C102
atgaaaaatcttacaaacccgtttaagagttggttatcacatttcttttttaatcgtgatccacttaatcctattccgaatggtgggccactgtatacttatgcagttaatgaaaatgaataccgtgaactgtgtgcactgttttatcgtaagccttttttgatatcgggttctgtttatcaggaggaatggtgtgcctgttactgtctggcagttagtgaaacttatcggcgtgagtattcgggtggtgaatggagttgggcatttttcgataatgtaataggtacgcaatttgataatgaacagcaacgttacaaatatttgaaaaaagggttggcatattggcggcgagaatggaaatatgacgctgctaaaaatacgcgttatcttggtacattagttgctgaaggtggattaccactgaaaatgcttgcagctgatgataatgctattcgcaatattattgattatggcttgaaaaaatatcaggagagtatggaaactttccgccctttagaagaatatattgctgaaagagtgtatagactggcacaagtatttcgtgatactgcggctgttattctatttgccgatacagtcagagcgctagtcaagctcgctgagcggtttgacttgaagaataaacgtaatttggttgaatacctagatcaggcagatagtggttggcgcagtgagtttccttttgctttggatgggaaacaggtagatgcagttatcaaccgctggttgggtaatgcagcagacgaacgtcaaaaattggaaaagcaagagttctcctgtcggcattatgtaaaggagggaggttggtgcttgcatgctaaaatcgggttacctgaaaaatttagtttccctattcagaattatcagggtgaaacggttttacaatggcaaatttttgaaggagaagagccagttgcccaaatgggagcaacagtatttgcttctcttagtgatacaggcggagagctaacattcaaacttccttttgggaaacagcttgattttgtccgagagaaacctagtctacctttgtctgtgcgagtgtttgctggcgggcgactgctctataccaagttgtttggagatactggatttgatgaagatgcaccgctggtgtttcactctgctcaagatcaacgttggcaactgttctctactaatgaatacacgcgcagtaaagatagggatattttgattcatctaccagacggttttaggttgtctgaaaatgaaaatgtctcctatttgggcgggcagtggtttaagtgttcggacggactgactgctcgtcatgcggatgggcgagaaatagttgttgtgcaagctaatcagacagaacagagtattttgcatgggagactgttttatcactgccaaaatactgatggtttacctgtgtatcgtggttttcctactctgctaacgccccctgacttatctccgacgcacatcaaaatcaacggcgaggtccaatcaaatatctgcccgaactattatggtacatttcaggtggctttctataagggtgcaatttgtttgttgcggcgtaaaattactgtcctgcctgaagatttttcctatacttggcaagcagcaagcaacaaagatcccgccattttaaatgttaatacttccgaaaaggttttcatagatgtctttgccaagcatctagatatcacacaaatccattctcgatttagatttatctgccaaactgaggatagtaattatccatctcatattattcttgcagttggaagtaaccctgttcaagctgcacgattaagactacctctaccgtttaatggtgcgtatctatatgatgaaaaaggtagaattgatgattgccgtctgaatatcaatcagttgctaggcaagtggataatggtatattcctccgcatcgaccgatatgaggctggtatttaaattatcggataatgtgcatggtcgccccatttctatcagcgaacgtttgtcagcagatggttcggtgcagcagtttttcttagatcaatggaaaccgcaacttttgcagcttttatcgtgcagcagtagtcaagatgcccaggtagaaattacagtgtgccatatgggttcagagaaccctttgatacggcttatcttgtctcgttataatggtctagttatgtggaataatcagttttaccgtttcggtattctggcagtgacagatgcattacgaaaaagcttcgtcatcaaacggcaggcagaagacgaattgacttgccgagaagcggtagtaaacatcatgcgcttggatgcacctgaaaaaggtgcacaaaggctgcctgaaagcgcaatgaggataaatgggcattatcaactgtcgtccgaacaatatgatgaaggattgtggttgatttaccctgcgcctgaatcaccagttcaattccgtcctgctatatttgaaaacagcagtgaaaaatttatcgaaccatttcaacatcattccctgcatattgctgcacgcgctttccatccaaaccacaatcccgaagctattagccgtatcattacggaaatggtgggtaatcctgagcattctggttggctgtattttgagagcctaaagcagcatttttctcatctgccattgtcagtatttgaaacatggaaagccttggtacaacagcccaaagccttagctttggcggtattacgcttagggttggatggtgtattttgcgagcggatgcgtaacgaattagctgtggtatgggagtggttagctctacaagattggtttgctgccataagtacgtacaaaccatacattcgtaccaaaattgcagctacaggcttgaatcctgatgattttcccttgtctgaaaactgtattcctacaagtgtgttgtgccatgacgagattttacgcaatcatgtatttaaaggatttctttcagaaatagaaatgatagtggtggaaaacacgcttggggaaattttcgacaagaagcacgattcacgttataaccgccattacaatgcattgcgtcagaataaaaaccaacgtattcctgaaacgctttcggatggtctgcaaaaatggttggagaaacaacaggatgtatttttcaataaagtacgcagtctgtccaaagttccttttgaccgtacagttgtctggctaccagtatttactgcctgtgttaaagcaggcaatgcgcagccttcagatatcatgccattagaaatgactgctgcacagtttgctgatgctttttatcgtatttacgctttggatgcagaatggtttgattacgtctgcgcttccctgagctgctacctagtgagtgaatcataa

SEQ ID NO: 29728 - DNA, 5880 bp, Novosphingobium pentaromativorans US6-1
gtggtctcgcgggcgggtatccggcacgaagggctcaacgcttttctccggagcacgcttgccggtacggacccagcaaacggtagcctcctttccgaacagctttttcaggctgctcccggctatgtatcctcaggaaagagccccaaccaacttcaagcgctgctgcatcagcgcacgatcgacgcgatcacccaaacgtcggatactgatctacgcttcgattaccccgcctacgcgcaccagctgtcgacgtgggaactgctcagcacgcaagagccgcaatcggttctggtttcgagcggcacggggtcgggaaagaccgaatgcttcctggttccaatgctcgatgatctggtccgggagtccgcagagcaaggtcctctgacaggggttcgggcgctcatgctctatccgctgaacgcacttatcgcgagccaggagaagcgccttacagcctggaccaagccgcttcgcggcgatgtccgctttgccctctacaacggattgatgggaacggcgcgaaagtccaatcgcgacaaggccgagcacgagataccgcatcaggttctttaccgcgaaaccctccgggccaacccaccgccgatccttgttaccaaccagacgatgctcgaatacatgacgatccggcgcgaggatcgtccgatcctcgacgcatcaaaaggcaagctgcgctggatcgttattgacgaagcgcacagttacatcggctcggcagcggcggagctctcgctcctgcttcgccgggtgatgaacgcattcgatgtgacgccggatcaggtccgcttcgttgcgacgtcggcgaccatcggctctgctgacgaccagaaggcccgcgacgaccttcagagattccttgccgacattgctggcgttccgcttgagcgggcgcatgtcgttgtgggaaagcctcagccggtcgacctctcgaaggtccttacagcgtccgatgatccggcagcttcgtcggttgccgagaggctggaaggcgagcctcagaccctggcttcgcttaaggcgctctcgcccgacgccgaaaggattttgctcgatctgtctgcccataatgccagcgaagcgaagcctgtcctaccgatgcgagcgcacagcttcacgcgggcaattgccgggctctggacctgcatcaatgccgactgcccgggcgagatgcggcccaaggattggccatttggcgctgtgctcttcgaccatcgggatcaatgtccgcattgccaatcgatggtgttcgaaattcagaactgcctcgattgtggcgagcccttcctcccggccgatgacatgggcgacaggatcgtaccgcggcgaagtgatcatgatgcagatgagtttcgcgaaaatagctatcgtgatcgcgatcatgatgatgacgatgaagaagatgagcacgaggggatcggccatccgcggctgattgccattaatccgaaatccgaagctaccgcgaccgctttcgatgtatccagcggcgagttcactggcgaggcagggcattttcatctgacccagctggacgaaggacgttgcccggcctgtctcggaaacaagcggcgcgggcgaccggcggtctttccctttcgctttggcacaccattcctcacccagaatgcggcaccgatcctccttgagggtgtgtcgccacatcaggcggaacacgccctgccgttcgatggccgtcagctgatcagcttttcagacagcaggcagggaacagctcgcttcgctgccaatattgaaaccaacggtgagcggggctttgtccgcggctttatctaccatgccgtccagaaggctgcccagggtagcgacctgaccgatgagcgcagggaagagctgctcaaaaagaaggctgctctagcgaacctcgtggcagacatgcctgcgttcaaggatgatatcgccaagattgacgcggagctcgcgggtggcgcgacaaccggaatatcctggaaggacctcgtatccgggctcgcttctgagccagccattggcatgatggccaaggtctgggacctcgatcgcagcgaacgttttcacgataaccgggaagcgctggcgcgcttcatgctcttgcgcgaacttgcccgtcgtccgcgcaatgccaatgcgatggagacgcttggcctggcacggctccgtttcccggatatcgagcggattggcccggataagctacctgagcttatcggccagaagggctattcaatcgaagattggcgcggcttcctctactacatggtcgactatcttcgcggccagtttgcccttgaagtggacgacggtgatgcgcgttggatgcctgggcgcgcgcggcctcgcaatgtgattgggcccgaccagccccctggcgccaagcgcgacgtctcctggcctttggtcaacactaaggggcgtcagcccgactccatccttctcttggcgtcagctctgaaccttgaccttacttctcagcgcgaccgccatgaaatcaatcaggtcatgcatgccgcctggaatcagctgactccccttctttcgggtgttggtggtacattcagcctgcggctcgagcagaaggccgagatcgaggcggtcgatcgagcttggcaatgccccctaacgcgtcgcgttctaccgcgacttgtatttggcaggtcacccaatcttgttgggtctggaagcaagatcgacggcaaagcggtcttgccggttgagttttctaatgtcccacgcacgcgaccactctcgttagccgataaaaaggagatcaggggttggctggttgaggacaagcaagtccaagcccttcgacagttgcacctttggaccgatcttcacgatcaggccgcgctcgccacgccttatctgcgggccgaggaacacagtgcccagcagcccccgcaccgactccgggagttcgaggagcaattcaaggaaggcgatatcaacctacttgcctgctcgaccaccatggaaatgggtgtcgacatcggttcgatcgaagcagtgctgatgaccaatgttccaccctcgatcgccaactacaatcagcgggccggtcgcgctgggcgccgcggacagggcttttcgacaagtctcacaattgcccgcaatacacctctcgatcttgaaacgtttgccgatcctgcgggctatttgcgccgtaaactcgcctcgccgcgcgtatcgcttgattcagatcggatcgcacagcgtcatgcgaacgcctatctgctcgcccaatggtttcgcgaggttgagggggagtttgcccggaccaagaccggggatttcttcggctgtcgcgctgaccttcgtcctttcgaaggtctcgctcccgtggatgccttttgcgaatggctcgatctaccaactacggcatccgcaaccgaacaaggtttgctgcggctcctcagggggacaggtctcgaatacgacaccgaaatccgggggcatgcggcggagatgtttgagcaggaagctgcgaatttccgtcgtacatggcagcgcctaaaggaagacttggacgcgctcgaagggccggcaaagaaggcgatcgagtttcaggcacggcgcttgtgcaaggagttcctcttgaaggagcttgccaatcgctcgcttatccctggaagcggttttccgacatcggttgttccgttcgataccctatgcgccgagacgcagaaggcgcaggagcgcaatcgtccggaagaggaaggcgcgcgtgatcggcgctatgaatgcccgacgcgcaacgccgatatcgccatccgagagtatgccccaggggcagaggtcgttgtagacgggctggtttggaaatcggccggggtcaccctcaactggcttagcccgatcgacagtggccagcgtgagccgcagaaccttcgttgggcctggtggtgcgaccattgtggtggggcgggcagcgatcaccagatgcctgaccagtgtgcccattgcggcgagcgcagcattaccattgagcagtttcttgaaccggccgggttccgcgtcgactggaacgcgcagccgcatgccgacaccgatcaggctgtctatatcgaacccaagtctccgaaggtcagtgtcggtgatgccctttggcaacccatgctgcagcctgaaaccggtcggatccgggcttcgcatgaaggttacatctaccatcattcgcgtggacccaacgaccagggttacgagatttgcctggagtgcggacgggccggggatgcagggaccgacgctctcaaagaccattggccgcttacgccgaggaaccgaaaggcgatagaccgctgtccgggcaatgacgaaggttatgcgatcacgagtgctctagcgctgggccatgaagttctaaccgatgtggttgagctgcaattgcctgggctggaaagtgacggcgcggcctgggcgcttggggcagccttgcgcgagagtcttgcacgctggcttggaatcgagccgcgcgagcttggaatttccgtggcagctcgagacggcaagctcggtcgcagagtgccgtcggtctacctcttcgatgaggcatctggaggtgccggatacgctccgagacttctcgatgacatccatcatgtcttcgaacgggcggcccgtgtcctcgattgccccaaggaatgcgaaatggggtgttcggcctgcgtccttgctgccgatctctacaagcagcaggggcgtctcgaccggcggtctgctctcctcgcggttcaggcatttctcgagacaaatgctgaactgccgcaggaggaccgtgcggtccctgatgctagggcaatcaatgacgcggcgaacacactccttttgagagcgcgaagtggagacagcatctccgtcttgttacctaccgtgttcgacctggcagagctgacctcaaccaagatgcgcacgttcttttctgccgcctctgcccgcggcgttccggtgacactcgtgcttgatccgagttcctttaataagctcgaagaggtcgaacggcgctttttgcgcgatgcctctgtgcggttcgaattctctttggccctgggcaaaggagaagacgcacccttcgagagcaaacccctggccgaattgatctcgtctgatcgtaccacagggttcttctcacgcgatgcgaacgcggcgcagccgggggagcgatggggtctgggtgatacgcatgctgtcgttgccggtactctcagcggccccaccgcctacaacccgatcaacccggatgatctggagcgacaggttgcggctggtgatcaggtcgagctgatgcaaggttttgggcaatgcccggttggccagtttggcaaacgctttggctcgaaactgaagcagcagatggaagcggctggtgtttggagccctggcagtcttgtgcggatcacctacgccgaccgctatctcaatgcgcctctacccatgctcctatttctgcgcacgtgcgaagctctatcctctgacctgaaggcggatagcccagttgaagtcgatatcctggtccagccactgaagaaggatcggccaccccatcggatcttccatgactgggagtatgaagacgaccgagcggaagtagcagagctattgggcgaaaggtttggcctcgatgtcgacctccaggtcacggagaattcggaccacggccgcaagctcgagcttgaatacgccgatggtcaaaaggtcctcgtgctgctcgaccaagggtttggatattggcgcatagcgggtagcccgccgcgccatgactttcgctcggcacccgctgcgcaggcgagtgaacttttgcgttcatcggctgcggtttcgggtgtgggagagagctactacgcagtgaaaagaagtgcgaagtga

SEQ ID NO: 29729 - DNA, 3300 bp, Novosphingobium pentaromativorans US6-1
atggaaggacgcgatttcaaatctgaaatcgacgcggcgcaaaatgacccggttcggctgcgcaagattgccgatgacattcacgctagcggcggctcgcgtatcctgatgatccgcgcgatccagctggccagggcagcagatagcggaccgcatcctttgggtaagacttgcggggatcttggtttacctcgccccaccggactgccgctttaccgctacaagctcgcaccgggaatttttcagcggatcgaagcaaagcttgctgccaatctcgcatcggatttgctgcggccgtcgctagctccagctttcgtcatgtgggcggcagactggtttcggcgctcctaccagggcggcatgcagcgctgggccgatatcgaagcggttttgaagctccaactcccacaatcggaatggcgggcacttgcagaccgcggtttcgatgcctggggcgttgaacctcttatcacggcgcacggaaaccagcgtctctccaatctcgcgcggcatgggggctttcctgcagcagcaatcgcaggcggtgcgagctggccgcgtcgcttcctggagcgggcagtcggtgagctgctcggggcagacattcaggacatagctaccgctgtctcgatctgcgaacgcaacgaatatttgcttccctcaatctggcgcagcccggaaatgcacgcaatctgcggtgaacttgccctcaagatcgtcgagcttcgtgcattcatcgacaaggaagtgccagttgacggtcgcccttactcggcccggctggaccacgcttacgaagactggcgagatgaactgccgatgacgctcgacggggcagctgcgggcctcatcgatacgctccttgaagccagaaagctgaccggaacagggagtatccgggtcggacggttgatgcgttcgcaggatggtgaatggcgcgaaagcctggatttccatcttgaaggtcgctgggacgacaaggatcgtgtgctgtccgcaggtgaatatgtccgggtgtttcttcagccctcgggtgccttggcggaccgtatctccggtcggctggcttacctggaggttgaatcaggcaattgctggatcgcgcgcgctatgcgcagcgaagctgcgatcgattttccattggacctctccgtcaccgccgaattccatgcgcgcggcgaaagactcgctcaaagctttgtcctgccgggcggcaaagcggttggacatggactgcggatattcgagcagcggaccggagacaccgagctaggcgcgttttcccttatcggtcaggggtcgggcggttatcgcgccgaaccagtctttgtcgatattccgcacgattggatgcttcgcggcaaggacggcaatacagagatcgaagccgaggacttcgcctttgcacctggtcgttcgctctaccgctgtgctggccagatcatcgccgagaagcccaatggcgacgcatttctggtgcggacgggacagagtgcagatcgtaaggatcgcctgaccatagtcgcccaagaggcgaccggtgtgcaggcacccggcggcgaacggttgatcaaacatccgctgcatgcagaagtcgaagacggggtttcccggcgcactgcaacgcgtggagaggtcggctggcggtttgcaggggaaagcacctggcgcgatgatcttgtcaacgcgggtcctgggcattgcgagttcgcctggctcgatggagcgaccaagcatgttcgggaccggacgaatgcactggttctgccggctgaattcgcactcagccagcggatcaatgcggcccatgcggaaatccttttggaaggttggaccggagaagcggtgctcagcgatgaaacgccgattgcagaccgtcgctggcgggtgcgtatcgatccgccccgtcgcgcgctgctcggcttgcgcctcacccccgaccatggctccaccttcgaactcaatgtgccattgcgatcgaaagaatggctgacgacctgggatggcgaacttttcaggcgcgaagctgtcctaggtcttgccgatcttcgtgacaccgttgcccgtgcaccgggccgtgcgatgctgatgggcgaagttgcccatcacgctggagcgtcgcttgaggcgagttggaaggtcgatgtcgaacttggcctgtcggctctgcggaacgacattgccgccttgatgcggccgctcggcatcgatgcccaggtccggctcgactttcacaacggcagcaatgacaactggtacgtcacggaattcggcaattctcttgagtgggaaccttcgggagggctgcgtccaaagacggccattgtcggcgaggatgtccgcgttggcggccgctttcttggagctcccgagaaagaagtggatttcggtccgtttgacggattgcttggcggcctcggagggcaattgattcagctgccacgattgcgcggtccatggctcgtctatctgcgcgaaggtgctcgcgtcctcacgaggccaaagtttatcgacggcgatccggttcacgacgtgccgcaacacaggctcggccgggccatggcacagcctcttttgcaagcgcgcgaggacctcgtgaggctggcggaggaactcgctgccgagcccatgtcttccgaagcgacccagaccattcgtgcagtcatggacttggcgctgtcgctcaatggcttgcctccgcaaaccttcgaaatcttcagcaagtttgagattgccggtccgcttgcgccgctccttctttatcgctgcgaggagcaacacctctcgacgatcctagagctgtttgacggcctgtgctcaagctggtcccttttgccgatcaaggcctgggacactgcctttcaggctcaaggtaattatctggtcagccggctcgatgaccctcagtgggcgttggcaaacatcacggaacgtcagaacgagatcgcggcgcgtgcgccgcagcttgcacccctcatttgccgggacttctcgccgttgagctgggaagagcttcgcaaccacttcacgagccatacgagcgagggcatcaatatggatgccggcggcttcaacccttttcggcctgctttcagcgagctactgccaagagagaacttcgtcgaagcgctgatgcgggtcttcgatgctcctttcgccgctgctctgtccgctaccggacgtgcttctcttgagaaggagcaggtcctgaccgtcaaggacgtcgaacgacgtcaccccgactactttgccaaagcctttggctatgccctttcggagctcaagaatggccgccagtga

SEQ ID NO: 29730 - DNA, 5964 bp, Novosphingobium pentaromativorans US6-1
atggccgccagtgatcccctccctacatcccgattgtcgccgatggaggtacaccagcggctgaggactgggctcgccgaagcggtggtctcgcgggcgggtatccggcacgaagggctcaacgcttttctccggagcacgcttgccggtacggacccagcaaacggtagcctcctttccgaacagctttttcaggctgctcccggctatgtatcctcaggaaagagccccaaccaacttcaagcgctgctgcatcagcgcacgatcgacgcgatcacccaaacgtcggatactgatctacgcttcgattaccccgcctacgcgcaccagctgtcgacgtgggaactgctcagcacgcaagagccgcaatcggttctggtttcgagcggcacggggtcgggaaagaccgaatgcttcctggttccaatgctcgatgatctggtccgggagtccgcagagcaaggtcctctgacaggggttcgggcgctcatgctctatccgctgaacgcacttatcgcgagccaggagaagcgccttacagcctggaccaagccgcttcgcggcgatgtccgctttgccctctacaacggattgatgggaacggcgcgaaagtccaatcgcgacaaggccgagcacgagataccgcatcaggttctttaccgcgaaaccctccgggccaacccaccgccgatccttgttaccaaccagacgatgctcgaatacatgacgatccggcgcgaggatcgtccgatcctcgacgcatcaaaaggcaagctgcgctggatcgttattgacgaagcgcacagttacatcggctcggcagcggcggagctctcgctcctgcttcgccgggtgatgaacgcattcgatgtgacgccggatcaggtccgcttcgttgcgacgtcggcgaccatcggctctgctgacgaccagaaggcccgcgacgaccttcagagattccttgccgacattgctggcgttccgcttgagcgggcgcatgtcgttgtgggaaagcctcagccggtcgacctctcgaaggtccttacagcgtccgatgatccggcagcttcgtcggttgccgagaggctggaaggcgagcctcagaccctggcttcgcttaaggcgctctcgcccgacgccgaaaggattttgctcgatctgtctgcccataatgccagcgaagcgaagcctgtcctaccgatgcgagcgcacagcttcacgcgggcaattgccgggctctggacctgcatcaatgccgactgcccgggcgagatgcggcccaaggattggccatttggcgctgtgctcttcgaccatcgggatcaatgtccgcattgccaatcgatggtgttcgaaattcagaactgcctcgattgtggcgagcccttcctcccggccgatgacatgggcgacaggatcgtaccgcggcgaagtgatcatgatgcagatgagtttcgcgaaaatagctatcgtgatcgcgatcatgatgatgacgatgaagaagatgagcacgaggggatcggccatccgcggctgattgccattaatccgaaatccgaagctaccgcgaccgctttcgatgtatccagcggcgagttcactggcgaggcagggcattttcatctgacccagctggacgaaggacgttgcccggcctgtctcggaaacaagcggcgcgggcgaccggcggtctttccctttcgctttggcacaccattcctcacccagaatgcggcaccgatcctccttgagggtgtgtcgccacatcaggcggaacacgccctgccgttcgatggccgtcagctgatcagcttttcagacagcaggcagggaacagctcgcttcgctgccaatattgaaaccaacggtgagcggggctttgtccgcggctttatctaccatgccgtccagaaggctgcccagggtagcgacctgaccgatgagcgcagggaagagctgctcaaaaagaaggctgctctagcgaacctcgtggcagacatgcctgcgttcaaggatgatatcgccaagattgacgcggagctcgcgggtggcgcgacaaccggaatatcctggaaggacctcgtatccgggctcgcttctgagccagccattggcatgatggccaaggtctgggacctcgatcgcagcgaacgttttcacgataaccgggaagcgctggcgcgcttcatgctcttgcgcgaacttgcccgtcgtccgcgcaatgccaatgcgatggagacgcttggcctggcacggctccgtttcccggatatcgagcggattggcccggataagctacctgagcttatcggccagaagggctattcaatcgaagattggcgcggcttcctctactacatggtcgactatcttcgcggccagtttgcccttgaagtggacgacggtgatgcgcgttggatgcctgggcgcgcgcggcctcgcaatgtgattgggcccgaccagccccctggcgccaagcgcgacgtctcctggcctttggtcaacactaaggggcgtcagcccgactccatccttctcttggcgtcagctctgaaccttgaccttacttctcagcgcgaccgccatgaaatcaatcaggtcatgcatgccgcctggaatcagctgactccccttctttcgggtgttggtggtacattcagcctgcggctcgagcagaaggccgagatcgaggcggtcgatcgagcttggcaatgccccctaacgcgtcgcgttctaccgcgacttgtatttggcaggtcacccaatcttgttgggtctggaagcaagatcgacggcaaagcggtcttgccggttgagttttctaatgtcccacgcacgcgaccactctcgttagccgataaaaaggagatcaggggttggctggttgaggacaagcaagtccaagcccttcgacagttgcacctttggaccgatcttcacgatcaggccgcgctcgccacgccttatctgcgggccgaggaacacagtgcccagcagcccccgcaccgactccgggagttcgaggagcaattcaaggaaggcgatatcaacctacttgcctgctcgaccaccatggaaatgggtgtcgacatcggttcgatcgaagcagtgctgatgaccaatgttccaccctcgatcgccaactacaatcagcgggccggtcgcgctgggcgccgcggacagggcttttcgacaagtctcacaattgcccgcaatacacctctcgatcttgaaacgtttgccgatcctgcgggctatttgcgccgtaaactcgcctcgccgcgcgtatcgcttgattcagatcggatcgcacagcgtcatgcgaacgcctatctgctcgcccaatggtttcgcgaggttgagggggagtttgcccggaccaagaccggggatttcttcggctgtcgcgctgaccttcgtcctttcgaaggtctcgctcccgtggatgccttttgcgaatggctcgatctaccaactacggcatccgcaaccgaacaaggtttgctgcggctcctcagggggacaggtctcgaatacgacaccgaaatccgggggcatgcggcggagatgtttgagcaggaagctgcgaatttccgtcgtacatggcagcgcctaaaggaagacttggacgcgctcgaagggccggcaaagaaggcgatcgagtttcaggcacggcgcttgtgcaaggagttcctcttgaaggagcttgccaatcgctcgcttatccctggaagcggttttccgacatcggttgttccgttcgataccctatgcgccgagacgcagaaggcgcaggagcgcaatcgtccggaagaggaaggcgcgcgtgatcggcgctatgaatgcccgacgcgcaacgccgatatcgccatccgagagtatgccccaggggcagaggtcgttgtagacgggctggtttggaaatcggccggggtcaccctcaactggcttagcccgatcgacagtggccagcgtgagccgcagaaccttcgttgggcctggtggtgcgaccattgtggtggggcgggcagcgatcaccagatgcctgaccagtgtgcccattgcggcgagcgcagcattaccattgagcagtttcttgaaccggccgggttccgcgtcgactggaacgcgcagccgcatgccgacaccgatcaggctgtctatatcgaacccaagtctccgaaggtcagtgtcggtgatgccctttggcaacccatgctgcagcctgaaaccggtcggatccgggcttcgcatgaaggttacatctaccatcattcgcgtggacccaacgaccagggttacgagatttgcctggagtgcggacgggccggggatgcagggaccgacgctctcaaagaccattggccgcttacgccgaggaaccgaaaggcgatagaccgctgtccgggcaatgacgaaggttatgcgatcacgagtgctctagcgctgggccatgaagttctaaccgatgtggttgagctgcaattgcctgggctggaaagtgacggcgcggcctgggcgcttggggcagccttgcgcgagagtcttgcacgctggcttggaatcgagccgcgcgagcttggaatttccgtggcagctcgagacggcaagctcggtcgcagagtgccgtcggtctacctcttcgatgaggcatctggaggtgccggatacgctccgagacttctcgatgacatccatcatgtcttcgaacgggcggcccgtgtcctcgattgccccaaggaatgcgaaatggggtgttcggcctgcgtccttgctgccgatctctacaagcagcaggggcgtctcgaccggcggtctgctctcctcgcggttcaggcatttctcgagacaaatgctgaactgccgcaggaggaccgtgcggtccctgatgctagggcaatcaatgacgcggcgaacacactccttttgagagcgcgaagtggagacagcatctccgtcttgttacctaccgtgttcgacctggcagagctgacctcaaccaagatgcgcacgttcttttctgccgcctctgcccgcggcgttccggtgacactcgtgcttgatccgagttcctttaataagctcgaagaggtcgaacggcgctttttgcgcgatgcctctgtgcggttcgaattctctttggccctgggcaaaggagaagacgcacccttcgagagcaaacccctggccgaattgatctcgtctgatcgtaccacagggttcttctcacgcgatgcgaacgcggcgcagccgggggagcgatggggtctgggtgatacgcatgctgtcgttgccggtactctcagcggccccaccgcctacaacccgatcaacccggatgatctggagcgacaggttgcggctggtgatcaggtcgagctgatgcaaggttttgggcaatgcccggttggccagtttggcaaacgctttggctcgaaactgaagcagcagatggaagcggctggtgtttggagccctggcagtcttgtgcggatcacctacgccgaccgctatctcaatgcgcctctacccatgctcctatttctgcgcacgtgcgaagctctatcctctgacctgaaggcggatagcccagttgaagtcgatatcctggtccagccactgaagaaggatcggccaccccatcggatcttccatgactgggagtatgaagacgaccgagcggaagtagcagagctattgggcgaaaggtttggcctcgatgtcgacctccaggtcacggagaattcggaccacggccgcaagctcgagcttgaatacgccgatggtcaaaaggtcctcgtgctgctcgaccaagggtttggatattggcgcatagcgggtagcccgccgcgccatgactttcgctcggcacccgctgcgcaggcgagtgaacttttgcgttcatcggctgcggtttcgggtgtgggagagagctactacgcagtgaaaagaagtgcgaagtga

SEQ ID NO: 29731 - DNA, 3300 bp, Novosphingobium pentaromativorans US6-1; identical to SEQ ID NO: 29729

SEQ ID NO: 29732 - DNA, 5958 bp, Novosphingobium sp. PP1Y
atggccgccagtgatcccctccctatatcccgattgtcgccgatggaggtgcaccagcggctgaggactggcctcgccgaagcggtggtctcgcgcgcgggtatccggcacgaagggctcaacgcttttctccggagcactcttgccggtacggacccagcaaacggtagcctcctttccgaacagctttttcaggctgctcccggctatgtatcgtcagaaaaaggtcccgaccaacttcaagcgctgctgcatcagcgcacaatcgatgcgatcacccaaacgtcggatactgatctacgcttcgattaccctgcctacgcgcaccagctggcgacgtgggaactgctcagcacgaaagagccgcaatcggttctggtttcgagcggcacggggtcgggcaagaccgaatgcttcctggttccgatgctcgatgatctggtccgggagaccgaagagcaaggtcctctgacaggggttcgggccttgatgctctaccctctcaatgctcttatcgcgagccaggagaagcgccttacagcctggaccaagccgcttcgcggcgatgtccgctttgccctctacaatggattgatgggaacggcgcggaagtccaatcgcgacaaggccgagcacgagataccgcatcaggttctttaccgcgaaaccctccgagccaacccaccaccgatcctcgttaccaaccagacgatgctcgaatacatgacgatccggcgcgaggatcgtccgatcctcgacgcatcaaaaggcaaactgcgctggatcgttatcgacgaagcgcacagttacatcggctctgcagcggcggagctctcgctcctgcttcgcagggtaatgaacgcattcgatgtgacgccggatcaggtccgcttcgttgcgacgtcggcgaccatcggctctgctgacgaccagaaggcccgcgacgaccttcagagattccttgccgacattgctggcgttccgcttgagcgggcgcatgtcgttgtgggaaagcctcagccggtcgatctttcgaaagtcctgacagcgtccgatgatccggcagcatcgtcggttgccgagaggctggaaggcgagccccagaccctggcttcgcttaaatcgctctcgccggacgccgaaaggattttgctcgatctgtcggcccataatgccagcgaagcgaagcctgtcctgccgatgcgagcgcacagcttcacgcgggcaattgccgggctctggacctgcatcaatgtcgactgcccgggcgagatgcggcccaaggattggccatttggcgctgtgctcttcgaccatcgggaccaatgcccccattgccagtcgatggtgttcgaaattcagaactgcctcgattgtggtgagcccttcctcccggccgatgacatgggcgacaggatcgtaccgcggcggagtgatcatgatgcagatgagtttcgcgaagatagctatcgtgatcgtgatcatgatgatgacgatgaagaagatgagcatgaggggatcggccatccacggctgattgccatcaacccgaaatccgaagcgacggcgaccgctttcgatgtatccagtggcgagttcactggcgaggcggggcattttcatctgacccagctcgacgagggacgttgcccggcctgtctcggaaacaagcggcgcgggcgaccggccgtctttccatttcgctttggtacaccattcctcacccagaatgcggcaccgatcctccttgagggtgtgtcgccacatcaggcggagcacgccctgccgttcgatggccgtcagctgatcagcttttcggacagcaggcaaggaacagctcgctttgccgccaatattgaaaccaacggagagcgggcctttgtccgcggctttatctatcatgccgttcagaaggctgcccagggtaccgacctgaccgaagagcgcagggaagagctgcttaaaaagaaagctgctctagcgaacctcgtggcagacatgcctgcgttcaaggatgatatcgccaagattgacgcggagctcgcgggtggcgcggcaaccggaatatcctggaaggacctcgtatccgggctcgcttctgagccggcgattggcatgatggccaaggtctgggacctcgatcgcagcgaacggtttcacgataacaaggaagccctggcccgctttatgctgttgcgcgagcttgcccgccgtccgcgcaacgccaatgcgatggagacgcttggcctggcacggctccgcttcccggacatcgagcggatcggtcccgataaattacccgaccttgttggccagaagggctattcgatcgaagattggcggggcttcctctactacatggtcgactatcttcgcggccagtttgcccttgaagtggacgatggtgatgcgcgttggatgcctgggcgcgcgcggcctcgcaatgtgatcgggcccgaccagccccctggcgccaagcgtgatgtctcctggccattggtcaataccaaaggacgtcagcccgactccattcttctcttggcgtcagccctgaaccttgactttacgtctcagcgcgaccgccatgaaatcaatcaggtcatgcatgttgcctggaatcagctcgctcctcttctgtcgggtgttggtgggacattcagcctgcgattggagaaatccgccgaggtcgaagcggttggcaaggcttggcagtgccccttgacccggcgtgtcctgccccgcctggtctttggcaggtcacccaatctggtcagtgctggaaagatgttcgccaataagccggcgcgtgaaattgagtttccgcgtctcccaaggacaaggcctcttgcggtggatggccaaaaggaaatcgcagcctggctccagaccaacgaagaagtcgcggcccttcgcgagggtggcatctggatgaactggcacgatcaggccgcgctcgccacgccctacctgcgagccgaggaacacagtgcccagcagcccccgcaccgactgcgggagttcgaggagcagttcaaggaaggcgatatcaacctgctcgcctgctcgaccaccatggaaatgggtgtcgacatcggttcgatcgaagccgtactgatgaccaacgtcccaccctcgatcgccaactacaatcagcgggccggtcgggcaggccgccgcggacaaggcttctcgacaagtctcacaattgcccgcaatacacctctcgatctcgaaacgtttgccgatcctgcgggctatttgcgccgcaaactcgcatcgccgcgcgtgtcgcttgattcagatcggatcgcgcaacgtcacgcgaacgcctatcttctcgctcaatggtttcgcgaggttgagggggagtttgcccggaccaggaccggggattttttcggctgtcgtgctgaccttcgtcctttcgaaggtctcgctcccgtggacgccttttgcgaatggctcgatctaccaacaacggcatccgcaaccgaagaaggtctgctgcggctcctcaggggaactggtctcgaatacgacagcgagatccgggggcatacggcggagatgtttgggcgggaagctgcgaatttccgtcgtacatggcagcgtctaaaggaagactcggacgcgctcgaagggccggcaaagaaggcgatcgagtttcaggcacggcgcttgtgcaaggagttcctcttgaaggagctggccaatcgctcgcttattcctggaagcggttttccgacatcagttgtcccgtttgataccctctgtgccgagacccagaaggcgcaggaccgcaatcgttcggaagaggaaggtgcgcgtgatcggcgctatgaatgcccgacgcgcaacgccgacatcgccattcgagagtatgccccgggggcagaggtagtggttgacgggctggtttggaaatcggccggggtcaccctcaattggttgagcccaatcgacagtggccaacgtgagccgcagaaccttcgttgggcctggtggtgcgaccattgtggcggggctagcagcgaccaccagatgccagaccagtgtgcccattgcggcgagcgcagcattaccattgaacagtttcttgaaccggccgggttccgcgtcgactggaatgctcaaccgcatgccgacaccgatcaggctgtctacatcgaacccaagtctccgaaggtcagtgctggtgatgccctgtggcaacccatgctgcagcctgaaaccggtcggatccgtgcttcacatgaaggctacatctaccatcattcgcgtggacccaacgaccagggttacgagatttgcctggaatgtgggcgcgccggggatgccgggacagacgctctcaaagaccattggccactcacgccgagggatcgaagggcgatagaccgctgtccgggcaatgatgaaggttatgcgatcacgagcgctcttgcgctgggccatgaagttctaaccgatgtcgtagagctgcaattgcctggattggaaagtgacggcgcagcctgggcgcttggcgcagccttgcgggagagtcttgcgcgctggcttggcattgagccgcgcgagcttggaatttctgtggcagctcgagacggcaagctcggtcgcagagtgccgtcggtctatatcttcgatgaggcatctggaggtgccggatacgctccgagacttctcgacgacatctatcatgtattcgagcgagcggcccgcgtcctcgattgtcccaaggaatgcgagatggggtgttcggcctgcgtcctcgctgccgatctctacaagcagcagggacgtctcgaccggcggtctgctctcctcgcggtccaagcgtttcttgagacgaatgctgaactgccgcaggaagatcgtgcggtccccgatgccagggcaattaatgacgcggcaaacacactccttttgagagcgcgaagcggagacagcatttcggtcctgttgcccaccgtgttcgatcttgcagagctgacttcgaccaagatgcgcaccttcttttctgccgcctcggcccgcggcgttccggtgacgctcgtgcttgatccaagttcctttgataagctcgaagaggtcgaacggcgctttttgcgcgatgcctcggtgcggttcgaattctctttggccctgggcaaaggagaagatgcacccttcgggagtaagcgcctggccgaattgatctcaactgatcgcgccacagggttcttctcccgcgatgtgaatgcagcgcagccgggggagcgctggggcttgggtgagacgcatgctgtcgttgccggtactctcagcggccccagcgcctacaacccgatcaaccccgaagatctcgagcgacaggttgcggctggtgatcaggtcgagctgatgcaaggtttcgggcaatgcccggttacccaatttggcaaacgctttggatcgaaactgaagcaacagatggaagcggctggtgtttggaagcccggcagtcttgtgcggatcacttacaccgaccgttatctcaatgcgcctctacccatgctcctctttctgcggacgtgcgaagctctatccgctgacctgcaggcggatagtccggtcgaagttgatatcctggtccagccactgaagaaggatcggacaccccatcagatcttccatgactgggagtatgaagacgaccgagcggaagttgccgagctattgggcgaaaagtttggccttgatgtcgaacttcagatcacggaaaattcgaaccatggccgcaagcttgagctagaatatgccgatggtcagaaggttctgatcctgctcgaccagggattcggatactggcgaatcgcgggcagttcgccgcggcatgactttcgtgcagcgcctgcggtgcaagtcggcgagcttattcgctcaaccgctgccgtctctggtgtgggagagagctactacgcagtggccagaatatga

SEQ ID NO: 29733 - DNA, 3300 bp, Novosphingobium sp. PP1Y
atggaaggacgcgatttcaaatctgaaatcgacgcggcgcaaaacgacccggttcggctgcgcaagattgccgatgacattcacgcttgcggcggctcgcgtatcttgatgatccgcgcgatccagctggcccgggcagcagatagcggaccgcatcctttgggtaagacttgcggggatcttggtttacctcgcccgactggcctcccgctttatcgctacaagctcgcaccgggaatttttcagcggatcgaagcgaagcttgctgccaatctcgcatcggatttgctgcggccgtcgttagctccagctttcgttatgtgggcggcagactggtttcggcgctcctatcagggcggcatgcagcgctgggccgatatcgaagcggttttgggcctccaactcccacaatcggaatggcgggcacttgcagaccgcggtttcgatgcctggggcgttgatcctcttattacggcgcacggaaatcagcgtctctccaatctcgcgcggcatgggggctttcctgcagcagcaatcgcaggcggtgcgagctggccgcgtcgcttcctagagcgggcagtcggtgagctgctcggggcagatattcaggacatcgctaccgctgtctcgatctgcgaacgcaacgaatatttgcttccctcaatctggcgcagcccggaaatgcacgcaatctgcggggaacttgccctcaagatcgtcgagcttcgtgcatttatcgacaaggaagtgccagttgacggtcgcccttattctgcccggctggaccacgcttacgaagactggcgcgatgaactgcccatgacgctcgacggggctgcggcgggcctcattgatacgctccttgaagccagaaagctgacgggaacaggtagcatccgggtcggacgattgatgcgttcgcaggacggtgaatggcgcgaaagtctggatttccatctcgaaggtcgctgggacgacaaggatcgtgtgctgtccgcaggtgaatatgtccgggtgtttcttcagccctcgggcgccttggcggaccgtatctccggtcggctcgcttaccttgaggctgaagcggggaatagctggatcgcgcgcgctatgcgcagcgaagctgcgatcgattttcccttggacctctccgtcaccgccgaattccatgcgcgcggcgaaagactcgcccaaagctttattctgccgggcggcaaaacggttggacatggactgcggatattcgagcggcggaccggagacacggagctagtcgcgttttccctaatcggtcaggggtcgggtggttatcgcgccgaaccagtctttgtcgatgttccgcaggattgggtgcttcgcggcaaggacaacaatacagagatcgaagccgaagactttgcctttgcacctggtcgttcgctctaccgatgtgctggccagatcatcgcagagaagcccaatggcgacgcatttctggtgcggacggggcaaagtgcagatcgtaaggatcgcctgaccatggtggcccaagaggcgaccggtgtgcaggcacccggcggcgaacggttgatcaaacatccgctgcatgcagaagtcgaagacggggtttcccggcgcacggcaacgcgtggagaggtcggctggcggtttgcaggggaaagcacttggcgcgatgatcttgtcaacgcgggccccggacattgcgagttcgcctggctcgatggaacgaccaagcatgttcgggaccggacaagtgcactggttctgccggctgaatttgcactcagccagcggatcaatgcggcccatgcggacatcgctttggaaggttggaccggagaagcggtgctcagcgatgaaacgccgactgcggaccatcgctggcgggtgcggatcgatccgccccgtcgcgcgctgctcggcttgcgcctcacccccgaacatggctctaccttcgacctcaatgtgccattgcgatcgaaagaatggctgaccacctgggatggtgaacttctcaggcgcgatgctgtcctaggcctcgccgatcttcgtgacaccgttgcccgcgcgccaggccgtgcgatgctgatgggcgaagttgcccatcacgctggagcgtcgcttgaggcgagttggaaggtcgatgtcgaactgggcctgtcggctctgcgcaacgatattgccgccttgatgcggccgctcggcatcgatgcccaggtccggctcgactttcacaacggcagcaatgacaactggtacgtcacggaattcggcaattctcttgagtgggaaccttcgggagggctgcgtccgaaaacggccattgtcggcgaagatgtccgcgttggcggccgctttcttggagctcccgagaaagaggtggatttcggtccgtttgacggattgcttggcggcctcggagggcaaatgattcaattgccacgattgcgcggtccatggctcgtctatctgcgcgaaggtgctcgcgtcctcacgaggccgaagtttatcgaaggcgatccggttcaagacgttccgcaacacaggctcggccgggcaatggcacagcctcttttgcaagcccgcgaggacctcgtgaggctggcggaggaactcgctgccgagctcatgtctcccgaagcgaaccagacaattcgtgcggtcatggacttggcgcagtcactcaatggcttgcctccgcaaaccttcgaaatcttcagcaagtttgagattgccggtccgcttgcgccgctccttctttatcgctgcgaggagcaacacctctcgacgatcctcgagctgtttgatggcctatgctcaagctggtctcttttgccgatcaaggcctgggacactgcctttcaggctcaaggtaactatctggtcagccggctcgatgaccctcagtgggcgttggcaaacatcacggaacgtcagaacgaaatcgcggcgcgtgcgccgcagcttgcgccactcatttgccgggacttctcaccgttgagctgggaagagcttcgcaaccacttcacgagccatacaagcgagggcatcaatatggatgccggcggcttcaacccttttcggcctgcttacagcgagctactgccaagagagaacttcgtcgaagcgctgatgcgggtcttcgatgctcctttcgccgctgctctgtccgctagcggacgtgcttctctcgagaaggagcaagtcctgaccgtcaaagacgtcgaacgacgtcaccccgactactttgccaaagcctttggctatgccctttcggagctcaagaatggccgccagtga

SEQ ID NO: 29734 - DNA, 6327 bp, Pantoea dispersa
atgaacgttcagcaactgcattatgcgccacttctaaatcagcttcatcagcgtgcggtgaggtcggtggtaagtcagctggcattgcggagcaagtcgttgagtcaatatctggaatctcaatatttccagcctccaggtctgggggggtcactgcttgcagatccggtattcgaaagtacgtttggctggatgcccgcggatgaaacaatggaggatttgcgtgacaaactgatctccagcccgctggttgatgctttgagcaatgcgccagtgccgtttcgtcatcagctaactgcgtggcgaacgattcttgaagacaagcagtccctattagtgagcagtggtacagggtcaggaaaaacagaatgttttatggtgccggtgctggaagatcttattcgtcagcaaaatttgacacggcagtcactaacagggacgcaggctattttcttgtatccgttgaatgcgctaataaatagtcagcaagagcggcttcgcgagtggactcgcgggtttaaagggaagatacgctttgcgctatataatggcgaaacccggcataccaaatatgaagttcaggaagaccagctcaaagtacctgaacaggcattgagtcgggaagccatttatgaagccccaccgtccatcatggtgacgaataccacgatgctggaatatatgctgattcgtcgcaaagatgcccctgtcattgaaaagtcccagggaatgctgaagtatatcgtccttgatgaggctcacagttatattggctctcaggcagctgaattagcgctgcttttacgtcgcgtcatgcaggccttcaatgttggacctggtacagataaacctgtgcaaatcattgctacctcggccactattggtgaagattctcctgaaggtaataaagaacttgctaaatttgttgccgatctcgcgggggtcacagaacgtgatgtaaaagtagttcgcggctatcgacaaataccgccgatatcggagtctcttattcgtcatgaatatcccacatctttagcatctcttaactcactaagttctcaggaactttaccaacagctgtgccattaccgtgtggcccagcaattgcgtcaggcgttaactcgccccggacgcctggcggtacgtttgagtgaattgctcaatgttgccagaagaacctggccagacattaatcaccgtgagctgctgcagcttctcgatctgatggcgaaatcgcgagagggtgaatataaattttcactagcttttacgccattacgtatgcatgggtttatccgaacactcgcgggcctatgggcatgttcaaataaacaatgcgcacataaagcgagtgaattaggtgtgagtgactggccatttggtcaggtatggtttgaacaacgccaatattgtgactgtggtgcgcctgtatttgaaatcttacgttgctccgggtgtggttcagcttatttgtctgccaaggaggaagtgcgcggtgatggaacgagctggttggtggcgcaacctgctgctgccgaagaggatgagtttgctcttgatctcgatgtttattctgaagatgaagataacaacgaattagaaaataactcccaatttgatcgtcttatagcgagcgatggtgaaaaatatatcatttcactggaggaagcgacggcgggtaaaatcgaccgcgaggcgcaaaagcactatgagataaatctgctaagacctgaatctcgaggtgagggacgcaataattcctttgcttgtgtttgttgtggtgacacccaacggaaaaataatcctttgttccttccgcttcgactcggtgcacccttttttttaaatgaaattattcctactctgcttgaattttcgcctttaccgcaaacaagagaagagcagttaggaccgtttaatggtcgacgtttgctcacctttacggattcacgtcagggaaccgcccgtatctctgcccgattacagcaggacgcagataaagctacgttacgaaccctttgttatcaggaactggcaaatattaatgagccatcagtaaagctcagtccggcacattgtgcattgttagagagttttattacccagttttctatccctccgttaaaaaattccatcgacgcactgagaaaagcgatggtttcgaatgagaagcttagcccagcagacgttcaggcgcttagaattatcgagccgatggttagttccttaagtcaggaacatgctgaagcaatgcaaatactcctcgtcaattcaggcaatcagcagaagaaaaccatgtcgtggcaaactctgtctgaacaacttgttggcagtgtggatcttgcggacagaatgagaggcagttttaaagacttgtctggacttgagcttactaaacaacagtttgctgatttttgtttatacagtgagtttggtcgccgccctaaaaatgcctggaccctcgaaagtctggggctggtggccattcactatccatttattgataaagtcacaacctgcccgcaggactggaagacattattacccgaccccgataagcaattaccggaatggcgtaatttattgaagattacccttgatttctttatacgtgaaaacagtgccgttttttacgaaaacgaggagtaccctcgctggatgggagcacgtttcccggtaaaaatgctgcaggggccagataaaaaatacaaagggcagaaacgtgatcaactttggccacaaatacgcgatcgtcattataaccgggtcattaagctattaattgctgtctttccggcaatacagcctgagcaggctcactggaaagcgctggttaattacttaatgaatgaggtctgggaagctattcgaccatgcctgcgtcagtttgaatcgggttatcaattggacattaaacaacaagctgaattttacagtccaaagcaagtctggcgttgcccctatactcgccgtgcgttagatgtcactttattgggttattctccgtatttaccaggtagcaaagagatagcacctgaaaaagctgtattgattgaaatgcctgagcttcctgcgcgtcactggcgtttatctggtggtggagaaatggcgcgagaagagcgcctgcactggctggaatgtaatgaacgcattcaacatgctcgggaggagggggtatggtctactcgcagtgatcgattggccctgaaagatagctggtatcgtctggaggaacactcagcgcagcgaacaccagagaagaaccagtttaatgaaaaacaatttaaagcagggaaagtcaatgtgttgaactgttccacgaccatggaaatgggcgtggatattggtggtatgagtttggtcgcgatgaataacgttcctccggctccggcgaattatttgcagcgtgctggccgtgctggccgtcgcggtgaaagcgcatctgccgccattacgttatgtaaaaacaccgcgcatggaatggaggtattcaaagaccctctctgggcgttcaacaccgttgcgagtgccccacgggttcgttttggtagcagtagtattgttcagcggcatgttaacgcattggttttaggtgcgtttttacgggctgaagttcctgatgcgacaaaactgagttgtaaatggttctttgaaggtgatgagagccagtgtcttcgttttctccattggttaaatcatcaggccgatcagctggcggataaacttaaacgccttacccagggaactgtactgatgtcattgacgccgccacagctcttgactcgtacgcaaacgatgatgcagctggttgatactcgttggagaagccaacttgccatactgttggaaaacatcgaagcgttgaaagcagataacagcgcgtgggaagaaacgccagcaggcaaagcaatcacttatcagcttcgtgattatcgcggtgcttatctgttttctaaactcatcagtgaagcgttcctgccgggtcatggtttcccggttggcgtggtcaatttcaattatctgactgcggatgaactggaaagacgtcgcgcaataaaagccactcaggctgaccctaatgaagggggagaaaacttttctcgccgcattgaaaaactgcccagccgtgacctgcccacagcattacgtgaatatgctcctggtgctgatgtggtattgggcggaaaagtatatcgttcctcgggtattatgcttggtaaagtacttgccagcgggcaggagctgtctggcgatcatcatattccgtggttctggcattgccgtaaatgcggcgcgggagcgaccagcgccacccggcctgtcgaatgttgccactgcaaggcagatatacagcagcttgatgtgaagcggtatttacagcctgtcggtttcgcgacagacattcgttatcaggcacataatgatgtatccatgcctgcgcaacttccctggaaagatcctcgtgttcttgtaccttcttcggtatgggtctccttacccgatgctggactcggacgttaccgttttagtcatagcggggaattgttccactttagtgagggtgaatttggtcatggctacgcaatttgtctttcctgtggccgggcagaatctcaaacccagccccagcgtactccggagaatctaaagaacccggagaaggaaaatacacactacctgttgagaggcggtagtaatgatcggcaggggaacaataaattgtgccacggtcatgttcataaagatctgtggttgggatatagcagccgtacagatatggttgagctgcaactcagtgatgatagtggcttactgatcagggatgatgttgccgcgcgttcccttgcggttgctttgcgtgaaggattagcgcataaattgggtatcgaaaatactgagctgggcgtgacgacacagcaagcgcgcgatatcgatggcttcactggatattctatctttatttacgataataatgctggtggtgcgggttatgcagtgcaattgatcgataattggtcggatgtctttaattacgccagaaaattgctcgattgcagctgtgataaattctgccaccactgcttgctcagctacgacagtcagcattatgtcggcaaattagatcgtcaccaggcattaaccctgctcactaatcttcgtctacagcggcttaatctcgcgccagaatatcagtacttcggagaaagtagtcgggttgaaaccaacccactcagtttgcgtattgcgcaatgcctgaacagcgatgtttatgattcttgctcgttggttcttgctgggtcgcaggaacagtggagttttgcgcaatggccattatttaaagagttactccagtttgcttcctctgggggcaatgttgagttgctgattgccacgcagctggaaaacttagctgatagcaccagacatcagctttccgcgctagcggcgataccgggtgaatgcttgcaagtgaaatctatagacactgcgcaacttgtgcaagggaatgggcacttactggcacaggtcactcgtgaggggcaaacccaacagtgggccgctgccgacagtgccaccgtttcgcccggtgaattatggggacaaagctcggcatcgccggtagtgacgattaaaggggcgtccagaaaaacattctcgggtcagactttgagtgcagaagacttactgccagcattgcccgccggggcggtacgcatcaatctcagccaacaacttgacggtcaggtggaaggttttggttcgcgtttctgggcactgatagctcagcagcatgctggctggaagaaggtttttactaatggacgcgaaattactcacgtccattatagtgatcgttatctcaatagcccatttactgtacgtttgttaggtgaaattttgacggaattggttgaacaggggctggcagaacgtgccgaactcactgtttcagttaaaaagttagagtacagttctcgccaacacgattcactctataacgcatggcttgatgagcaggatcgccagcaagttatgaccacgttgctggaagagggctaccttgggccagcctggtcagggaaaatctcatggttagcaggagataatcagaacaccgatcacggacgagaactgaccgtgaccttcagcgatggcagtgaacattatgtgttgctcgatatgggactgagttactggcgttgtacaggtgacacattcttcgatttttcaggacgaataccgaatcaggtcgagcgcctggcaacatgccgggcattggttatagccccggataatggattgaagagttatatcatcgcaggctaa

SEQ ID NO: 29735 - DNA, 2937 bp, Pantoea dispersa
atgattgaaaatgaaagtggctatttaataacctatttcaaacgagtttatcaggcactacgtgggcaatcgtcaaggcgtcctgcggaaataatcgcacaagaactgggcgacactattcctgcgacaatgcaaaatgaactcgtctatgaaatagctggtgaattttgcgagacacttcatacgttactcaatgagcatcccactcatggtcaggaccccgtttcctcactacgcaaacaatatcctgactggcatcttcaacttccgttggtactcccggaagagaatgcctcagagattgtaagacgattactttctcaatcttcagagccccgtatatcaagcaatgtgctggttgaaaggatatgggttgatgttgatgacagttggtattgcgatgcccggtttcgatttccggccacaatgcgtactgaacagttaatatccctgtttgaaagcaatattcagccggaacagacacgactcatcatttctgcaaaatggagaaatggtggggcccggttggcaatgctaagccgttatgaacagcaagattggcgagtagagttattacccttcgctatgcaaaaactctctggggcagatgcgatgaccgaaatatcgttgtcgctccatgaagggccgattctgctaggtcacgtaattcccaaagggggttatgagcttaccgaagatttaccatgggtttttgaagcgatgaatgagagcgagtcgcagttaaaacttgtcggcatgggctctgttagttccaggcaaaactctctttttatttcgctaccgacaaatagtcatttggatattagtggagaaggtgagtttgatatcccgaggttgctgaaaaatagtgaacgtagcttaactaaaataagcggagtattcagcgttgttttacatgatggcgcagtttgtacgattcgcacgcagcaactttatgattctgcgattgagtattatataaaaccgacagagatcgatctggtaaaatctgattatcctgtccatcgtgcttggccaaagatcggctggaaaaaggatatgcagcatggcattgtcccagagaacgaacttttttggcgatccattcgttcaggtaacaactcctggttttctgtcgcatcagtaatgccgaaagggcagatagaagtcaggcgaatagtcaatggtgaggttttatttagcggtaaagttgtgattctgccagcagatttcgatattcaaattattcccgagactgctcagcaaggagttattgtactctctggtataacggatgcaagggttgataaatattcaaacaatgaaaaagtaacacttaaatcagattatttgcaaaacgagtgtgttattgattgtaattcatcacagatgctagagagcaccatcaatttacgagtatcctggaaagatggttctaatcttaaattgttattacctaagcccgttagcggtggacggtttgtaagtaatgatggttctgttcattttgacggtgttgcatctatagcacatttgcatggcgtggacgctgagctgttaacaatatcttgtgccgggaaaggatatcttaatatcgagttgttggatgaaaacccgatgtctgaaaaatttcattatttacatgcggatattccattgttatctggccgtaatgaaaaattgcaacagatttcactttatgagaattataatctgctgaacgccatgcttgtatgtgcatggaaaaatgatagtacattacgtgttgatttttactctgacagatttggtaaggacaaaacaacactcaatattaaacgctacgatggccgttttattgagggtgatgaaagattgctggttgatataaaagattctattgtttttccttatcataaaatagacgacatggttgttgaagccatttctcttaatactcctgacttatgcacagtcctgctgaaaaaagatgagtctggttatgatttctcgacgttgaataatcaaggtggcccatggttaattgtgggtaaaattgatggtgcaattcgtattgcaccagtgattaaatggatgctacctacattacagacaggtgatttatttctaaatgctatatgcaacgcatcgccagaacaacgcaaggaatattgtaatgcgctgtttttggaaatgaaaaataatcctttgcaaaacacttgttatttgttggttgagtacattaaaaaatataagttgaataatagcttgcctttgctggaactggatttatttagagaaatttcgagtaattattacgtggttgttcagttgttaatatcatcatgtctttctggggatagtgatgctatttatgatatacaggaggaattacccttctcatggggatggattcctgtttcaatatggaaagatgtctttgaacagtgttggtattctctggaaaaacagattaatgataaggcatttgcattaaatatactacagccatttattgcatttataaatcatcaagcgcatatcgatcgtcgattagttcccatcgctaatatgttgcttacacatagtgagatattacctgcaggttgcactgtattgccatctgtaagccgcgagcagtttaatgatgccaaacagatgttattaagaaacccagatagttttggacgtgtcagcattttttctaaagagctttgggatagtgctattactccagaccttaaatctgtttttaataaattttggatcgaaaacacatatcacactcgttttgaaaaacgttttaatttgatgttagtcgcggcgctgctttcccaaagaaacaataaacttatgcatcagctaactgcactttttgaatttcactatcagcaagccccgcagcaattgggggttatctatcagtattattttgaacaagcaggagtatgtcattga

SEQ ID NO: 29736 - DNA, 6327 bp, Pantoea dispersa; identical to SEQ ID NO: 29734

SEQ ID NO: 29737 - DNA, 2937 bp, Pantoea dispersa; identical to SEQ ID NO: 29735

SEQ ID NO: 29738 - DNA, 6330 bp, Pantoea sp. aB
atgaaagtccagcaactacattatgcgccgcttttaaatcaacttcatcagcgtgcagtgcgttcggtggtgagccaactggcattgcgtagcaaatcgctgactgagtatctggaatctcagtacttcagagcaccagggctacaaggttctctgcttgccgatcccgtatttgaaagtacttttggttggatgcctgccagtgaaacaatggatgggcttcgagacaagatcatatctaaccatttggttaatgcactcagtcatgcaccagtgcccttttcccaccagctaacagcctggcgtactattcttgaagataaacagtccttattagtgagcagtggtactgggtcaggaaaaacagaatgtttcatggtccctgtactggaagatctgattcgtcagcaagaggctcataggcagccactgataggtactcaggctatttttttgtatcctcttaatgccctaatcaacagccaacaggaacggttacgtgactggaccaaagggtttaaaggaaaaattcgttttgcgctttataacggtgaaacgaaacacacgaaatatgaggttcaggaagagcagaaaaaagttccagaacaagctttgagtagagaggaaatatacgagtccccaccttctattatggttacgaataccaccatgctggaatatatgcttattcgacgtaaagatgctcctatcgttgataaatcacaggggatattgaaatatatcgttcttgatgaggcgcatagctatattggttcccaggcggcagagctggcattattactgcgccgtgtcatgcaggcctttaatgtcggtccagggactgataatcctgttcaggtcattgcaacatcggccacgattggtgaagattcagtcgagggcaatcaagaattggcaaaatttgtcgctgatttggccggtgtgactgagcggaatgtaaaagtagtacgtggttaccgtcagatcccacctatatctgatacgcatattcgagctgaatttccattgtcattaacttcacttaataatcttaccccgaaagaactttatcagcagctttgtcagtaccgagtgacacaagaactacggcgagccttaactcagcaaaaaaatcctgcagtgcgtttaagtgaattactggttactgcccggcatatctggccggaaatatcaaaccgtgagttattgcaattacttgatctgatggctaaagctcgtgtagatacatcagataattcgctagcttttacccctttacgtatgcacgggtttattcgaactctggctgggctatgggcgtgttcaaatcggcaatgtgaccataaatctcctgaattgcagaataaggattggtcgtttggacaaatttggtctgagcaacgcctgttttgtgattgtggcgcaccagtctttgaggtacttcgttgttccggctgtggcacagcttatttatcggcaaaggaagaattaaaaaacgatggcactacatggttatctgcacaaccaactgttgccgatgaagacgagtttgctcttgaaatagacttatatcgtgatgatgaagatgaagacagcgaagagagcggtcaccagtttgatcgtcttttagctgataccggtgagaaaacatttgtctcactcgaagagaacagccaagggaaaatagtcagtaattccgcagttggttatgaagtgaatttgctgagaccggaaaaccgtgatgcagggaaatcgacgttttttacttgtatttgctgtggtgatgctgagcggaaaaataaccctttatttcgcccactgcgtttgggggcacctttctttctaagtgacattattccaacgttacttgaattctccccattaccaaaaaacctggaagaacagcaagggcctttcaatggtcgtcgattactgacttttaccgattcccgtcagggtacggcacgaatttctgcacgcttacagcaagatgcagataaatcaaccctcagaaccctttgctatcaagagttagcgaacataacagagcgttctgctggtttgagcgacgagcagaaagaattgctcaaaccttatatttcccaattctctgtagttccaatatttaagagtgcagtcgaggctttaagtaaggtgataacctcacatgaagtgttaagcccaaatgaaattctcgctttgaataccattacggcagccatcagttcacaaagcgaagcacatgctcaggcaatggaagcgttactttctggttcgggtggtcagaaggttaaatctgtttcctggcaaacattggtcgagcagctatccggtagtgtagacctggctgaccgaatgcgaggtagtttcaaagaaatatctgggcttgatttaaccaaacaacagtttgccgatttttgtctgtacagtgaatttggacgccgccctaaaaatgcatggacgttagaaaatttgggtctcgttgctattcattatccttttattgatgacgtgaatcgttgtcctcaggattggaaaagccttctgccagatcctgacaagcaacttgccgaatggcgcaatctactgaaaattacccttgatttctttattcgcgaaaacagtgctgtcttttacgagaatgaacaatatccccgttggatgggggcacgtttcccagtaaaaatgctgcaagggccggataaaaaatataaagagcagaagcgtgatcaactttggccccaaattcgggatcgccattacaaccgggttattaagttactggtggctgtattcccagctattcagccagatcaaacttactggaaagatttagttaacaatttaatgaaagaggcctgggatgccatcaggccaaatctacgtcaatttgagtcgggttatcaatttgatattaaagaacaagcttatttttacagcccaaaagagatctggcgttgtccttatacccggcgcgcacttgatgtaactctgctaggttactcaccttatttacctggaagtgaaggcattgctcctgagaaggccgtattggttgaaatgcctgaattgccaatgcgccactggcggctgtctggtggcggtgagttgccaagagatgagcggttacaatggctggaagatgacccgcaaatcaagagcgctcgtcgtgaaggtgtgtggtctacccgtagcgacaggctggcactgaaggatggctggtatcgcctggaagagcattctgcacaacgcacacctcaacaaaaccagtttaacgaaaaactgtttaaggctgggaaagtaaacgtgttgaactgctctacgacgatggaaatgggcgtagacattggcggtatgagtttggttgcgatgaataacgtccctcctgctccagctaattatctgcagcgtgcaggccgtgcagggcgtcgaggtgaatcagcttcagcagcaattaccttatgcaaaaataccgctcatggtatggaagttttcaaagatccgctttggccatttaacagtagttccaaggctccacaggtacgctttgagagcgaaagcattgtccagcgccacgtcaatgcgctggtacttggtctgtttttaagggcggaagtgccagatgcgaccaagctgagttgtaaatggttttttgagggtgaagatagccagtgtcaacgtttcttgaattggatgaatggccaatcagaagtattggccaacaagttgaaacggctggttcagggaacgatattaacgtctctgactgcttcccagctactttcccgtaccaatacaatgatgaagaaagcggagcttcactggcgtaatcaactcgctattttgctgcaaaatattgaatctttgaaagcagacaatattgcctgggaagagactcctgccggtaaagcaattgcctatcaattacgtgattatcgtagcgcatatcttttttcaaaactgatcagtgaagcttttcttcctggacacggtttccctgtgggggtcgttaactttaacttcctgacagctgatgaacttgaaaagcgtaaagctttaaaagccagtcaattggatcagaaagaggggacagagaacttttcacgtagtctcgaaaaactgccaagtcgtgacttgcctacagcattgcgtgaatatgcaccgggtgccgatgtggttttaggcggaaaagtctaccggtccgcaggaattatgctcggtaaagtattggggagtgggcaggagctaaaaggcgaccatcatattccgtggttctggcactgccgccaatgtggtgcggggtctaccagcgcaacatatcctgcaggttgtagccattgtggtgcagaaaaatcactacttaccgtgaggcgctatttgcaaccagttggttttgcgacagatatccgttatcaggcccataacgatgtgtctatgcccgcacaattgccttatcaggaccctcgggtgttggtaccttcagctgtatgggtttctctgccagatacatcactggggcgttaccgcttcagcaatagtggtgagttattccatttcagcgatggtgagttcggtaaaggctatgccatttgcttgtcttgtggtcgcactgagtcacaaacggaagctgaacgcacaccggcaacactcaaaaaacctgcactagaaaatacgcatcttctgttacgtggcggcagtaatgatcggcagggcagcagcaagctgtgccatggtcatgttcataaagatttgtggttaggttatagcagccgtacagacatggttgaactgcagcttaatgacgaaaacggtttgctgattactgatgatgttgctgcacgttccctggctgtcgcattacgtgaagggttggcacataaattaggtattgaaaataccgagctgggcgtcactattcagcaatcccgcgatagtaacaatgcttatggatactcgattttcatctatgacaataatgcaggcggggcaggttatgctgttcaaataattgatctttttagcgaagtgtttaactacgccaaaaagttacttgattgctcatgcgataaattctgtcatcactgcttactcagttacgacagtcagcactatgtcagtaagttggatcgccatcgtgccttaccattgctcaccagtacgcgtttgcagatgttgaaacttgcgccggaatatcaattcttcgggccgggcagccgggttgaaactatccctctaatgctgcgtttatcgcagcatcttagctcagggcgttacggcactctctcattggtaatatccggagtgacagaggagtgggattttgcgcagtggccattattgaaggatgtactgcggtttgcatcctcgggaggcaaggttgaactgctaatcaccaccgcattagctgagttacctgagaaaatacgccatcagttgtcggcattgtcagcgatgccgggtaatacattatgcatccgtcctatcactgagagccagcttgctcagaataaaggtcgctggttggcgcaaattattggtgatgatcattgcctacagtgggccgcaggcaatgatgccattaccatccctggtgaaagctgggggcagagtgcaacaactcctgttgtatcttgccaggtgtccgctgctaaggattaccctggaaatgcgctttccccagaagaactgttacctaagttgcccgcgggagctgttcgaatccatttgtcccaccaacttgatggcccattggaaggtttcggggcacgtttctgggcgcttataagcagtcaacacccattctggaagcgtgctttcaccgaaaaacgtgaaatagctcaggtgcaatatagcgatcgttatgtgaatagtcctttcactgcacgtctgctggccgaacttttgactgaattggtcgaacaaggaatggcagaacgagcggcactctcgatatcggtgaaaaagctcgactacagttcgcgtcaacatgactcattgtttaacgcctggctcaacgagcaagaccgggagcaggtggtgagaacattgctggaagaaggatatctgggccctgcctggtcagggaatatttcatggtttattggtgataaccgaacgactgaccatggccgcgagttaactgtgtcattcaaagatggtagtgaaggttatctactgctggatatgggacttggctactggcgctgccagggagattcattctttgacttcgaagagcatccttcccggcaagtcgaaatagtcgcttccagtagggcaaatctcatcgctccagataatggtctgcgaagctacatcattgtcgggtaa

SEQ ID NO: 29739 - DNA, 3354 bp, Pantoea sp. aB
gtgaagactccaaccaacccccttctgctttggctaaaagaatttcttaaaaaccgcacgttaacagtaacagatggaagagctctctacgcctatcgatgtgaggatattgaattcgccaaattggctctgcttcttcacaatcatgttccaaaaacctatccgaaaacgttcttcatttcttacagtgacgtcttattctgtctttatgcagccgagtttattcgtcgtaatcacaccgctgggcaccccagatgggatgcaattttgcagtcaattggctggcaagtcccttatttacatcgtcaaaagcttgtcagcgagggtatacgttattggaaaagagaagtgaggagtctggggcaagcttcaggttacttacacacactggcctgcgaaggtggattgccggttcgtatgatagaaaacgagagtggttatttaataaactacttcaggcggatttatcaggctttgagagggtcacaagccaatgtctctgcagttaagattgcggaagatttgagtgacacaattcctggtacaatgcaaaacgaacttgtctatgaagtagcgggtgaattctgctggacgctttctaaacttctcaacgaaagtggtcatcaggggggagatcctattgcctcactgcgcaagacattgccaaactggcaccaccaacttcctcttgtgcttctggaagagaatgcagcagaaatagtcaggcatttactttctcaaaaatcagaatcccgtgtcgcttccggtatcttaattgaaagaatttggattgatgttgatgacagttggttctgtgatgcgcgcttccgttttccagggatgctacgtactgaacagcttaaagccttatttgagtgtgaaatacaagaagatcaatcccggcttattgtttctgcacaatggaaaaatggtggggcacggttggcaatgttaagccgtcatgaacaccaagactggcgggtcgagttattgccagctgcgacacaaaaaatctcaggcatggaagcgttgggagaaatatcattaatgttgtttgatgggccagcgctcataggcagcggaattccgaaaggaggatacgaactggcagaagatctcccttgggtttttgaagctatgaacgagagcgagtcacagctgaaattattcggaatgggttctgttagttctgtgcaagccgctctatttatctcattgccagcaaatagcaatctggatatcagtggtgagggagatttcgatattccacgacttttgacgaatagtgcacgtagtctcacgaaagtcagtggtgtttttagcgttattttgcaagatggtgccatctgtactattcgtactcggcagatatctgattcatccactgaatattttattaaaccatcagaggtcgatcttgttaagtcggattatcctgttcatcgaacctggcctaaaattgcctggaaaaaagaccttcagcatgggattgttcccgagccggaactttattggcgttcaatacgttcagggaatatgacatggtcctcagtcacaacttcaatacctaaagggcaaattgaagtacggcatgtggttaataatgaagtgttattcagtggtcggatggttgttctaccagcagattttgatattaaaattgttcccgactcagcccaaaaaggaattattactctttccgggattgctgaaacgcgggtagaacgttacacaaataatgaaaattatttattaaaaactgactatctggctcaagagtgcatagttcctttcgatggtagtgtttccaaaaatatcacaatagacctgcgtgttacctggcgggatggttgtaaccttaagctattattaccctctccagtggccggtggtcgatttgttaatcaagaaggtgagacattttctgaaggtattgcatcagtagaccatttacatggagtgagtgctgatttacttacaatatccccagcagggaaaggttttctaaacgttgagttaaaagatgagaatccactttctaaagatcttcattttttatctatggatattccattatttactgggcgaaatgaaaacttacaacaaatttctctatatgagaaatataatctcttaaaatcacttctagcgtgctcatgggcgaaaaatagctcattacatcttgatttctacgctgaaaaattaggaaaagtcggttcaacgctaaacataaaacgatatgatggtaagtttattgaacgaggtgatcgtctacatattgatgttcagggcgcaattagctttccacaagatcgagctagtgaaataattttacaagcagtttcacttacagatcctgcttcatgcgttatgaccttaccgaaagatgcattaggttatgatttttcgtcaaagagtaatagcagtggaccttggttaataattggcaagctagataactatattcgggttgaaccattattaagatggagcgataaattacccgtacacgatgaattgttaataaaatcactttgtgagccggagcagtcaaaacgtaagagtgagataaactcactgctctccgatgtaaaaaacaatccattacagcagtctgcttattcaatagtcgagtatttaaaaaaatataaaagctctaatgacttacctctgcatgtgcacgatttgtttaataaactatccaaggacccactggctttaattcagctcttaatcacatcctgtttgtctggtgatagtgagcttatttacgacatgcaaaatgaattgccattctcatggggttggattccattcgaacattggagaaaaacttttcatgattgttatgtttctcttgcaactcaatttggtgatgaagcgctggcgttaaatatattacagccatttgttgtatttattagtaatagagcagcgattgaccgtcgattcgcagcgattgccaatatgcttcaaatgaattttaaattatcacaatcagcctgtgtcggaattacatctgttgatcgtgagcattttaatgaagcaaaacagatgctgttacgtactccggatagttttggccgtgttggaacctttaccaaggaacaatggttaactgctatctcgcctgacctgaaatctatatttaaaaagttttggatcgaagacagttaccaacaaaaatttgagaaactatttaatttgatgttggtcgctgcgttgttatctcataaagataataatgtaatgcaccagctttcttcactattcgaaatacactatcaacaagccccacaacagttggggatcatttatcagtattattttgagcaagcaggagtttgtcattga

SEQ ID NO: 29740 - DNA, 6315 bp, Pectobacterium carotovorum subsp. odoriferum
atgactacacgctatttttcgaccctcattgaacagtcactatctcgttcaacggaagcgacgctcagtattctgagcataactaatccccagttgcgtggacatcttgcacagcaaatggcggcagaatgtggtgcagaaggttcgtttctcgcctcaccagtttttgaacaaaccttcgattgggaaagagctggcatcaaaatgcatgagttggcatcggaaaaaactctgttgagcaaagaggtcattgcatctctggatcgcgaagataacgatcgctatcgctttgaggcggcgtggaaaccctttacgcatcaattggccagttggaaagcgttgcttgagcagaagcattcaattgtggtgaccagtggtacaggctctggtaagaccgagtgttttatggttccggtactggaggatctctaccgggaattacgtgggaacggtaacaaacctctgatgggtgtgcgggcgcttttcctctacccactgaatgcgctgattaattcccagcgtgaacgattggatgcctggacgcgcagcttcgggacgggaattcgctattgcctgtataacggcaacaccaaagagaaacatgcggccgtcaaaagcgagcaagagaaaaagccaaatgaagtgctttcgcgcgagaaaatgcgtcaagaaccagcacccattctagttaccaatggcaccatgctggaatatatgatggttcgccagattgatgcgcccattattcagcaatctaaagcgcaaaaatcactacgctggattgtgctcgacgaagcacacacctacgttggttcacaggctgccgaactagcgttgcagttgcgccgtgtaatgcatgcctttggtgttacacctagggacgtccgctttgtcgcaacatccgcaaccattgccggcagcgatgcagaaaaacagctgaaaaaattcttgtctgagctttctggcgtgccactggaacagatcgatgtgttggggggaaaacgcattgttcctgagcttgaggctagcctgaatcgctctgtttctctggatctgcttgaagctattcctgatgctggcgaaaaagaggttagcccagagcgctatagcacattaactcactcaccggaagcgcgttacttgcgtgaaatgctggtcggtcagcagcgggcaatgaaactggatgcgttaaccgcgcgcctcaatgaactcaccagacaacgctacacccaacaggatgttctgcgctggattgatctctgttccggtacgcgtcccaatgaacaggatcccgcttttctcaaagtcagggcgcatattttccagcgcaatacacagggactatgggcctgtgccgacaaaaactgcacggcaaagcacggcacggccctggaaaaaaactggccatttggttatgtctacgtaaaccaacggcagaactgcccatgtggcagcccgatatttgaattggcattttgtaatgaatgtaatgaaccccatctgctggcgcgagaaaaaaggggcaagcttgtccagtgggaaaataaaggcggtgatgagttctctctgcagggcgatatgccggaggacgttgagccggttgctgaaaaagtcgaaaaggagattgtcattaaaaccccgcacattattgcggcggaacacaatgaagcggctggctatacgcttcaacgcctcgatcgccagacacacagcatcggtgttatccacaataacagcatattactagccatcaacgacatcgatcaggtctgtagtgcacagagttgcaattaccggggcgtaaaaggaatctcacctttccggcgcgccattctggggagcccgttttatgtcacgcatattgttcctacagtacttgagtattgcccagattttacagggaaaaatgaaaaaggcgatggtccgcaaactctgccagggcgcggcagacgcctaattacctttaccgatagccgccagggcactgcgcgaatggctgtgcgtatgcagcaagaagctgaacgtaacaggctacgtggcagcgtggttgaaatcctgtcgtggtaccagaaacagcaatcgacaggcgacgttgctgctgctgatatcgatccgcagaaatttcgtgaactggccgataaagcccgcaaagaagcaaaagagtaccgtgacatgggcatgccgggtgaggcggcagaagcagaggaaaaagcgcaacgtttcgaacagcgtctgaaacaggcgttgggcgagaaagtgagcgtgcctctggtatcactcggctggcgagagatggttggcgagttacagaaaacctttgatatcaaaggtccgatcctgcgttacaacagataccataaaccggaaatctttcgcgagcatgatggcccggtaaaattatcggaaatgctgttatttcgcgagtttatgcgccgtcctaaacgatctaacagcctcgaaacccagggactagtgaagatcggttatcaaggccttgagaaggtgcagattgttcctgaccactggcaggaaaaggggctatcactccaggactggcaggatttcctcaaaatttcactcgatttttatgttcgtgaaaacagctatattcaattggaagatgactggcgacagtggattggtagccgtttcgcaccgcgttccttgcgcagccctgagtcagatgaacatgatgaatatcaggtcaaacgctggccgcagattcgccatggcattatgtcgcagcgattgatcaagcttttgttgctaggcgctgagctgaatgtgaagagaacggctgatatcgatgtggtgaacaactggttgaaagcggcctggaaggccctttcagggaaccttggcgtgttacgttcggacggaaaccgcttttacttaccacgcgagcatatgaccttctcgttggtgacaaaggcgtatatctgcccggtgactaacaagttactcgataccacctttaaaggattgaccccttaccttcccactcatattgattttaataagttaactgacgtacagcagcggtcttatacggccaaagctattgatttgccagaagtctggcatttcgatcgctcacaggacgattacgctaacggtattagtaaggtcagactcaaaatctctgaagatcctcttgtacaacagttgcgtttgcaaaatctgtggaccgatattaacgaccgggctattgaaggcggattctactaccgcacagcggaacactcggcacagcagtctgctgaacgcctggaagagtatgaaacgatgtttaaagagggcagcattaacgttctcaactgctcaaccaccatggaaatgggcgtagatattggtggtatctctgccgtagtgatgaataacgttccgccgcaccccgctaactatttacaacgtgccggtcgcgcgggccgtagtaaggaatctcgtgccatctcttatactttgtgtaaaggcaacccgcacgatcagcaggtattttccaatacgctctggccgtttgagacgacgatcccggcaccgatggtggctatgaattctgaacgtctggtgcagcggcatgttaattcgctgctgctctcggaattcctatgccacgtgatcggggaaacggaaaaagagcgtaccaatctcaacagccagtggttctttggcgaagagcatgaacaatccatctgtaatcgctttaaagtctggctggagcgtactacttcactggtcgatagcgcactggaaacgttagtgaaaggcagcgcgctgcacggggtcagccctgacaatctgcgccgaaatacgctcaaggccatttcgttcttacagcaacgctggctcgatatttaccaggatctttcgcggcaggaacacgaatcgcagcccgatacgccgtatcgtaagcgcctggagatggagataaaacgacactgtggtgaatacctgttgcgtgatttggcggcgagaaccttcctgcccggctatggcttccctaccgatgttgtcacctttgataacttcaatatggaagattacatccgcgagaaaacgttcagaagccgttataagagcgatcgagaagacaacgtctcgcgctataaagggctgccgtcacgcaacctgggtgtagcgatccgtgagtacgcgccgggtgcggaaattattctcgatggccgcgtattccgctccgccggtgtctcactacactggcataacctgaacgcagataccaatgaaccgcagcggctggatgttgcctggcgttgccataaatgcgggacgctggggtatgaagagggaatcggcggacagggcgaactgttttgtaccaatgctgcctgcagcgagcagattacttctgcaaacaaacgtcaggtgctgcaaccggcgggttttgtgaccgatgcctactatccggtaaccaacaacatcgaaacgatgaagttcatccccgtggtacctgtgtgggtgtttgtgcaggcagaacgtgtaccgttgccgaatccgctaaccgggtttatggcgtccgggccgaatggtcgcgtattccagcaaagtatgggcgaagggggacacggttatgcgctgtgcatgatttgtggccgcgcggagtcgatgattaatgaaactgatgcgccaaaatcgatggaagcccactacccaccgcgtccgggtaaaggcgatcgtgacagcaagaatcatcgcatgatctgcccgggctcaacagcattgaggaccaaagtgaccctgggcacagtagcgcagacggacgtatttgagtttatcctcaggcgtccgcagaatggcgagtatattcctgatggatccgacgaaggtcgaagcgttgcgatgacgctggctgttgctttgcgtcgcgcactggctggtgtgctgggggtttccgccgctgaactgggttatgccattcgtccggtgaaactggataatgatcagtctgtactggccatccagctgtatgacgtgattagtggcggagccggctttgcctccagcgcgccattgcatattgaagctctgctgagaggcatggtgaaacagctcggctgtagctattgcgatacggcctgtagtgagtgcctgctcgactcacaaacccgccacgatcacgatgtgctggatcgtaaagcggcgctgtcctgggtgggtgaggatttcacgcactatattggtttgccggaagaggaaaagctgtctctggcggatgcgcaatactgcccgggcagcattgaagatactattcgacgtgtgattaatgagggcgctacgtcattgacgctgtggctcagcgagccgttcagtgagtgggatctgtatgccagcgagttccgcagggcgatcctgcgttatcagatgatcgacaatctccccgtgacgctggtgatccctgccggtattactgatgccgacgtgttgggcgagttggctcagtttgccgcgacgggcatgcgaatttgctgcaacaaggcagctttgacgatacctgttattgcacagttgcaacatggcgagggcgttataacgctggcgacgcgtgacacacaggcggccatccctggctctgactggcaccagacgcaagcgttggtcgtgcgttcacagacatttgcgctggtcgatctggaagcggtggatctggcatgctggagtgaaccggcaggcgaacgggtaaaagatattcccctctctactgaactgaatggccccattgcgcagtttggtcgccgcttctgggccgaactggaaaaagccaatgaagagactggtgcattgctgaaaaacaatcagataacgcgtgtctactacactgaccgctatatacagaaccctgcagcgctggtgttgctgggttctatcatgaatcagttgaaacagcgtctgagcggccatacgcaggttgccatcaatacgctgttcaaaacgaaagagaaaccgggtttcaaggcagcacacgactgggcaaacgaagatgattttcagggttttgctgagcagtggtttaccacattgatggataagccggttgatgtcacgctgaattactccaaccgtgatattcctcatcatcgtaagctgctggtggagtttgataacggcaaagcactgaagatccgtttcgatcaggggatgggttactggtccattcagttccgcccagatagctataactttatggacgatgtcgaggatcaactctacaacatggcgcgttcgctggaacaagcctgggtcagcaataaagaagatcgctggccaacggatgtgctggtggaaattcagcaacagtag

SEQ ID NO: 29741 - DNA, 3297 bp, Pectobacterium carotovorum subsp. odoriferum
ttgagtaagtctaaactcgtttcagtatttaaatgcaccccttggttaacgaagtttctcactcgtcgtagcttaaaaaaagctgatggtaggcctctttatgaatatcacgcagatggcgatgaatacgccgatctgaagtggcttcttcgggaaataggacaaccagaaaaactaaaaaacgataaaggttatgccgcctgttttaccttattttgctctgaatggtaccgacgggactacggacgagactgcaaatggagctgggatcctattcatgcagccctgaatattaacctatctcattcagaattaggtttggtcgtaccaaaaggattggaaagtttttgggaacgtccaattcgtttttatgaatcggaacgtcgtaattttttggggtcacttttcagtgaaggtggtctgcctttcaggctgctgaaagaaacggatagccgcttccagtctgttttttcccgtattcttaatcaatacgaacaggcctcatctttggggtactcaacatcgatgttagtccaaatgatggttgagaaatcatatcttcctcaagtatttcaggaagatacatccatagcgttcattgctcggatggctgagcaactgatttcgctggtgcaactctatgatctcagcacccatactgaaccagttaaagagcttgatcgcgtacaccctaaatggcgcgacagctttcccatcccccttgacgatgatacgggaaccaacttcctcaacggcttactacgcacagcatcggtggaaaataagctccgacaacgtaaaagtaagatcatagaatgctctttttcctggtcagaacaaaaacccgatgctttacatacccacatttctctgccggaagaaatggtttttccattattgagtgaaccttctactactcgctttgaactggctgtgtgtgaagacggggaagacgtggtcagcctaggaagtgcttacgccacacttgagcatatgcaagccaaactgcggttgcgcaaaagtgacgttcggtttaaccggcgtcgacctgccaccacgctgtctctggttgcccggacgggtggggtgattattggcattgttaacattgctgagagtgaaatcccggttggcgatgtccctcttgtctttgtgcgtgagggtgatgaatggtccctgcaaggggtggcctcatgcagcgtccgcagtagcaacgtgttaatcattctgcctgaaggtggggcgctgtctgctgaaaatgctccctctgattttacctgtgaggctttcggctacccagctctggtggtggaaggaaggcaggatattctcattgaaggtgaggaaatctatcgcatacgtgctgggctggaacaggtgtgcttgcctaatttggaactacaaggtaagcgtctgaactggacgacctatcctgaagaggtgtttcttggctcaccgcgagtcatgcaaaaaatcggtgtcccaaccatccgctacaaacattttttgagcggtaaagatattgatatgtgtgagttgcatgactccatgggtacgcattttttgtccattcgcaatgagaataatgaaacgttactgcgtcgcaaaattggcatattaccagcggattttcaggttgaaattaagagcggcgagcaagctaacgaaggtctgatagtcatatcaacacagcataactgcttgtatgcattaaaagataaaacgctggaagtctgtcgtaggcgtaacggtagtaaaacagaaattgtgctcaaaaccgaaggtgttccgcctgcttctgtgcaattacaggtgacaccgagtttgaaggaagactccgttgatatcgtgatgcccttcccttccaaaggttgcctcgtatttgatgcagaaggcctgccgttggcaaaaaatatcaccatgaccgatttactgggctcacgggcgttcctgtttggcaaaaatggagaacctacccgcttcacgctggaactacgcttgcgttccaacagtgagcagcaggcatggcatgagtggcgttataacgccggtgaacgcccgcttgaaataaatctttatagcctgaaagagcatattgagaacttactttccctcggttcagggattgatcagattgtggatatgcggattagcggcataggtggtacaggtaactggcaaatccggcgctacaaatacagcctggaatataacccggtattacagttactgcgttccaactcgattcacaactcatcagggaaggtgtcgtcgccagttatcatgttgctgagcgagccagagcgaaaatccattcctctgacatccagaatgagtgaaggtgttccggtaggagagtttgagcttggcccgattgtggggaaaaatggcccctggctggttctaccgaaacccggcgaagaaaccgcattccgtccctgttttattcgcggcgagccgttgccagaaacggaaagcggtacgattcgttccttgcaaaaagccactcagcttttcaaacctgaggctgagataaataccatttctcaggttctgggtcagatggcggacgatccggcgcattctggctggcaattcctgaataccttgtacggtcagtttggctacttaccgctggccaccttcgaggtatggcgtgcgctgttccagcatccgcaggcgctggcgctttccttgttcaagtttgagatgtcgcccgagtaccttgcaaggattgaagctgaattccctgtcttttgggagttcttacctgtgcaggaaatcaaaaatgcagcggcaaaaatgcaggcctttatgatgaataaaggtgcctctgtagaaatgcagaccggttttattcagaagatgtaccaacggttagggactgtatttccaacttactcctacgaggtatatgagtggctaagccaggcctcgttaccaaagagtattcagccgggggtaatgaaaggcattatccagggctggtatcaggagttgcttcgcgaacacggggaatcccgctggccggaatatggcggcccacgcctctctcgctggattcagtcgcaagccgatcccgttattgaaatttcttccgatacgcattttcgctatgccgttgcatggctgccagtttttgctgctgcagtcgccagcggtaaaacaacctataccagcgtttttggcaatgaccccggcgccgtatttttcttacggcaggtcagagattttgattctcgctggttcaatgctttgtttcagtactgcttgctgcgtaacattacggaaaaataa

SEQ ID NO: 29742 - DNA, 6315 bp, Pectobacterium wasabiae WPP163
atgactacacgctatttttcgacactcattgaacagtcactatctcgttcaacggaagcgacgctaagtattctgagcatcactaatccccagttgcgtaagcatcttgcacagcaaatggcggcagaatgtggtgcagaaggttcgtttctcgcctcaccagtttttgaacaaaccttcgattgggaaagagccggcatcaaaatgcatgagttggcatcggaaaaaactctgttgagcaaagaggtaattgcatctctggatcgcgaagacaacgatcgctatcgctttgaggcggcgtggaaaccctttacgcatcaattggccagttggaaagcgttgcttgagcagaagcattcaattgtggtgaccagtggtacgggttctggtaagaccgagtgttttatggttccggtactggaggatctctaccgggaattacgtgggaacggtaacaagcccctggtcggtgtgcgggcgcttttcctctacccattgaatgcgctgattaattcccagcgtgaacgattggatgcctggacgcgcagcttcgggacgggaattcgctattgcctgtataacggcaacaccaaagagaaacatgcggccgtcaaaagcgagcaagagaaaaagccaaatgaagtgctttcgcgcgagaagatgcgtgaagaaccagcacccattctagttaccaatggcaccatgctggaatatatgatggttcgccagattgatgcgcccattattcagcaatctaaagcgcaaaaatcactacgctggattgtgctcgacgaagcacacacctacgttggttcacaggctgccgaactggcgttgcagttgcgccgcgtaatgcattcctttggtgttacacccagggacgtccggtttgtcgcaacatccgcaaccattgccggcagcgatgcagaaaaacagctgaaaaaattcttgtctgagctttctggcgtgccactggaacagatcgatgtgctggggggaaaacgcattgtacctgagcttgaggctagcctgaatcgctctgtttctctagatgtgcttgaagctattcctgatgctggcgaaaaagaggttagcccagagcgctatagcgcattaactcactcaccggaagcgcgttacttgcgtgaaatgctggtcggtcagcagcgggcaatgaaactggatgcattaaccgagcgcctcaatgaactcaccagacaacgctacacccaacaggatgttctgcgctggattgatctctgttccggtacgcgccccaatgaacaggatcccgcttttctcaaagtcagggcgcatattttccagcgcaatacacagggactatgggcctgtgccgacaaaaactgcacgacaaagcacggcacggccctggagaaaagctggccatttggttatgtctacgtaaaccaacggcagaactgcccatgtggtagcccggtatttgaattggcattttgtaatgaatgtaatgaaccacatctgctggcgcgagaaaaaaggggaaagcttgtccagtgggaaaataaaggcggtgacgagttttctctacaggacgacataccggatgacgttgaaccggttgctgaaaaagtagaaaaagagattgtcatcaaaaccccgcacattattgcggcggaacacaatgaagcagctggctatacgcttcaacgcctcgatcgccagacacacagtatcggtgttatccacaataacagcatatcactagccatcaacgacatcgatcagatctgtagtgcccggagttgcagttaccggggcgtaaaaggaatgtcgcctttccggcgcgctatcctgggtagcccgttttatgtcacgcatattgttcctactgtgcttgagtattgcccagattttttggggaaaaatggaaaaggcgatggtccacaaactctgccaggacgcggcagacgcctaattacctttaccgatagccgccagggcactgcgcgaatggctgtgcgtatgcagcaagaagctgaacgtaacaggctacgtggcagcgtggttgaaatcctgtcgtggtaccagaaacagcaatcggcaggcgacgttgctgctgctgatatcgatccgcagaaatttcgtgaactggccgataaagcccgcaaagaagcaaaagagtaccgtgacatgggcatgccgggtgaggcggtagaagcagaggaaaaagcacaacgtttcgaacagcgtctgaaacaggcgttgggcgaaaaagtgagcgtgcctctggtgtcactcggctggcgagagatggttggcgagttacagaagacctttgatatcaaaggtccgatcctgcgttacaacagatatcataaaccggaaatatttcgcgagcatgatggcccggtgaaattatcggaaatgctgttatttcgcgagtttatgcgccgacctaaacgatctaacagccttgaaacccagggactggtgaagatcggttatcaaggccttgagaaggcgcagattgttcctgaccactggcaggaaaaggggctgtcactccaggactggcaggatttcctcaaaatatcactcgatttttatgttcgtgaaaacagctatattcaattggaagatgactggcgacagtggattggtagccgcttcgcgccgcgttccttgcgcagccctgagtcagatgaacatgatgaatatcaggtcaaacgctggccgcagattcgccatggcattatgtcgcagcgattgatcaagcttttattgctaggcgctgggctgaatgtgaagagaacggctgatatcgatgtggtgaacaactggttgaaagcggcctggaaggccctttccgggaaccttggagtgttacgttcggacggaaaccgcttttacttaccgcgcgagcatatgaccttctcgttggtgacaaaagcgtatatttgcccggcaaccaataaatttctggatacggctttcaaaggcttaactccttaccttccgacgcatatcgattttgaaaacctgagcgatgcacaacggctgtcgtatagtgcagagccggctatgttgccagaagtctggcatttcgatcgctcacagaacgattacgctaacggtattagtaaggtcagactccaaatctctgaagaccctattgtacaacagttgcgtttgcaaaatctgtggaccgatattaacgaccgggctattgaaggcggattctactaccgcacagcagagcactcggcacagcagtctgctgaacgcctggaagagtatgaaacgatgtttaaagagggcagcattaacgttctcaactgctcaaccaccatggaaatgggcgtagatattggtggtatctctgccgtagtgatgaataacgttccgccgcacccagctaactatttgcaacgtgccggtcgcgcgggccgtagtaaagaatcgcgcgccatctcttataccttgtgtaaaggcaacccgcacgatcagcaggtattttccaatacgctctggccgtttgagacgacgatcccggcaccgatggtggctatgaattctgaacgtctggtgcagaggcatgttaattcgctgctactctcggaattcctatgccacgagatcggggaaacggaaaaagagcgtaccaatctcaacagccagtggttctttggcgaagagcataaacaatccatctgtaatcgctttaaagtctggctggagcgtactatttcaccggtcgatagcgcactgaaaacgttagtgaaaggcaccgcgctgcacggggtcagccctgacaatctgcgccgaaatacgctcaaggccatttcgttcttacagcaacgctggctcgatatttaccgggacctttcgcggcaggaacacgaatcgcagcccgatacgccgtatcgtaaacgcctggagatggagataaaacggcactgtggtgaatacctgttgcgtgatttggcggcgagaaccttcctacccggctatggcttccccaccgatgttgtcacctttgataacttcaatatggaagattacatccgcgagaaaacgttcagaagccgttataagagcgatcgagaagacaacgtctcgcgctataaagggttgccgtcacgcaatctgggtgtggcgatccgcgagtacgcaccgggagctgaaattattctcgatggccgcgtattccgctccgccggtgtctcactacactggcataacctgaacgcagataccaatgaacctcagcggctagatgttgcctggcgttgccataaatgcgggacgctggggtatgaagagggaatcggcggacagggcgaactgctttgtaccaatacctcctgcagcgagcagattacttctgcaaacaaacgtcaggtgctgcaaccagcaggatttgtgaccgatgcctactatccagtaaccaacaacatcgaaacgatgaagttcatccccgtggtacctgcgtgggtgtttgtgcaggcagaacgcgtaccgttgccgaatccgctaaccggatttatggcatctgggccgaatggtcgcgtattccaacaaagtatgggcgaaggaggacacggttatgcactgtgcatgatttgtggccgcgcggaatcgatgattaatgaaactgatgcgccaaaatcgatggaatcccactacccaccgcgtccaggtaagggcgatcgtgatagccagaaccatcgcctgttctgcccgggttccacggcattgaggaccaaagtgaccctaggtgcagtggcacagacggatgtgtttgagcttatcctcaggcgctcgcagagcggcgagtatattccggatggatccgacgaaggtcgcagcgttgcgatgacgctggctgttgctttgcgtcgcgcactggctgctgtgttgggggtttccgcctctgaactgggttatgccattcgtccggtgaaactggataatgatcagtctgtactggccatccagctatatgacgtgattagtggcggagcaggctttgcctccagcgcgccattgcatattgaagctctgctgagaggcatggtgaaacagctcggctgtagccattgcgatacggcctgtagtgagtgcctgctcgactcacaaacccgccacgaccacgatgtgctggatcgtaaagcggcgctgtcctgggtgggtgaggatttcacgcactatattggtttgccggaagaggaaaaactgtctctggcggatgcgcaatactgcccgggcagcattgaagatactattcgacgtgtgattaatgagggcgctacgtcattgacgctgtggctcagcgagccattcagtgagtgggatctgtatgccagcgagttccgtagggcgatcctgcgttatcagatgatcgacaatctcgccgtaacgctggtgatccctaccggtattactgatgcagacgtgttgggcgagctggctcagtttgccgcgacgggcatgcgaatttgctgcaacaaggcagcgttgacgatgcctgttattgcacagttgcagagtggcaagagcgttataacgctggcgacgcgtgacacactggcggccatccctgactctgactggcaccagacgcaagcgttggtcgtgcgttcacagacatttgcgctggtcgacctggaagcggtggatctggcgtgctggagtgaaccggcaggcgagcgggtaaaagatattcccctctctactgaactgaatggccccattgcgcagtttggtcgtcgcttctgggccgaactggaaaaagccaatgaagagactggtgcattgctgaaaaacaatcagataacgcgtgtctactacaccgatcgctatatacagaacccggcggcgctggtgttgctgggttcgattatgaatcagttgaaaccgcgtctgagcgtccatacgcaggttgccatcaatacgctgttcaaaacgaaagagaaaccgggcttcaaggcagcacacgactgggcaaacaaagatgactttcaaggttttgctgagcattggtttaccacgctgatggataagccggttgatgtcacgctgaattactccaaacgtgatattcctcatcatcgtaagctactggtggagtttgataatggcaaagcactgaagatccgtttcgatcaggggatgggttactggtccattcagttcagcccagatagctataactttagggacgatgtcgaggatcaactctacaacatggcgcgttcgctggaacaagcttgggtcagcaataaagaagatcgctggccaacggatgtactggtggaaattcagcagcagtaa

SEQ ID NO: 29743 - DNA, 3294 bp, Pectobacterium wasabiae WPP163
ttgagtcagtctaaactcgtttcagtatttaaatgtaccccttggttaacgaagtttcttactcgtcgtagcttaaaaaaagctgatggcaggcctctttatgaatatcatgcaacaaacgatgaatatgccgatctgaaacaacttcttcggcaaatagggcagccagaaaaactaaataatgataaaggatatgcagcctgttttacactcttttgctctgagtggtatcgacgggattatgggcgagactgcaaatggagctgggatcctattcatgcagccctgaatattaacctatctcattcagaattaggtttggtcgtaccaaaaggattggaagatttttgggaacgtccaattcgtttttatgaatcggaacgtcgtaattttctgggatcacttttcagtgaaggtggtctacctttcaagctgctgaaagaaacggacagccgcttccagtctgttttttcccgtattcttaatcaatatgaacaggcctcatcgctggggtattcaacatcgatgttggtccaaatgatggttgaaaaatcatctcttccccaagggtttcgggaggatacatccatagagttcattgctcggatggctgagcaactgatttcactggtgcaactctatgatctcagcacccatgctgaaccggttaaagaacttgggcgcgtacaccctaaatggcgcgacagttttcccatcccccttgacgatgatacgggaaccagctttctcaacggcttgctacgcacagcatcggtggaaaataagccccgacagcgcaaaagtaaggtcatagaatgctttttttcctggtcagagcaaaaacccgatgctttacatacccacatttccctgccggaagaaatggtttttccattattgagtgagccttcgactactcgctttgaactggcagtgtgtgaagacggggaagacgtgatcagcctgggaagcgcttacgccacacttgggcatatgcaagccagattacggttgcgcaaaagtgacgttcggtttcagcggcaccgacctgccactacgttgtcgctagttgcccgggcgggtggggtgattattggcattgttaacattgctgagagtgaaatcccggttggcgatgttcctcttgtctttgtgcgtgagagtgatgaatggctcctgcaaggggttgcctcatgcagtgtccgcagtagcaacgtgttaatcattctgcctgaaggggggacactgtctgctgaaaatgccccctctgattttacctgcgaggctttcggctacccagctctggtggtggaaggaaggcatgatattctcatcgaaggtgaagaaatctatcgcatacgtgctggactggaacaggcacgcttgcctggtttggggttacaaggtaagcgtctgaactggacgacctatcctgaagaggtgtttcttggcccgccgcacgtcatgcaaaaaatgggggtccctgcgattcgctacagacgttttttgagcggcaaagatattgatatgtgtgagttgcatgacgccatgggtacacattttttgtccattcgcaatgagaacaatgaaacgttactgcgtcgcaaaattggcatattaccagcggattttcaggttgaaattaagagcggcgagcgagcaaacgaaggtctgatagtcatctcaacacagtataactgcttgtatgcattaaaagataaaacgctggaagtctgtcgtaggcgtaacggtagtaaaacagaaattgtgctcaaagccgaaggtgttccgcctgcttctgtgcaattgcaggtgaccccaagcttgatggaagctcccgttgggattgttatgccttttccctcaagtggttgccttgcttttgatgccgaaggtcggccgctagcgaaaaatatcaccattaccgatttgctgggctcacgggcgttcctttttggcaaaaatggagaaccgacccgtttcacactggaactacgcttgcgttccaacagtgggcagcaggcatggcatgagtggcgttataacgctggtgaacgcccgcttgaagtcaatctttatagcctgaaagagcatattgagaacttacttttcctcggctcagggattgatcagattgtggatatgcggattagcggcataggcggtactggtaactggcaaatcaggcgctacaaatacagcctggaatatgatccggcattacagatactacgttccaactcggttcacaacgcatcgaaagtaccttcgccagttatcatgttgctgagcgagccagagcgaagatccattcctctggcatccagaatgagtgaaggtgttccggtaggagaatttgagcttggctcgattgtgggaaaaaatggcccctggctggttctgcctaaatccggcgaagaaaccgcattccgtccctgttttattcgcggtgagccgttaccagaagctgaagtcggcacgattcattctttgcaaaaagccactcgactttttaaacctggtgctgaggttaatactatttctctggttctggatcggatggctaacgatccggcgcattctggctggcaatttctacaaaatctgtacagccagttcagctatttaccgctggccaccttcgaggtttggcgtgcgctatttcagcatcctcaggcactggcactctccttattcaaatttgaaatgtcgcctgaatatcttgggagaatcgaatctgaattccccgttttttgggaattcttaccgatacagcaaattaaaaatacagcggcaaaaatgaaagcctttatggcaagcaaaggcgcatccgcggaaatgcagagtagtttcatcaacaagatgtaccaacggttggggacagtttttccaacttactcaagcgagatatatgaatggctcagcctgaccacttcaccgagaagtattccgccgtcggtaatgaaagacattcttcaaggctggtatcaggagctcctgcgcgagcatggggagtcccgctggccggaatatggcggcccacaactctatcgctggatccagtcgcaagccgatcccgtcattgaaatctcttccgatacgcattttcgctatgccgttgcatggctgccggtttttgctgccgccgtcgccagcggtaaaacaacctataccagcgtttttggcaatgaacccggcgccgtatttttcttaaggcaggtcagagattttgattctcgctggttcaatgctttgtttcagtactgcttactgcgtaacattacggaaaaataa

SEQ ID NO: 29744 - DNA, 6012 bp, Pelagibaca bermudensis HTCC2601
atgaagacctccggctacggcgccacactttccagcatcgcgacccgagcagcttcggccattgtcgcacggggcaacattcggtcagattctgcgcgatctatgctgctccgccgcctgtccgcaatccccggcgaaacggatagcttgatcgcgccgcccctctatgaggcggcccgtatctggcaggccgccgagccaaacatggcccagctcgcgggtgaactgctgcgccccgacctcgtcgaggcgctggatgctgccggtgctgaggccatcccgaaggaccgccatccatactggcaccagcacgaggcctggaaatcggccgccgccagtcgaagctacatggtcacaagcggtacaggttctggcaagaccgagtgtttcatggtgccgatgctgaacgacctgctgaactgcgcggagaccggcgcaaagcatggcgtccgcgggttgatcctataccctctcaacgcgctgatcgactcgcagcgggagcgactcggctcatggatcgctcctttcgacgggaagatttcctacgctctctataacggcgacacgccagaaacccgcaacccacacaagcgtcctggcgccgcagagatcggcgaccgcaaaaccctgcgtaagacgcccgccaacctgttggtgaccaacgtcacgatgctggaatacatgctcacgcgggcacaggaccggggcattctcgagcagtctcaggggaagctccgatggatcgtgctcgacgaggcgcatagctacgtcggcgctcaggctgcagaaatggcgctgttgctgcgccgcgtacgacaggccttcggcgtaaagccagaggacgtccggcttgtcgccacctccgccacgatcggcgaaggtcccgagacaaccgaagccctacgccgcttcgttgccagccttggtggcgtcgatccctcgcaagtcgacatcatcatggggcgtgaagaaccgttgattctgccagaaccagtcgccgacggcccgatctgcgtccatggcgagacacccgaagcgctctggtctggccttgctccgcaccctcgagtgcaacaggcccgcgccatgctgcgcgatggcggtgcgcggcttctagatcttgccaaggtccttgtgccggagagtgctaacgccgtcgaggcagagcacctactcgacgccatggcgcaagcgcgcgagacgccggatcggccgccgctggcgccttggcgactgaatgcctttgagcgctcccaggccggcctctgggcttgcgtcgatccggcgtgcggccatcgatcgcctgagctttgcgccgaggacagtgactggaatttcggacagatccatctgttccagagagagcattgcggatgcggtgccccggtgttcgagatcggcgcgtgttcggaatgtggcaccccgtggcttctcgcgcacgaggaaagtggcaaacagcgcatcctgcaccagtctgattccgacaccgaagaagacgacttccgcctcgacgtcgagcccgaagacgacggcgacgacgcatcggttagtgcggcccgccttgtcggccccgctgatgactcccatccggtacatcagctgcgacattccgatgctgtggtgcgcgatgtcttaacggacgagcctgggcacagcacgatccgcctatgctcgcatgacgatcgaggctgctgcgctggcgcgcatcacagtcgaagcagagtggcggttcaacgcttcggctcgccgttcttgttgggcaacgcgatcccgcaattgcttgaggcgatgccacgtcctgatggcattcaaggtccagccccaatgggtggacggaggcttctctctttcaccgacagtcgccagggcaccgctcgcttcgccgccaagctccaacaggaggcggaacgtggcctgacgcgcgctgcgatctggcacgcggtgcaaagcaaagctgcaggtgatcccacaaaggcggcagaactgcgtgctcagcttgatgcgctacgcggcaaccctttgatggcaagtctactccctgcgcttgagaagcagctcgcagaggccgagggagggttcgccccagtaccttggaccgaaatgctcaacactctcgcacaggttccggaccttcgcagtttcgctggcgacgtctggcaggggcgcggtgcgagtcacccgttcggagggctcacgcttgcgcgcgagccagtggagctggcaaagctactgctgctgcgcgagatcttccgccgaccgaaactgcagaacaacgtggagacaatggggctcgcccgtgtctgctggcccgagctcgagcgtcagatggaggagtccgacatccctgccccattgcgcgaggcgggacatgaggcgccagtctggattgcgctcggccaagcagccatcgatatggcctttcgaaaccgccttgcggtgcatatgcagcagacccctgtcgatcttgcgcactggatctcacctcgacaggccgcaacacaggtcttggagccgggtgtcgagttcgacgagacaagcgcgagcaggcgcacccataaatggtggactgcctattccagcgccgggcttgtgcagctcatctatcggctaattgacggcgacgacgaatctgccacagacctcgaacggtgccagacggtcttggatgccctttgggcaaccttgcgcgcgaaggtgctaacaagggccgatcccggctgttggcagctcgacttcgcgaaatcggccctgatcggcatggagtccgcttggcagtgccccgtcaccggaaagcttctgccctacacgctcgcggggatcactccgaacgacgccgccagccccgaagcaatggcggaagtcacgctgccccacctcccagtcacgagccccgccgggctgacaggggccgaacgcgcccgggtcgagagctggctcaccactgacgaaaccatagccacgctgcgcaagaaggggctgtggaccgacctccaagaccgtgcagcggccttcgcgccttttctacgcgcgcaggaacattcggctcagatcgaccgtgaaagcctcaagggctacgaggatgccttccgaaagggtcggatcaacatcctgaattgctccacgacgatggagatgggcgtcgacatccccaatgtcggaaccgtggtgaacaccaacgtcccacctgccccgtcgaactaccgccagcgcatcggccgcgccggtcggcgcggagagccatgggcaatgtcttttaccttctgcaaggacaagccgctcgactggcaggtcttccgcactcccgaaaccctcctgagggccgaaatcccagcacccacagtccgccttgacagtccggtcatgatcgcgcgtcacgtgaatgcactgctgcttggcatgttcctgaggagagaaggcgggctgagcatcaagaccgcgattgggtcattcttcggcgcccgaagcttcaagctcgaagacgatctaccgaacacttggaccgaaggcgccatggccgaccagtttcttgccgaacttgatggcggctgggcaaatgaacctgaagttgtcgaggcgatcaccctattggtgcgtggtaccgcacttgagggcaagaccaaccttccagccgcgactgcgaccgcattcgccgacctcgcgaagcgttggcgcctggagtatgagcgccttgtcgatggctggcgtgccgcccctccgcgcgagcccgagaaagcattctttgccaaccgtgcaagacggatgcgcagcgagttccttatgacggagctggctcggcgcggcttcacgccggcctatgggtttccagtggacgtggtcagcttcgatcacatcggcggagacggtggcaaaggaccgtcgcggcagctcgacatcgcgatccgcgactatgcgccgggctcggagatcgtcatcgacgggttggtacaccggtccgatgggatactgccggcttggagcaataccgcagatgccgacagcctcgacgatctgcgcagccactggcgctgccagacctgcgctgccttcggcctgtcgcgcgaagccgtccacgaatgcccgcgatgcggcgatcccgtattgcatggcgagctgttgcgcccttccggttttctcggtcgcaggaagccccacgcaggctatgagcaggtcagcttcgtcgcccccgaccgcccgcgagtgtccagcggcgatgttccctggctcagtctcgccgacccttcagtcggtcggcttcgaacgtcgcgacaggggcacgttctattcacaggctcaggccagaatggccatgggtacgccatttgcctcgcctgcggacaagccgagcctgagaccggctccgcgcaggatacgccgctgtcacagagaatggctgcgcacaggccgctgcaacccatccgcaacaatcctcgccacgacggcaattgccccggttgtgatgatacctcgcgcaagatccggcgcaacgtgacgcttggtaatgagattacgactgacgtcttcgaatggcagctgcgcgaccttggaacgacatctactgacagaagccgtgctatggcgatcgccgcggccctgcgcgaggcgctggcgaagtctctcggcatcgaggccgaagacatgggcatcgcagcggccccaagtttgctcgaagatgacaatcgcgcgatgtctgtctttcttttcgatcgagcctcaggcggttctggcttcgctccgctggcgcaggatgcgctgcctgttctcgtcgaacgggcccgaggcattcttgattgtcccgcgcggtgtgcatcaggatgccccgagtgcatcctgcgcggcgacatccagtatgacatagcgctcttggaccgccctggcgcgcttgaaacgctcacgggcctgcgagatcggctcaacttgccagaggcgctgaagctttttggcgaaacgacccgagccctaccccaggcgctccccgattggctggctccgcgcctgcgcggtggtcatgtgaccgaattggcgctgttcatgcatggcgcgccgtcgacatgggatctccgtgaccttgccgcgcgtttgccccgccgcgacgaagctcgggtcgcacgggtcgtcctacggcacaaggacatggttaaactcgaggcaccagagaaggtcgatcttgtacgtttcctcgcggagtgcggtgcaagactgcacggcgtcgaaaccctgccgagccaagggggcaagccagttctgtgccaattcctctacgaggggcaggcgcaagctgttaccgcccagaccgaggacaacgcagtgcccgatggacgctggggccgaccggaagagggtccgatcctcctcggccctcgcaagccagaggaccttggggcatcgctttctgccgagaagctcgcagtctttaacgaaggaaactcgatctatgccgatgctggcacccgtttcgatcgaagcgtaggccatttcgggagggagttctggaaaatggtccgagaaatgcgtcctcagctctcccgtgaggtgccactggcctcggtcacctattcggaccgctacctgcgcgcaccattgcctgtgcggcttctctacgaggtgctccgtacaatgccggataggaatgaggcgacgacaatcatggtaagaacctcggcgcaggatcgagagagccgcttcccgagccgcgacattgaggacaactggaccgaagatcgactgcgtctgcagaccatgaaggctctgctgccaggtgtggatgtgcggattcttccaaggaaactttgccctcacccacgtagtttcgaactgacatggcgagacggtcgcaccgcacgcattcacctcgaccaagggctgggcagctggacggtagcagaccacttggcaccgcgctttgacgtcgaggatgatccgaagcgtcaggcgtcagcgcttgcgaagatgacgttcagtctgcgcaaccgtcagacgagcggcatcgaaacgccgatctgggtgtcttggtga

SEQ ID NO: 29745 - DNA, 2895 bp, Pelagibaca bermudensis HTCC2601
ttgctggccgatcaggagggcagcacccgtcggctcgtccgaggcttgcttggcgacattcataaagtaggtcagggtgcacctgagcaggtgctgaacgcagtaactgcccagcgcattcagtcgcttcccatgggttttcggaccgaagagttcaaaacgctgttgcgtgatttctgcttggttctgctggcccggaaagcagaaataccaacaacgatcccacccgaggcacggcagagctggctggacgcaaacagaccgggttggaaggatgcacttccactgcggatcgaatccgccgcggccgagagcctgttgcacgaggctgtccgctccgagaatagcctaggacgggataccatcgcgtcccgccaccttgttcgcgttgaggatcgctgggtcccgaagctgcgcatcgcccataccgccgagttgccagactggatgttggggcttggcgatccacgtatcaggtcgctccgctttctcccggataccgatctggcacaacaagcgcccggccttgtgctatcagcctacaaggagccgggagacaaggtctgggaggtgcaccgcgacagcgccggtcgtcgtgcggaatttaccatgccgttggatgcaccggtctcatttcgcttgatggcggagggacagctcaaggggacgcatgttccgcctggctgcgatgcacttagcgatgacgatatgcccaccgtttggtccgctgaagatctgtcaccaaacggcaccgtgcaaagtctgcgcaagctcggatcaagtgctcagaaaaccaaggcacccaatttgtgggtcctcgtccagggtggggcagcaaaattcgaggatctggagaccgttgaagaaggccgcatcggcccggcaaagctctggcgcgtgaccggaaagggcgtcgtcatcaccccggcaggaaggctgccgatcatcaccggagccgaggaagaggcaaccgacagcttgttggccagcggtgttcatgtgcccggtttgcgcgacacaagccgttccgagttcatgcagggtattcccgtattccacgcgctgaccgcagacgggaccggtcgtcggcttacccgggcccagatgcgttggcgtccgcttgggcagaagatctggaagaatggcttgcccgcccccacaacctgcctcggcacccaccaattctgctggaaggatgaaggcggtgccgcgcgggcctttgccaccgttcggctgctcccggaaaacgctcaggtcgcattggccgattgtggcgatggttttctcgaatgccgggtatcgggcctgcccgccgggacagtggtcagtttggggagcgaggtttcgggcgtggttccaacgcacggaaccctgaccttgcggatgggtgatgccgcttctgcaatggggcgtattccgctgcacattcgtccagccgagggcggagcgcgcgcctttgatgcgacgctaccgcgaccaggcgaccgcggttatttcatcgacgctgaagaccacattctacaggaggacattgaactcgacctgggcagcctgcgcggctggcggatcgttgcgcccacagatcgaaacgccgaactgcgcatccgccttcagggggaccacacaccccgccaaccgatccttttgggtgtcacaaatgagacgtccttgggcaccctcctaccgcgcctgcgtggtctgatggcgatcggtgggcccgacagcgaactccggatgcgcgtcctgatcggcgcttcgcagagccaacgcatcaagctgcgtcgtcatttgcgaaacggtgactgggccgacggagggttcacgcttggtccagacaacggcaacgttgatcccggcgggttggagattgaggctgcgaacctgtcagccccatcactcagcgcaaggatttccgcactgcagccaggtgaggaccccatgccactcctgcccgagcatccagggccgtggatgttcttcgcccgggatgccggtgggctcgttcgtccaccccgtccgatccaaaaaaccgtcgcagaggcccctgtcacggcaccgcatttctccgaagagttcctgtcctgcgggcaacacccccggcgaaatgatcgtctggcggctttcggcagggcgctgcgccgattgattgaaccgcacggtatgggcgatctcggggtgttcgagcagcaactcgacgacctcggcgataccgaagcactatccagcctcgactcggtcgttgccttgtcgcatgcgccggatctggcagccctgctgctgctgcgggccgcacccgatacgctaggcgcgcggctcgagctggaaactgtcagccccttctcctggaccacgctaccattgagcgcgtggcgccatgccctgcaaacccacgcgagctctctattcatgcaactgagcgccagcggcctgcctgagagcgatgcaaagagcttctcccaacaggccatcgttcaccggctacggcagcttgtcgatcgccgcccagaaatctccggacagttgttttccgctgccatggacaccgacctccttcctgcccttgtgaaggtctgcccaccgccgctagccctgaacaatcccgaaaagaccctcgccgattgcgcgcaaagtgcaatcaagaagcacgaggcggcgcggcagcccttcccgcttcgctcatctcatgcgccggccctcttcaagacctttttcgacggctttcgcggcttgctcgatgcgccgctgatagctgcggaacatgtgctggaacttctgccgacaccgccagacaccgagaccgccatcgcgctgctgtattaccggctgcacgatcccgactatttcgagacggcgatgccagccgccatcgccctgatccgctccaagacgaagtga

SEQ ID NO: 29746 - DNA, 6198 bp, Photobacterium profundum 3TCK
atggaatattttgaatcgattattgatcaactgactaaacgtgcagcacgcgcaacattaggtcagtttggtcttcgttctaagccactacgcgagtttttatggcaagcattttcaaaagcaccgggtaaagacggtgcgtttctaggcgatcctgtttttgaagccacgtttggctggcaaccacacactgaaaccatgcaagctttgtcgggtggcctattagaagctagtgtcgtcaatgcgatggcgaatccccccaaagaattaaaagaagactaccagtttgaatctcactggttcccttatgcccaccagtatgaggcatggcagcatttgtcacagaatgaaccgcgttcggtgattgtgagtagtggtacgggctctggtaaaacagaatgtttccttgttcctattttcaatgatattgcgaaacggaaaagtaaagctgagggggtagaagcactctttctttatccattgaatgccttgataaacagccaacgtgatcgactagcagcctggacgcatgaactgggttctgatgtgaaattttgcctttataacggtgaaacgaaagaaaatatgcccgttgcaaaacaacgttcgcagccaaaccaacaattatcaagaaaagcattgcgcgatgatcctgcccaaatattggtgaccaatgccactatgctggagtacatgctagtccgccaaaaagatgagcctattctggctaaatcaaagggtaagcttcgctggattgtgctggatgaagcccatacttatattggttcgcaagcggcggaactatcgttgttattacgtcgagtgatgcatggatttgatgttacgcctgatcaagtgcgatttgtcgcaacctcggcgaccattggtggtaaagattcagatgatgacttgaaagccttccttgctgatgtcgcgggtgtcgatattactcaggtttatttggtcaaaggtcaccgagaaattacacaacttgcggagttttcaacgccacacgcaatggatattaagcaagtaagggctatcgaggatgccgaggttcgttatcgcgtacttgaatcgattatgccgcttcgtgtattacgccaacagttaagctctgatgataatcggttgtcgctggctcaaatctgtaagttgctctcggccacggaagtgccgatggctgaaaagttggcgctgcaatggttggatgtttgtgcgtcgacggttggagccgagggccaagcgttcattccatttcgtttgcatttgttccatcgcgtgtcgagcggcttatgggcctgttcgaattcaagctgtaaagcaaagtcgggcacagcgttagacacgattgattggcgctttggcatggtttacatgtctcgccgtgagcaatgtggttgtggatcgccagtctttgaaatgaccagctgtaatggctgcggtacgagcttgctgttagcggatgaaagtgtagagaaagaatcaggaaatagtgttcttagcctaactaagccagattcaagtatcgatgattttacgttagatatcgaaatcgacgatgcagagtcttttgatgattccgaaccggatgattcagagagtcattcccgtatttgtattatgtcagagcaatctcatgacgaaactggtgaatattggttaaacaacgatggcgtattaaaaccaagttcctataagggggcatttaacgttcatcgtgttgaaggttacagtaaatcagatgggagtggcgttgctcttcgttgcccttgttgtcagcatactaaaattcagaattatgatttctatcgtcacttccgcaatggcgcgccgtttatgctgtcgacggttattcctacgttgttagaattttgccaagacggtaaaaaagaacagctaaaaggcccttggcatgggcgtcgaatgatcacgtttaccgatagtcggcaaggaacggcacgatttgcagctaagtctcagcaagatgccgaacgtcaatttctccgtgctgcgctgtttcatctagtggcggatagaacccttaaaagcggtacgcttacacctgagcaggaaaaagaccttaaaaagtataaatctcgcttagccatgtttatcgaagacggcgatgatgacatggttgaaatcatagaggagaagattacttctttatgtggtggcgctggcgacgttacgatcccatggtctgatgttgagcatgagctagcaaaagaaaaagaactccagtattggatcaaagactcttatcaacggtttgatgacaccatgaatatggtgaaagacccaattctattgtcacgtttgttgttattacgcgagtttaacagccgtccgaaacggcagaacacattggaaacgctagggttgatccgaatggaataccctgcgattaaggataaaggcaatactgcaccagcagagtgggtatcactgtttgatgatactgcagcagggcaggctgcatgggttaactttttaaccttatgcctaaatttccatgttcgtgctaataaagcaatttctttgactgaagaacagcagcgttggattggcgctaagttcagtgcgggtctgatcattgcacctgatagtgaaagtcagttcaggaatattcaaagttggccgcaagtgagaaaaggcgccgttcagccacgtttggtcaggctacttgttgcggcttttaatcttgatattgcagaaaaagaagataaaacacagataaatatcatcttgcaagatgcgtggaaagtgcttcaacgctatgtgttatcggccagtggtgatggttatcgtcttgagttagaacatcaggctagctttagtttgattgataaaaaatggcagtgtccacatacccagaaaatcattgataccccactagagcagataacgccttatctgaatgtgaaagggcagcgtgatgagcagcgttgccgtttattggaagcccctgcttatccttatccctatgggcgacgtattgaagacggttcagttgtcaccttgaatgaagcgagagactggcaagaacaacccgagatcgccaacctgcgtaaagaaaatgcgtggtctgacatttctgatcgtattgttgagcgtacgccgtattttagagttgctgagcattcagctcaattacctgcaagcttacttcgcgattacgaagataagttcaagaagggggcaattaatgtcttgagttgttcgacgaccatggagatgggcgtcgatatcggtggtatttcagttgtggcgatgaataacgcgccaccaaacccagcgaactatcttcagcgtgccggtcgtgctggtcgtcgtggtgaaacaaaatcagtggcattaacgctatgcaagagcacgccacatggtgaacatatttttggtcagacacgttgggcttttgatacgccgattcatgttccaaatgtttcactatcaagtgaatatatagtaaagcgccatattaatgctctgctgctatcagttttcttacgtcagaaaaatatcagcgaaaactctctgcgtttgagctgtggtaatttctttatttcagctcatgaaaactgtgcttcacaagccgagctgtttaccaattggtgctgtactgaagcgctaacgattatgagtgatggcttagaaacattgctcagacgtactgttttacaagccagtacaaaagcgcacttggttcaagatgccgctaagcaaatgaatgtaatcttgcaaagttggctaaaagagcatcagttgttgtgtgagcagagtgaggcagttaaggctgatagtaatagactttctacagcccaagctgcagttgaaacccaaattcaacgtttagaaggtgaatacctgttatctgagcttgctagaaaagggttcttgcctggttatggtttccctaccgatgtggtttcactcaataatgataatgcagaaaccatcaatcgtcgaaaagggttaatcaaagccgctaaagaagcgaagtctgcaaaaaatgagaaactagaacatcgtattgataatttgtatagcgcacgagattacccgtctcgggatttgtctgttgcgataagagattatgcaccgggcagtgaggttgtactcgatggccgagtataccaatccggcggtgtgatccttaattggcacagccctgcatctgccgatcaggttaatgaaatccaatcgttaatgtgggcttggcgctgtcagcattgcggtgccagtggcactgatagaaatatgccttcagagtgtcgttgctgtgatgcgtcattaaaatctgatagctaccatcgatttatcgagccgggtagttttgcggttgatattcgcaataaaccccacaatgatatttctcgtttagtccatgtgccatttcaagatccttgggtaacagttgaacaagcaaattgggaagaaataagtgttaacccgagtgcattgttcagatcgagccacgatggtcatgtctattatcatagtgcagggctttcaaacagtggttacgcactgtgtttagagtgtgggcgtatggagccaatgcctgatgccgacggtgtaacgccacatcaagtccttgataaccatacacgcttacgtggcggaaaaggtgagatcgaacgggagagcgagcatttctgcggcgggaatgaacgagattttgcgattaagggaccaataaagttagggcacagtactcgtaccgatgtatttgaattattgctttttaatggagatggtactgtactgaataaccgtactgttgcgcgatctatatctgtattactacgtaatgaactggctgaaaagttaggtatcaatagtgatgagatcggttgcacaaccaagcctgtaaattataaagaccatgaagcgcaagccattgtactttacgattcttcagctggtggcgctggttttgcgattaaagcccctgaatttattgttgagttgctgcaacgagcgaagaaaaaggccattgagtgtaattgcgacaaggcatgtcaccgttgtctggttgattactcgactcaacatgctctggatttattgaatcgctggaaagtcattgagtttttagataatgacttctttgcccggctgtcactaccaagtgaattcatgctatttgatcacgctaaccgaagagagttgcgtccattagtgacagcattagagcagtcgctggcacgcttaaaatcacctgaactatgtatttacctagatagcgaggcacttggtgatttgggtgagtggccattaattgatgttctttatagttgggctagagagggaagggtgaaagtcgttctaataagtcgtgatagcgaattatctacttctgagcagatcagcctctcatggttgtcaaaccatccgaatattgaactacttcagcgtactacaccgctaaaaagtgatatgacgttatgcgccgagatttatagtggcgagcttgctcattgctggggtttccttaatgagtatgactcacagttgattacgggatgtagcgccgtaccagaactaaaagcgatagagctaaacgttactaaacatcatgaaaaaatcggtacagtgcaggttcataatgaattgaatggaacagtaaaagcatttggtgctttgttttggaccaaggtactccaagcatctgatctgttactgagtaagatgcagaccaataaaattgttgaggtagagtattgtgaccgttatttggcagcaccattaccatttagtttgtgcttaagcactgttggggcattactaggtcattacaatggctgtaaagcgaagatcatcactggtcgcttgcatacctcgctatatgctccagaaaccgtgcaagataactggtactgcgaggaagatagggaacaattggttgagagctgtattaataaaactcaacttgatattacttttgaaactgcacctaaatttagtttgccacacgccagaacaatgaacctgacctttgatgacggtgcgattgtaactatttggcttgatcaaggctttggttactggtgggtagataaatacgattcagaaaatcgcttcccttcaaacttgagcattcaacaacaggcagaacatattattcaaggtaaatggcagcttaggggcgggcagtggcctaccgcagtgttcttctcaatagacgattaa

SEQ ID NO: 29747 - DNA, 3375 bp, Photobacterium profundum 3TCK
atgaatacattcagacattgcatcgctgatattttgtcttctcgtgagttagaccatgttagtggtgcgccactttatagttacaaactaactgatggtgaatacttaactttgcaaacatcattgcttgatagtttacgaagtcaaaatattgaatgttatgtgccatcggcaatgagttctgagtgggcaggggcatttgtaatgtatgctgccgagtggtggagaaagcagttcaatggcggccattggagctgggaaccgatttttcgttcactgaatgttagtgattcagatataacggcaggtcaacgtaataaattgattgcggcaggttttcgtttttggcgcaggccgatactgagtaatggccaaggtcggatgtttttaggctctgtagctgttgagggtggtttacctttacagttaatcaccgatccaaacagtaagctctccaactatttcgagcaagtcatcaaagattttggcaagtttacattatctaagcctaatgccgccgcgattgcagaggcacacgatcattgtatcgccgcttcgtttcgtactgaagccgtttactctgtggtgggtaaaattgcagaagctatctatcagctgactgaccaatatgggctagatgaacagcacgatccattacgctttctagatgctgtcgcaccaaactggcccgagaaactgccgttaaatattgatcatgatattgcgaaaggcttgatcaatagtgcattaggtcaagccattgccgttcaacgtcgcctgcctagcactattcgtctagttcgacgtttaacacaaacctataaccaacatgcttacgtggtggatgaacctagtcaagccgatgcaaaatggaaatgtcagctttcgcttacgttacgttctcgggttaacgctcaatatattcaacagctttttggtatgcaggtgttaccagaacgcttcagtctatttgctatgggtaaaaaaccgctgttattagcaaaggcttttcgtcctaaaaataaccctgaacgttacttactagatgtgatggacagtgatttacctgaagattggtttgattgtgaaattcagttaatggcgcgtggcgacaatgaccaaacatggtacgcccctttattaggagggagtggcttagatactgaagaaccgtgggtatttactgagcatgaaggtgagtgggtgttagcaggatcgggtgatgtaagttgtgagtcgacgaaagcgttgattgcgctatcgccagaaaatacattaccttctttcttgagttgcgagtgcttatttggtgtgacagaacaacctttcgctcgcactctgtatcagcttagtgattcgggtgcttaccaatttggtgatgcggttgttgaattgggagagaacagtaagttaaacaccgagtttgtttggcaaggtgcagaattatcttaccaaacactgccgaacaaatgttttatcggcaagccaagtttattggccttatcggctcaaggtgcacaccacgatatttcagcagataagctacgttggcatcatgcatcaaaacaacaatggctgccgtttgataccttaccattaggtcaaagtgaagtggctttcattgatggggggaaggcaaaaaagcgttttagattggcaagtttaccgcaagacatgacgattgaattcttacctggtcgtcagattaatcgtggtcaaattgttatctcttcttcgcgtcctcctatggtggcattgactcaacctaacgctgggcaattagattttcaaataacgcaaactccgcactcagtcaccattgatttattcagtgctcaagaacagccaccggctttagttgaattggagttatggtggcaagaaaaacccaaagcagtatcggtaaccgtaccttttccaagcaagggcgtctgtttgttagatggtgaacaacagcctgttgatagccatagtgaattgttgttcgataagattaatcgttatgaactgtatggctatggccttgaaggcgaaattgagctgcaattttcattaaatgcatatgatgtgcgtggtccgtttagtcgaggtgcttttttcagtacggtattaccttcaattgacgtgttatctactggtttatcattatcaaccttccgatctgatattcaagcactctttgcattgtcatcaagtttggatgcaaaagtgaaagtatcggtggttaaccacgggcaagcagtgtttacctgcttcttatctgcgtatgttcactcactccaacctgaccgtgaacgaagctgtgttgagcttgttggcgaaggtatgagctcgtctattaatttatataccgtgcctttagagcgaccagatcaaacgccgttgcaattggtaccagcgacgggtttagaagatacagagcgtgtatgggtattccccgatgatgaagtagaggctggtgcatggttggtgtattgcgataacccacagctgggaattcgatcgctaatgtggagtaaagacttagagctattacccaaggcacgtaacggttttgaagccgctgcaggcattgggcgccgagcagaacgactagacgcattcagtcaggctgcaaaggaaatggcgtatgactttacccgtccagaatggaagtatgtgcgtacattgctatcgttcgatcatgtgccgttaacgacctttgatttatggcgtggtgtggcacggcagcctgaatttatgctggctttattgctaaacgccagcaaaaaagaaatcgaccaagtttggcaaatggataaacagttcccgctgctttggtattcactaaaagtggcaacagctgccaaggtgattaacgctttctatgacaacctgctaaaccgtttaggtgaggatatggaagatgttgctcaaaatcggatacagaagaagctatcagaacttgtgtcttattttcctggtcttgcgccgttatctgccatgatgcaatttaaaattggtttggttgaacagaagccagcattggttccacctgcttacatgcagcatgtttatgattgtcgaaacaccttgtctcaacgtcaggttgattcaccatggccaactattttcgccgatggggtaatgaaatcagttattagtaaaataaaccctcaatttgctcagctgtgcttaaccagtaaacatgggtttaagaataatgtgatgaatgcaccgatgttattggcactggcaaccagcggccaagcaggattaaccatgacgcctgaagtggtgcatgcgatgcgtgaataccgccgatttgatccagagtattttgatgacagctttgcattaacccaaaaaatgatcattggtttagtccaaatttaa

SEQ ID NO: 29748 - DNA, 6318 bp, Pluralibacter gergoviae
atgacgacgcactatttttcttcacttattgaacaatcgctctcccgcgccactgaggccacgctcagtattgtggggatcaccaatccgcagctgcgcgaacaccttggccatctgatgggcgcggagtgtggcagtgcgggctcattcctcgcctcaccggtatttcagcaaatgtttggctggaaagaatcagaccagacgatgcgtagcctgacgcaaggaaaggcactgctcagtaaagccgtcgtcgactcgctggacaactcaggcaacggccgctaccgatttggcgcggattggaagccctttacccaccaactggcgagctggaaagcgctgcttgagcaaaaacattccgtggtggtcaccagcgggacagggtcaggcaaaacggagtgctttatggttccggtgctggaggacctctaccgggagctgcatgagaacggaaataaacctctcgtcggcgtcagagccctgtttctttatccgcttaacgccctgatcaattcgcagcgtgagcgccttgatgcctggacccgcagtttcggtaccgggatccgctattgcctctacaacgggaataccgagaacctgcacgcatcggtaaaaactgagcaggtaaaaagatcgaatgaagtgctatcccgtgaaaagatgcgtgaagaacccgcgccaattctggtgaccaacggcacgatgctcgaatatatgatggtgcgccagattgatgcgccaatcatccagcaatcgaaagcgcagaaatcgctgcgctggatagtccttgatgaagcgcacacgtatgtcggttcacaggcggccgaactggcgcttcagttgcgtcgcgtaatgacggcctttggcgtgacgcctgaagaggtgcggtttgtagcgacatcggcgaccattgccggaagcgatgctgtgcagcagctgaaaaaattcctgtctgaactttccggtataccgcaggaacgcatcgacgtgctggacggcaaccgggtgatcccctcgctggagcccagcagacagatttatcgcccgcttgaagagattgagaagatccctgatgagagtgataccaaagacgtcagctccgaacgctttcaggccctgacgcactctcctgaagcccgatatctgagggagatgctggttacccagcctaatccgcttaagctcgacgagataacgcagcgtttagacacgctaaccgggcggcatcacagccagcaggaggttttgcgctggattgacctctgttccggcactcagcccaataccaaagccccggcctttttaaaggtcagggcgcatattttccagcgcaacacgcagggcctgtgggcctgcgttgacaaggcgtgtccggaaaaagcaggctcagcgctacaggacaactggccgtttggctacgtgtacgttaaccagcgccacaattgtagctgcggaagcccggtttacgagctggcgttctgcaatgactgcaacgaaccgcacctgctggcgagagacaaaaaagggaagctcgttcagtgggataacaaaggcggggacgagttctctttacaggaggacatgccggaagagcgtgacgaccaggtagaaaaagtcgcaaaagagagcgcgtatcaggcgccgatcgtgattgctgcagagtgcaattctgtagaaggctatatcccacagaagctggacagaaagacgcgcagcattggcgtagtgaataatgacagcattacgctggctatcaatgaaattgagctggtctgcagcggctgcggctataaaggcatcagcggcaggcagccgtttcgccgcgccctgctgggcggaccgttttacgttaccaatattgtccccaccgttctcgaatactgtcaggactttattagtgaagaaggcaaagacagcattggtcctgactcactgccgggaagaggacgacggctgatcaccttcacggatagccggcagggcacggccagaatggcggtgcggatgcagcaggaggccgagcgcagccgattacgcggcagcatcgtcgagatcctgggctggcaccagagaaaacaggcaaacgccatccccaatgccagcgctgacgtggcaaaaatgcgtgagatggccagactggcccgcgaagaggcagaatccttccgttcctggggtatgccggaagacgcaaaaggcgccgaagcccgggctgaacgcatcgagcaggccatccaggccgccaccggcggcagggttaagacgaacctggtttcccgcacctggacggaggtcgtgaatgagctgaaagataaagctgatattaagggccctgtcctgcaatataactattatctgaagcccgaaattttcaacgcaaatggcggcccgctcaagcttgcggaaatgctgctgtttcgcgaggtgatgcgcagacccaagcggaccaatagcctggaaacccagggcctggtgcgcgtcggctatcaggggctcgataaagtacatcaaatgccgccccactggcaggataaaggactgacgctggcagactggcaagacttcctcaaagtcacgctggatttctacgtccgcgaaagtaacttcatccagcttgatgatgagctaagaaactggatcggcagccgcttctcttcaaaatatgtccgcaaccccgagtcaaaagaacccgacgacaaccagaataagcgctggccgcaaattcgtggcactaacgtgacccatcgcttagtaaagctgcttattctgggcgccggtttcaaaacggcaaatacggtcaccattgatatcgttaacgcgtggcttaaagaagcctggctccagctcagcggctccctgtcggtgctcaggcccgacggtaaccgcttctacttacccaaagagcacctgacgttttccttagttcaggatgcctggatctgtccggtaaccaataaaattctcgacactgccttcaaaggtttgactccctacctgcccacccatattgcttttgagcacctcacccaagaacaatatgagaccttcacggcgcgaagagtcaccctgccgcccatttgggagcttgaccgctctcaggatgactacgcagatggcctcgaaaaagtgcgtaactgggtagagaaagagcctgttatcaataaactgcgcgcagaaaatctctggacggatattaacgaccgcgcggttgaaggtggcttctactaccgcactgccgagcactcggcccagcagtcttcagagcgcctgcaaagctacgaaaacatgtttaagaaggggcagctgaatgtgctcaactgctccacgacgatggaaatgggggttgatatcggcgggatcacggcggtggtgatgaataacgtgccgccgcatccggccaactatctgcagcgcgccgggcgagcaggacggagtaaggagtcccgcgccgtctcctataccttatgcaaaggcaacccgcacgaccagcaggtgtttgccagcccactctggccgtttgagacttcaatccccgcccctatggtggcgatgaactctgcccggctggtgcagcgccacgttaacgcgctgctgctgtccgactttttatgccgcgttataggcgaaacagacaaagaaaaaaccagcctcgacagcatgtggtttttcggtgaggaagaggggcagtcgcgctgcgaaaactttaaagtctggctcgaacgtccggtgctggagatagacccggctctggaaaggctggtgaaaggtactgcgctgcacggtgccagatccgacctgctgcgcgataatacccgcggcgcaatagatcgcctgcaggcgcgttggcagagcatttatcgcgatctgcttgtccaggagcgggaatctcagccgaatacgccctaccgcaagcgcgtggaactggagaagaagcgccactgcggcgagtacctgctacgggatttggcagcaagaaccttcctgcccggatacggcttcccgacggatgtcgtgaccttcgacaacttcaccatggaagactacattcgcgagaaatcctttaaaaagcagtataaaaacgatcgggaagataacgtatcgcgctataaaggacttccctcccgtaacctgggcgtcgcaatacgtgaatatgccccgggggcagaacttattctggatggtcgggttttccgctctgccggcgtctcgctgcactggcacaatatcaatgctgataccaacgaagcccagcgacttgactgcgcctggcgctgccacaagtgcgggaccatcggctataaagaagggatgaacagcgccgggccgctccgctgcaccaacagcacctgcggggagcagatcaccgccgataaccgccgccaggtactgcagccagccggattcgttaccgatgcccacgcaccggtaaccaacaatatcgaaaccatgaagtttgtgccggtcgtcccggcgtgggtttttgttaaggccgacccggtaccgctgcccaatccgctgatgggctatatggccgccggcgctgacggccacgtgttccagcagagtcttggcgagggcggtcacgggtacgccctctgccttacctgcgggcgcgcggaatctatgctgaaccctaacgacgcgcccaaaagtatggaagcccactacccgccgcggccgggaaaagcggatcgcgatagccagaaccaccgccttatctgcccgggctcaacggcgctgaccaaaaacgttaccctcggcgcgctggcgcgaacggacgtttttgaggtggttttacgccgcccgcagagcggcgagtacctgccagacagcaccgaagaggggcgcacgattgccatgacgctggccgttgcgctccgtcagtccctagccggcgtgctggggatctcctccgcagagctgggatacgccatccggcccgtgaggctggaagatgggcaatcggtatttgccgttcagctctacgatatcatcagcggcggcgcaggctttgcctccagcgcgccgctgcatatcgaagcggccctgcagggcatggtcagacagctcggctgccgccactgcgataccgcgtgcagcgactgcctgctcgactcgcagacccgccacgaccacgactcgctggatcgtaaagcggccctttcctggctgggtgaggacttcgcgcactatatcggtttaccggatgaagaggcattttcgctgccggacgcccgctactgcccgggaaccctgcaggatgccgtccgccgggcgattaacgaaggcgctaaaaagctcaccctgtggatgagtgggccaataaacgagtgggacctctatgcccgccagttccgctccgcgctgctgaactaccggacaaaagacgatgtcgacgtcgaactcgtgctgcctgagcacatagacgatcccgatctcctgcacgagctggcccagttcggggtgctgggcgtgcgcctgtgccattctgaccagcagagcgaaataccgatcgtggcgcaaattacctttgccgaccgcgtgatgaccctggcttcgcgcagcgagctggcgacggtgcccggaccgggctggcatcagaacgatcggctactggtgcgcagcaacgcctgcaaacctgtggcaatgcgcgaggccgctctgcctggagcggcgatcggctttgcgatgctggtgaaagatatccagatccacaagcagctgaacggatcgctgtcgcagttcggccagcgcttctgggaggtgattctgagcgagcacgaggaggcgcgcgcgctgatggaaaataaaaagattgcccgcatccactataccgatcgctatctgcagaacccggtcgcgctggcgctgctggccggactgctgaagccactgaaagcatcgctgaccgccgatgcggcgctgtcgctggacacgctgttcaagactaaagatcgtccgggctatcttccctaccacgactggatgaacccggatgattatgaggatttcgccggacagtggtttaccgccgccatgggccgtgatgtcgctctgacggtattcgattcaccgcgtaagataccgcaccaccgcaagctgatggtgaccttcgatgacgggcaaacactgaagatccgcttcgaccagggcatgggctactggcggatcgacttcccctctaagtggcgtaactttaacttcagcgatgacgttaccttccagctggcgaatatggcccaggcctgccagcaggcgaaggtcctgaacggtgaggaaaactgggaaaccgacgttctggcggaggtgattgcccgctga

SEQ ID NO: 29749 - DNA, 3315 bp, Pluralibacter gergoviae
ttgagtcaatcagaatctatttcggtcttcaagtgcacctcctggcttaacaaattcctgaatcatcgcggattgaagaatcctgatagtcgcccactctatgaataccatgctaccagtgatgaatatcacgagttgaaacggctactgtgcgggcttggaaaagtcgatggactccggtttgataaaggttatgccgcctgttttacactgttttgctcagaatggtatagaagggattatgagcgaaactgcgggtgggcgtgggaacccattaatgaaagtctcggcatagcacttacacactcgcagctcagcaatatcgtcccgaaagggcttgaggaatactggaagcgccctctccgtttttatgattcagagcgacggaattttttaggatcattattcagtgaggggggccttcccttcagagttttgaaagaggcagataaccgttttaagtccgtcttttcgaggatcctcagccagtacgatgcttctcaggcatcgagtatttcagtcctaacgctaactgaagctgtcgtcgaaaaatcccagctgcctgttgtatttaaggatgagacgtcagtcgaactgattagcagcatggccgagcaactcagttcactcgtacagacttacggcctcagcaatcattcggaaccggttaaagagctggacagggttaattctaagtggcgcaacagcttcccaatccccctcgatgacgagaccggcactcacttaataaatggcctgctcagtacagcctctattgaaaccaagccaaaaatccggcaaaaaaaaacgctttcctgccaatccttttggtctgacctgcacccgaatgagattcagacagccatatcactacctgaagagttagtttttacactatcgggtatccccccaaccactcgttttgagctatcaatttatgaggacggggaagaggttgccagcctgggccccgcctacgcgactctgaaggggatgcaggcaacggtgcgattacgtcgcaccagcgccagatttgtcagacagaagcctgcggcaagtctgtctgtagtcgcgcgcgccggcggtatgaccgtgggcagcaaaatgctagagggcggcgaaatagccatcggcgaggtcccattaacgttcactcttcaagacgggttctggttactccagggacagtcatcctgtagcgtgcgcgatagtcatgtgcttgttgttgtccctgaaaatgccagggttacgtctgagaatcagggttcaccgtttaccacaaaggtcatgaattatccggtctgggcattcgagggccacctggatatcatcattgaaggagatgaggcctatcgaatcaggactggcagggaacaaactaaccagcatgatttttattttaagggtaagcggctgagctgggagtgctatccgaatgaaacctaccttggcctgccgcagctcactcagacaacgcatgaagcaaaagcccccggtaataaacgcttcttcagcggaaaaatgctcgacgaatgtaatgcccaggaaacaatgggtgcgcaatttatctctgtgcgtaatgaaaaaaatgaaaccttatttcgcagaaagatcggtattcttccggaagactttcagattgaaataaaagggggggcgcacgcgagcgaaggaacgtttattatttccacgaaacataattgtctgtatattttagacaaagaagcttttaacgtcgaccggttcaaggaaaacggcaagacaatactgaaggtaaaagcccagggggttcctcctcctttcattcaattgcaggtaaaacccaatttatctgcagatgccattaatctggttttaccctttcccgccgtcggctgtctggtcttcaatgcagacggaaagcctctgcccgacaatataacgatcaatgatttattaggctccagagcatttctctgcggtaaaaatggcgagcctaagcgctttaaacttgagctacgcttgcgctcaaggagcggtccaccagtctggcatgaatggacctacacgaccggtgaaagacccgtcgagatcaatctgtacagcctgagagaacatattgagaacttactctctctggaaacaggtatcgaccagacggttgatatgcgcatcagcggcgccggcagtacttccagttggcaaatacgtcgctataaataccgtcttcacttcgacccggatagacagcttctgctggctgatgctatcggcaatcggaacgaatccgcgccttctcccgtcataatgctgctcagtgaacccgaacgaaaagctgcccccctgacatccagaatgagtgagggcgttcctatcggagaatttgagcttagctctgcgattgaaaaaaatggcccctggctggtgataccgaagcccggagaggcagcctcttttcgcccctactttattcacggcgagccccatttacagtcggcagataataatatccggtctctgcaaaaggcaacccagcttttcgacccaagatctgagaccaataccatcaatattgtccttgatcagatggccgatgacccggcccattctggatggcaattcttgcgtaacctgtacgaacagtttggatatctccccctggcgacgttcgaagtatggcgcgctttgcttaatcatcctcaggcgctggtaatgtcgctgttcaaatttgaaatgtctgccgactacctgaacagaatcgagagcgagtttcctgtcttctgggagttcctaccaattaatgaaatcaaaaaagcagccgataaatttaaagaatttctcatgcataaaggggcatcggaagagatgcagacccgggtgctgaatacgagatttcagcagctgggtatcatttttccgacttatgccaatgaggttgagaactggttatgccggggagagcttccgcctacgctcccacctgttttaatgaaaagtattattcaggggtggtatcaagccctcatgcaggaacacagcgaatcacgctggcctgaatatggcggccggcggcttcacgagtggatcctgtcacaagacgatccggtgattgaaataccggcagatactccgcaccgctactcaaccgtctggctaccggttttcgctgccgcggtcgccagcggtaatacgacatttgaaagcgtttttggcaacaaatccggggcagtatttttcctgaggcaggtcagggatttcgactcacgatggtttaattccatcttccagtactgcctgctgcgtaatgtggtcaaaaatcagaaggaacaaaaatga

SEQ ID NO: 29750 - DNA, 6318 bp, Pluralibacter gergoviae
atgacgacgcactatttttcttcacttattgaacaatcgctctcccgcgccactgaggccacgctcagtattgtggggatcaccaatccgcagctgcgcgaacaccttggccatctgatgggcgcggagtgtggcagtgcgggctcattcctcgcctcaccggtatttcagcaaatgtttggctggaaagagtcagaccagacgatgcgtagcctgacgcaaggaaaggcactgctcagtaaagccgtcgtcgactcgctggacaactcaggcaacggccgctaccgatttggcgcggattggaagccctttacccaccaactggcgagctggaaagcgctgcttgagcaaaaacattccgtggtggtcaccagcgggacagggtcaggcaaaacggagtgctttatggttccggtgctggaggacctctaccgggagctgcatgagaacggaaataaacctctcgtcggcgtcagagccctgtttctttatccgcttaacgccctgatcaattcgcagcgtgagcgccttgatgcctggacccgcagtttcggtaccgggatccgctattgcctctacaacgggaataccgagaacctgcacgcatcggtaaaaactgagcaggtaaaaagaccgaatgaagtgctatcccgtgaaaagatgcgtgaagaacccgcgccaattctggtgaccaacggcacgatgctcgaatatatgatggtgcgccagattgatgcgccaatcatccagcaatcgaaagcgcagaaatcgctgcgctggatagtccttgatgaagcgcacacgtatgtcggttcacaggcggccgaactggcgcttcagttgcgtcgcgtaatgacggcctttggcgtgacgcctgaagaggtgcggtttgtagcgacatcggcgaccattgccggaagcgatgctgtgcagcagctgaaaaaattcctgtctgaactttccggtataccgcaggaacgcatcgacgtgctggacggcaaccgggtgatcccctcgctggagaccagcagacagatttatcgcccgcttgaagagattgagaagatccctgatgagagtgataccaaagacgtcagctccgaacgctttcaggccctgacgcactctcctgaagcccgatatctgagggagatgctggttacccagcctaatccgcttaagctcgacgagataacgcagcgtttagacacgctaaccgggcggcatcacagccagcaggaggttttgcgctggattgacctctgttccggcactcagcccaataccaaagccccggcctttttaaaggtcagggcgcatattttccagcgcaacacgcagggcctgtgggcctgcgttgacaaggcgtgtccggaaaaagcaggctcagcgctacaggacaactggccgtttggctacgtgtacgttaaccagcgccacaattgtagctgcggaagcccggtttacgagctggcgttctgcaatgactgcaacgaaccgcacctgctggcgagagacaaaaaagggaagctcgttcagtgggataacaaaggcggggacgagttctctttacaggaggacatgccggaagagcgtgacgaccaggtagaaaaagtcgcaaaagagagcgcgtatcaggcgccgatcgtgattgctgcagagtgcaattctgtagaaggctatatcccacagaagctggacagaaagacgcgcagcattggcgtagtgaataatgacagcattacgctggctatcaatgaaattgagctggtctgcagcggctgcggctataaaggcatcagcggcaggcagccgtttcgccgcgccctgctgggcggaccgttttacgttaccaatattgtccccaccgttctcgaatactgtcaggactttattagtgaagaaggcaaagacagcattggtcctgactcactgccgggaagaggacgacggctgatcaccttcacggatagccggcagggcacggccagaatggcggtgcggatgcagcaggaggccgagcgcagccgattacgcggcagcatcgtcgagatcctgggctggcaccagagaaaacaggcaaacgccatccccaatgccagcgctgacgtggcaaaaatgcgtgagatggccagactggcccgcgaagaggcagaatccttccgttcctggggtatgccggaagacgcaaaaggcgccgaagcccgggctgaacgcatcgagcaggccatccaggccgccaccggcggcagggttaagacgaacctggtttcccgcacctggacggaggtcgtgaatgagctgaaagataaagctgatattaagggccctgtcctgcaatataactattatctgaagcccgaaattttcaacgcaaatggcggcccgctcaagcttgcggaaatgctgctgtttcgcgaggtgatgcgcagacccaagcggaccaatagcctggaaacccagggcctggtgcgcgtcggctatcaggggctcgataaagtacatcaaatgccgccccactggcaggataaaggactgacgctggcagactggcaagacttcctcaaagtcacgctggatttctacgtccgcgaaagtaacttcatccagcttgatgatgagctaagaaactggatcggcagccgcttctcttcaaaatatgtccgcaaccccgagtcaaaagaacccgacgacaaccaaaataagcgctggccgcaaattcgtggcactaacgtgacccatcgcttagtaaagctgcttattctgggcgccggtttcaaaacggcaaatacggtcaccattgatatcgttaacgcgtggcttaaagaagcctggctccagctcagcggctccctgtcggtgctcaggcccgacggtaaccgcttctacttacccaaagagcacctgacgttttccttagttcaggatgcctggatctgtccggtaaccaataaaattctcgacactgccttcaaaggtttgactccctacctgcccacccatattgcttttgagcacctcacccaagaacaatatgagaccttcacggcgcgaagagtcatcctgccgcccatttgggagcttgaccgctctcaggatgactacgcagatggcctcgaaaaagtgcgtaactgggtagagaaagagcctgttatcaataaactgcgcgcagaaaatctctggacggatattaacgaccgcgcggttgaaggtggcttctactaccgcactgccgagcactcggcccagcagtcttcagagcgcctgcaaagctacgaaaacatgtttaagaaggggcagctgaatgtgctcaactgctccacgacgatggaaatgggggttgatatcggcgggatcacggcggtggtgatgaataacgtgccgccgcatccggccaactatctgcagcgcgccgggcgagcaggacggagtaaggagtcccgcgccgtctcctataccttatgcaaaggcaacccgcacgaccagcaggtgtttgccagcccactctggccgtttgagacttcaatccccgcccctatggtggcgatgaactctgcccggctggtgcagcgccacgttaacgcgctgctgctgtccgactttttatgccgcgttataggcgaaacagacaaagaaaaaaccagcctcgacagcatgtggtttttcggtgaggaagaggggcagtcgcgctgcgaaaactttaaagtctggctcgaacgtccggtgctggagatagacccggctctggaaaggctggtgaaaggtactgcgctgcacggtgccagatccgacctgctgcgcgataatacccgcggcgcaatagatcgcctgcaggcgcgttggcagagcatttatcgcgatctgcttgtccaggagcgggaatctcagccgaatacgccctaccgcaagcgcgtggaactggagaagaagcgccactgcggcgagtacctgctacgggatttggcagcaagaaccttcctgcccggatacggcttcccgacggatgtcgtgaccttcgacaacttcaccatggaagactacattcgcgagaaatcctttaaaaagcagtataaaaacgatcgggaagataacgtatcgcgctataaaggacttccctcccgtaacctgggcgtcgcaatacgtgaatatgccccgggggcagaacttattctggatggtcgggttttccgctctgccggcgtctcgctgcactggcacaatatcaatgctgataccaacgaagcccagcgacttgactgcgcctggcgctgccacaagtgcgggaccatcggctataaagaagggatgaacagcgccgggccgctccgctgcaccaacagcacctgcggggagcagatcaccgccgataaccgccgccaggtactgcagccagccggattcgttaccgatgcccacgcaccggtaaccaacaatatcgaaaccatgaagtttgtgccggtcgtcccggcgtgggtttttgttaaggccgacccggtaccgctgcccaatccgctgatgggctatatggccgccggcgctgacggccacgtgttccagcagagtcttggcgagggcggtcacgggtacgccctctgccttacctgcgggcgcgcggaatctatgctgaaccctaacgacgcgcccaaaagtatggaagcccactacccgccgcggccgggaaaagcggatcgcgatagccagaaccaccgccttatctgcccgggctcaacggcgctgaccaaaaacgttaccctcggcgcgctggcgcgaacggacgtttttgaggtggttttacgccgcccgcagagcggcgagtacctgccagacagcaccgaagaggggcgcacgattgccatgacgctggccgttgcgctccgtcagtccctggccggcgtgctggggatctcctccgcagagctgggatacgccatccggcccgtgaggctggaagatgggcaatcggtatttgccgttcagctctacgatatcatcagcggcggcgcaggctttgcctccagcgcgccgctgcatatcgaagcggccctgcagggcatggtcagacagctcggctgccgccactgcgataccgcgtgcagcgactgcctgctcgactcgcagacccgccacgaccacgactcgctggatcgtaaagcggccctttcctggctgggtgaggacttcgcgcactatatcggtttaccggatgaagaggcattttcgctgccggacgcccgctactgcccgggaaccctgcaggatgccgtccgccgggcgattaacgaaggcgctaaaaagctcaccctgtggatgagtgggccaataaacgagtgggacctctatgcccgccagttccgctccgcgctgctgaactaccggacaaaagacgatgtcgacgtcgaactcgtgctgcctgagcacatagacgatcccgatctcctgcacgagctggcccagttcggggtgctgggcgtgcgcctgtgccattctgaccagcagagcgaaataccgatcgtggcgcaaattacctttgccgaccgcgtgatgaccctggcttcgcgcagcgagctggcgacggtgcccggaccgggctggcatcagaacgatcggctactggtgcgcagcaacgcctgcaaacctgtggcaatgcgcgaggctgctctgccgggagctgcgatcggctttgcgatgctggtgaaagatatccagatccacaagcagctgaacggatcgctgtcgcagttcggccagcgcttctgggaggtgattctgagcgagcacgaggaggcgcgcgcgctgatggaaaataaaaagattgcccgcatccactataccgatcgatatctgcagaacccggtcgcgctggcgctgctggccggactgctgaagccactgaaagcatcgctgaccgccgatgcggcgctgtcgctggacacgctgttcaagactaaagatcgtccgggctatcttccctaccacgactggatgaacccggatgattatgaggatttcgccggacagtggtttaccgccgccatgggccgtgatgtcgctctgacggtattcgattcaccgcgtaagataccgcaccaccgcaagctgatggtgaccttcgatgacgggcaaacactgaagatccgcttcgaccagggcatgggctactggcggatcgacttcccctctaagtggcgtaactttaacttcagcgatgacgttaccttccagctggcgaatatggcccaggcctgccagcaggcgaaggtcctgaacggtgaggaaaactgggaaaccgacgttctggcggaggtgattgcccgctga

SEQ ID NO: 29751 - DNA, 3315 bp, Pluralibacter gergoviae
ttgagtcaatcagaatctatttcggtcttcaagtgcacctcctggcttaacaaattcctgaatcatcgcggattgaagaatcctgatagtcgcccactctatgaataccatgctaccagtgatgaatatcacgagttgaaacggctgctgtgcgggcttggaaaagtcgatggactccggtttgataaaggttatgccgcctgttttacactgttttgctcagaatggtatagaagggattatgagcgaaactgcgggtgggcgtgggaacccattaatgaaagtctcggcatagcacttacacactcgcagctcagcaatatcgtcccgaaagggcttgaggaatactggaagcgccctctccgtttttatgattcagagcgacggaattttttaggatcattattcagtgaggggggccttcccttcagagttttgaaagaggcagataaccgttttaagtccgtcttttcgaggatcctcagccagtacgatgcttctcaggcatcgagtatttcagtcctaacgctaactgaagctgtcgtcgaaaaatcccagctgcctgttgtatttaaggatgagacgtcagtcgaactgattagcagcatggccgagcaactcagttcactcgtacagacttacggcctcagcaatcattcggaaccggttaaagagctggacagggttaattctaagtggcgcaacagcttcccaatccccctcgatgacgagaccggcactcacttaataaatggcctgctcagtacagcctctattgaaaccaagccaaaaatccggcaaaaaaaaacgctttcctgccaatccttttggtctgacctgcacccgaatgagattcagacagccatatcactacctgaagagttagtttttacactatcgggtatccccccaaccactcgttttgagctatcaatttatgaggacggggaagaggttgccagcctgggccccgcctacgcgactctgaaggggatgcaggcaacggtgcgattacgtcgcaccagcgccagatttgtcagacagaagcctgcggcaagtctgtctgtagtcgcgcgcgccggcggtatgaccgtgggcagcaaaatgctagagggcggcgaaatagccatcggcgaggtcccattaacgttcactcttcaagacgggttctggttactccagggacagtcatcctgtagcgtgcgcgatagtcatgtgcttgttgttgtccctgaaaatgccagggttacgtctgagaatcagggttcaccgtttaccacaaaggtcatgaattatccggtctgggcattcgagggccacctggatatcatcattgaaggagatgaggcctatcgaatcaggactggcagggaacaaactaaccagcatgatttttattttaagggtaagcggctgagctgggagtgctatccgaatgaaacctaccttggcctgccgcagctcactcagacaacgcatgaaccaaaagcccccggtaataaacgcttcttcagcggaaaaatgctcgacgaatgtaatgcccaggaaacaatgggtgcgcaatttatctctgtgcgtaatgaaaaaaatgaaaccttatttcgcagaaagatcggtattcttccggaagactttcagattgaaataaaagggggggcgcacgcgagcgaaggaacgtttattatttccacgaaacataattgtctgtatattttagacaaagaagcttttaacgtcgaccggttcaaggaaaacggcaagacaatactgaaggtaaaagcccagggggttcctcctcctttcattcaattgcaggtaaaacccaatttatctgcagatgccattaatctggttttaccctttcccgccgtcggctgtctggtcttcaatgcagacggaaagcctctgcccgacaatataacgatcaatgatttattaggctccagagcatttctctgcggtaaaaatggcgagcctaagcgctttaaacttgagctacgcttgcgctcaaggagcggtccaccagtctggcatgaatggacctacacgaccggtgaaagacccgtcgagatcaatctgtacagcctgagagaacatattgagaacttactctctctggaaacaggtatcgaccagacggttgatatgcgcatcagcggcgccggcagtacttccagttggcaaatacgtcgctataaataccgtcttcacttcgacccggatagacagcttctgctggctgatgctatcggcaatcggaacgaatccgcgccttctcccgtcataatgctgctcagtgaacccgaacgaaaagctgcccccctgacatccagaatgagtgagggcgttcctatcggagaatttgagcttagctctgcgattgaaaaaaatggcccctggctggtgataccgaagcccggagaggcagcctcttttcgcccctactttattcacggcgagccccatttacagtcggcagataataatatccggtctctgcaaaaggcaacccagcttttcgacccaagatctgagaccaataccatcaatattgtccttgatcagatggccgatgacccggcccattctggatggcaattcttgcgtaacctgtacgaacagtttggatatctccccctggcgacgttcgaagtatggcgcgctttgcttaatcatcctcaggcgctggtaatgtcgctgttcaaatttgaaatgtctgccgactacctgaacagaatcgagagcgagtttcctgtcttctgggagttcctaccaattaatgaaatcaaaaaagcagccgataaatttaaagaatttctcatgcataaaggggcatcggaagagatgcagacccgggtgctgaatacgagatttcagcagctgggtatcatttttccgacttatgccaatgaggttgagaactggttatgccggggagagcttccgcccacgctcccacctgttttaatgaaaagtattattcaggggtggtatcaagccctcatgcaggaacacagcgaatcacgctggcctgaatatggcggccggcggcttcacgagtggatcctgtcacaagacgatccggtgattgaaataccggcagatactccgcaccgctactcaaccgtctggctaccggttttcgctgccgcggtcgccagcggtaatacgacatttgaaagcgtttttggcaacaaatccggggcagtatttttcctgaggcaggtcagggatttcgactcacgatggtttaattccatcttccagtactgcctgctgcgtaatgtggtcaaaaatcagaaggaacaaaaatga

SEQ ID NO: 29752 - DNA, 6318 bp, Pluralibacter gergoviae; identical to SEQ ID NO: 29750

SEQ ID NO: 29753 - DNA, 3315 bp, Pluralibacter gergoviae; identical to SEQ ID NO: 29751

SEQ ID NO: 29754 - DNA, 6075 bp, Prevotella bivia
atggagtattctaagttttatagggatgctaaccgcatcatggttaatactttactgtccatttggttcaaagggaaaggcaaggagcaaatttatttgcgtgaaatcttgacaaaacgtgagtctttgatgtcggagcccatcttccaaacggtatttccatgggagcagtcaactgaaagtttttctgaccatgcgtcaaagttgaagatattagacgaaaaattcgtaaaagcaatttctgacgaatgtctgaccggtgaggaacagaactttcctgcagagcgtcgcccttatctccatcaaacgaagggctgggattgtatgcttaacaaacacaagactattgtggttacaactggcactggctcaggaaagacagagtgctttatgattccagttcttcaagacttatatcggcagcggattaagaatccacttgatagtggggttcaggcaatctttatatacccgttaaatgctttgatgaaaagccagcaaaaacgtattaatgcgtggtgtaaagcccttgatccaaacatcacctatgccatttacaatggtgatacaaataatcttgagaagaaagaaccaaatatcaaagaaaacgagcgtataaagaaagctctaccggaattggtgtaccgccagcaaatcagaagtacacctccacaaatcatgtttacgaatccaacaatgttgaattatatgttagttcgccaagaggaccagccaataattcaaaaatctcgtggtaaactccgttggattttacttgacgaagcccattcatattcaggctctgccgcttcagaattagctcttcaaattcggcgaataatagatgcgttcggcgaaactgttgatgatgtgaatttcgccgtaacatctgcaacaattggtgatacatctgatccagcaattaagttgaagttgaaaacctttgttcatagacttactggaaagcctattgatacaatagaggtaattgatggtaaaagaattattcctgaattaaataaagaacaggctgatagagacatagaagatgttaataatatgattggggatagtagtctcaatttgaaaactgtagaacatttgcgtcggaaaataaacgaatcaaatgggctcacaacgtctcagttgacatattttatgcctccatcagcaaccatagatgaacgcttgaaggttatagataaacttagcgaggctatgattcctactcgtgctcacttctttatacggtcaattaatggtgtttacgtttgtactaatccagactgcaaccgtgacaaggccatacgcccttcattgggcagtatgacaacttaccaaagtaatgtttgtcctgataaagattgtaggcaacctatgcttgaggtagctacttgtccacaatgtgggcaagtacttgttgttggcgaagaaaatgttgtgacaggaaaagatgactatgggaaaatccgtatgaagactatcgacaaatctttggagcaaaatattttcggtcaagatatagaagatgataatctggacgattatggaacagataccataagtactacaccagatgtgtacgaaggttttgtcttagcaaaagtcgatgataatatctatgtggatccagaacatgtacaattcactaccttaaaaaatggaaggctaaaggttgatgacaaacaaacagaagattccttttcttttgttagggagtcaggtggataccgttgcccacattgtgggaaaggggtttccaacggagtatctttacgggcgagctcgtcttttctgagtcgaattctggcttctacacttctaaacgcaacagacccagcgaaagataatcatgatacagaagtaacctacggtgggcgcaaatacttgtcattcatggataatcgtcaaggatctgctaaggttgctatgtctattaatcaggatgttgagcgtaactggataagaacagctatttatcatactctccttaatatgtctgcacccaaacaacctacagatgatgttcgagacatgattaaggatatagagcataagttatctgtaggagagaaagtaccaggatatttgatgaacatgtacaaggatgccgtagcatcgtcggtggtgaaatataagtcgttcggatggggcgaggtcaagcgaagcccgacacttcaagattctcagcttagattattattctcacacctgatgaacctaagcaaaaggaatttcaataataaggggaattacatcgatgctatgttcttagaccaatttggctggattccaaaatatggaaactccttggaaaatatgggactggtaaggctagtttaccctactatctcaaatgctcatgtcccaccatgcgtaggcgataagtttacggataaagactggcaagacttcttggtcatttgtgttgattattttattagagcgggcaggcactatttcatacccgcagaacttagccattatctcactcagcagattagagcaaacgcagtttacccttcggattgtactttgacatataaaagtaaacagggtaatgttgttgatgtcaaaaaatggataccaggagtaaaactagtcggtgaaaaaggaaaaaagcagcatcgaataatactcctactctgtgctgcattaggttattctggtgaattaaatcaagagcaagagaatacgatcaatcaacttttgaaagaggcttggaaattcttgacagaatatgtgctggaaaaggttgatagtgaaaatgatggatatgtcatcaatctcatggacgagaataaggttcggcttcaacttataaagcaagcatgggtatgccctatagataatgttcctgttacaacaattttgaaaggatatagtcctcgtataacaggtatattggcaaactctacttttgcgcattataaagtaaaagatgatgcccagatcacaatgccttattttccttttgcttgtcacagaaaaacagaaggagataggactactgacgtttctgacgaggaaataattgcttgggttaataacaatttaaataatattgaagaaaaagggttgctttccaatctacatgagtccatcttcttatatcgaccgatatttatggcagctgaacattctgcacaaatagaccattcaacattaagtaaatatgagcaggcattcaatgctgggcatattaatatactttcgtgttcgactacgatggaaatgggtgttgacatagggggtattggtgaagtcgtgatgaacaatgttccgcccaagccatcaaattatcaacaaagagctggccgcgcaggaagaagaaatgagacaaagtcaatggcagtaacattctgtgctcctacccctataggtacatcaacatggaatgctcccatgtcgatgttatcccatgataatgaactgccaacattaaagtttgaaagtcagcaacttgtacagcggcatgtaaactcattgttgcttacagattttgtgcaacagaatattaggactagtgttaatgttaccacgaaattaagagaattctttgataacacccctagtagatatgatgctttttcagattatctgtatcgtatagctaatggtatggataataagatgaatgattcatatatagcattaactcgtggtacggtttttgaaaataaaactgagttaaaagatgctgccgtaaatgcgcttttcaaacttcaatacataaagaaaatttatgaaaatagattaagtgcctatgaaatgcagttaaaagatgcgagcggacgtcaacaaaaggctatagaaaatgcattaggcaattataaggatagctttctgcttggttatctagcagaaaatggctttattccaagtgcaggaatgccaacaggattagttccttttacgaaggatgtttattcaatgcacaatgattggtacaaagacagtgggagccatagagatattactcagcatctcagccaagctatttcaatgtattccccaggacgacaagttgttataaatgaattagcatatcggtctgaaggaatatatcttaaaacggattataataaggctgggagatttgcattacaaagatgtagccattgtggttttgccacaatagcccctacatctgttggagatgaatgtcccgtatgccatcaccatgaaatgcatggattaaaagatgtatatggcaagttatctccatttacagaggtaatagagcctgcgggatttacggttgcatttacatcggcacccaaaagaaaaatagaagatgcaggagcagccattacccagcctttgctattagaaatgcagccatggagaaatgaaggaactaataatgccaaggtactgatgagaaaagggtcagagaagtccaaaattctattctacaattatggggcaggaacgggcttcgcactttgtagccactgtggtaggatggtaacagaagaccctacaaatgaccatcctttatcaaaccatattagccttttagataatacaagatgtgttggaaatgagcgtgacaatataagacgtcatgtcctattaacagcagaatatccaactgatatagtagagatgaagttttatgatgatgaaaagcaagagattaaagacatctccactttgtattcactgggtacggttataacacaagaactatcaaaataccttggtgttcgtgatgatgaaatatctttcggatataatcaggactacaactccatttttatctttgacactgcacttggcggttcaggctattcagtgcatctgcctgaatataagaatatcatatttgagaatgcattaacagcactagaatcatgcaattgtgaaagagcatgtctgaaatgccttataaataggcgtactcaatggtattctaactatttagatcgccataaggctattgaatggttgaagatggaaagaaagagccgcactgcgccaaaagaaataaaggctatttttgatgatgcagtaacaatgactggcgacttcgtttctgaaatcagccgtcttgattctgatgacaatatcgagtctgtaacagtttttgttgatcctaacgttgatgaatgggaagatgacgaatttcccctatcagcttcactgtttaacaggcatttcaccacaaatttggtttctaataagacgatgttagatgctctaagagtaagccctaacaagatagccttgttgggaacaatctataaaaggggcattaagacaaccgacatgatagcacaaccatataagccattgatgatagtaaaactcatggatggctctttacggttatatttcacgttagaaggctcaattgcttataatgaacattggggagaatgcgaaaatatatattatacctcacatgacattattttcaatacgttcgacatcgaacttgatacaattctctcacaaggggatgatattacaagtcttattcggctgaaagatgacgcatgtcaaattagtgatttacttagtctattgactaaacaatatgaggaaaaatggtctgcaataaaatcctttattgaagggaaaaatgtggacgtttcctataatgagaaatatttaaacacgccattaggctgcatgattctagcaaatatggttaaggctatccctaatgtgcttagagtaaggcttggctctgttaaatgttatttcccaaagcggctcaataattccaataactggggaaacaaacttatggataacttctatgatgctgcagaaagaaatgattatcttactgcatgtattgaccaattagttaataaaaatgtccagattactatgttagaaaaacagccacattttcgttggatagatctgaaaggtccagattttacactttcaatttatcccgatggcggtattgctaatggttggaagttacgctataatgacagtcaaaagaaatatgacgacgtaaattatcatgagaacttaatgcttttcaatgtgaacacacatgtgggcatccaatatattattgacttccacaagtctaatgatattggttaa

SEQ ID NO: 29755 - DNA, 3135 bp, Prevotella bivia
atggaatatacgactcttgctcaaattatggtaaggaatggagggaagattaaatttcctctatggaaacttcatgtacaagaacaagaatatcttgacttgaaagacacactaagtgccgcatatattagaggtaatcttgaaatgtataccagggaagctgctattttttacgcagaatggtggcgtcgagaatataacggagggactccaagtaaagagagagttgcccgtgctgctggtatagacgatcctgaattactatttaagcaggcaaagcaagcaatgcatggatggaagtgcaaggtgtatggtgttaatcgtcacatgtacttctattcattgttgctgcaaggcggtttacctatgaagcaaatacaaagctcatggggaaactacacgaacttcttagagcgtgccatgatggaattgataactcggggtgtttccaattgggaagacacgtctatttttgagaccttggattgtgttaaatacttaccgaagtcattccaaaatgagtgtatctataatgtaagtatgcaggtagtaaggtctattgtcgaagacaaatctgatattctcccgtatgatataaaagaagagcgatttaagaaactgaataccagtttacaaaagatatattctcatcgtaggaaagcaaatccaatggctttttcttggtccttgaaaatatctaatgaaaaagcccatctcctctacagcttgaatgcacaaaatagcttacgttccgatgtgttgtccatagcaccttcggtctataggtttgaaatacatgtttccggaaaatttgtggcacggtatgcaagagttgagcataatgaagattattcgctatacacctgcgtaagcaaagatagtgttgtcattgaatggttgggagagcagcttgttcccgtaaaattattactggataatggagaagaaaggctaattacggttagtaattgttatgcaccagacttttcaaccccacagacattcataaagaatggtgatgattatgtacagcatggtacatccgatacagataacattatcatttttgatgacaactggagtataattgatggccaaacaaaaaggcgtatcactttgttagataaagaatacttctatgtcgtcttcaatgatacgatacgtttgcagaatatgcaaggagaaatcatgacctatgataatgtattttctacctatcatgcagaatatcgttacaatatagcatcttggtgtctgaatagcacagagaatttcctcacatcagttcctttaatcaacgtttttaatgaaaatggcgagaattgtactcataatgtcgaaaaatgttataggacaagaggcactggatgtggatggcaacccctgaaagaacttgaagggagcattcctcaaagtatacaaattcgagtaaaatatcctgacggaaaggaagatatccgttctttcttctatttgggtgatgtaaagtatattacatcagatgctactctttacgatgccgatattaaatgggaaaatagcaacaatatcagaatctcttgtttagatttggaaggagttgatgtaacatctaatgggaacaattcttttcacctacatcgaacagaagacaataatgttttcccttctgtttgtactttcgtcatctttgcccctgcttgttctccaacaaaattggtaatttcttcaccttttaaaggattggcagtcctcgatagtgagggaaaagaagttgctaatggtgcaatgctttgtacccaaaacttatataattataaagtttttgcacaaggtattggggatataactatcaaactaagctacattagcgatgatatagaagatacaaaatcattagaaattcatcgtccttcaaatggaatcatgtctttgagcgacataaacgatctacttgacagattgtttatgctatatgaaagacgtgcctttaatcgaagttcgtttgtaatggtaactataaaaggctcttatggaagttataagaaatcatttagaattcgtcattattcattggatacgaaaatgttatgcccagactcatgtgtggtaatggatatagatgataatcctgacgatgaaatatttacacgtccacagaattattctgggcgactgttggcttgtattgtcgggcaacgatcaaacgcttgggaagtattacctttgcgtgaaacaacagattctacgaagtttgaatttcccgaccctgacatagccaatcaattcatagtgttctctgacaagaatgacagagatagagtaattccccgatattacaacttagaaattccagatcttaccgtggcacaacgaattgccaccagaagagcccgactaaaagaatatgagaatatattggagtccgcttctttatccagtgaaaaatgggacgaagtgtttcaatgctacaaagtcgtcactgaaaacaatctcgtcttttcaacatttgattgcttcattagtattgctaaaagtcctaaactcattgccaaatttgttcttggcctttgctataatgggtatagcgacaacagtatctctgattttaaccgatacgcaggcgaacttgcgttcgctttgcattggatccggcctgagatatggaaaggtgttcttcaatttatcaacacacttggtgaattggagcaaaaatatctgaggaatgatgtttttaagtttatgacagatgtttttaagacagaattgtatcaagggcaagcaaatgagttttcattattccttatgtcgaataaaataaaagcacgaggaacattttacctttcagatttgcgtgagtataaggcaagtattcatggggtatctgatacaggtcaggatctgccaacaacaaaaattgttttgagcaaatatatttttccggaattctctaaagatacgctgccatggcaaaaggttgctatgttatgtcctgtaaagatagcagaacttctgacagagaacattgatgatgtcaatttctggggagatgagaatgaagagttaagacgggttattaatttttatcgtatttatgctacaaagacgtattcacggattctaattaaggcactctcaatatatataaatttataa

SEQ ID NO: 29756 - DNA, 6084 bp, Prevotella sp. C561
atgaagtttgagaatttctataaagaatcagaggaaaacatgcgtttagcattgctttctctttggacaccaggaaaccatcctatgcgtgctgccgttaacgagctctttgacagagaacccttattgtcagaacctgtattccaaagtactttcggatgggaacctgcaccagatgacagttggaaaaatgctttgaatccgacaatcatcagcaaacttggtattggagtcaagtatcctccatataaacatcaggcagagagttggaaaagtttggctgaaggaaagagtattgtcgtaacatcaggtactggttcaggtaaaaccgagtgctttatgtaccctattctgagtgacctttatgagcaaggacacactaatgccatagaagctatctttctctaccctctcaatgccttgatggaagatcaaaagaaacgtctatctgagtattgtaaggctaccggcttacattttgcattatataatggatacactccagaacatcgtgctgatggtagagatgaaattcttccaaatgagattgtaacccgtgatgatatacgtgacccaaataaccaaggaacacgccctgaaattcttctgacaaacccaagtatgctggagtatatacttgttcgtcaaaaagatcagcaaatgttacaagaatcagctaacagacttcgctggatagttatagatgaagcacatagttattccggttctgcggctgtagaactcgcatatcagattaaaagagtacttgaggctttcggtagaactccagaacaggtacgatttgcatgtacatctgctacgattggtggtgacgagggttctcagtcgctttcagacttcatctcaacggttacaggccagtccgttgaacggattaaggttatcggtggtcagcgtttggttcgtcctttggataaggaccaacttgccgttgaacttaaagcaaataatctcccttctgttgataatgtattgtctctccgtgacaaaataaataaagtttctggcatgacacttcagcagatgtgggaacatctatgcccggacacaacctttgacagggctgatctgataccagcattgcagcttctggatagactttgcgaaatgtcccaaggaaaaactcctgtcctgtcacttagagcacattattttatgcgttccataaacggactttatgcttgtgcaaatgaaaactgcgatagtgctaatcctgcttcaccgatttatggacacctaaccacatacaaggcatcagtatgtccaaagtgtggtgtaccattacttgaaattgtacaatgtaagcgatgtggtagttttgtgttaatgggctgtagtgactcacagactcataagatttccccttgtgaagacaccgctaacagagatgattatttctctattgatcttacctctgaacaagaggaagaggatgaaatggccagttcaggcagtcctgacatattctttcttatgccatacgaaaaggaaaagttctttactcctgttgccaaagctcattctgtaaccatgaacattgtgcataatagtactggagcaatattggatgttcatgctgacagcaaaggcacatgggtcgaagtcagaaaagatgacggacattcttattgccctggatgcgggaaattagctcatgggaaacgacttaatttaaaacacttccgtattcctatcaactttatcaaccagacaatttcacctgttttccttcgagaatgtgctcatgaagggaacagttggggaaagtatatcgcttttacagatagccgccaaggaaccgctatctctgctaaaacgttcaatattaatgttgagcgtaatcaaagtaataagaatatgctggagagactttctcaaatacaaacaacaagtccattagatactattccagaacctgtaaggaatactttgacagcagaacagatagccatgatattggctaatgccccatcttctccagacggagtgtctttatatgatgtttcagaagcaatatataaccaagcgatgtttgaccatatatcaaataatgatggtgcaaagaataagaatgcatataagtgcgcactgataagaggcgttataggcagacgtccagcgtatgaaaccaatgcagaaaccatgggctttatctatctggactatcttgatttgaagactgcaaaagttccttctgtattggcagattatgcagaccaaaacgggataactatcaaagaccaggattggcaggattatttgaaactcgccatagattatgtaatgaggctgggcaaccacattcagcctttggcagatgatgagaagaaatatgtccgtgaaagcaatttaagcactccaattgcagcctctgatgaccaaagagaaaaaatcaaacgttggccctctgtaaagattgtcgagggaggaaaggtttttgaacatcaatcacgacttgttgtacttctctgtgcagggttaggtatacatacggttgagaaattacaggctaatgtaagaatcgttgatgcaattatcaccgaagcatggaatactttaattgaaaagaaagtctttaccaaggttaaagctgacgatacagacgggtataataatccacgcttctatccggataacaaatatgtagattgctatttccttgacttatcgggtaaagaaggaaataatgtctgcaaagttaagagattgcaagatgcatgggtatgtcctgtctcacatcagcttttagataccacattttgcggatacagcccattgatcacaggaagaatctgtgaaaggttgtttgttaaatacaaatgtaacgaaagtaagataaccatgccttcacgacctaaagacaatgaagaggtcgtaaactggcaggaaaatgatgaaaacatcaaggctctgaaggctgctggcctttggactgaccgccataagtatgcttatcacaaaactcctatttatattgctgcagaacactctgcacagcaatcaaaacaattactccgtgattacaccagatcatttagtcaaaagacccctttgattaatgttcttcactgttccactactatggaaatgggcgtggacattggtgacattgacgttgtattgatggataccgtacctcctactgcagccaactatctacagcgtgtaggccgtgctggccgtatgggccaaagcaaggctattgcattctcgttatgcaataatacaccagttggacagcacgcattcgcaaatccgatgtgggcattgcagactacaaaccatatgattaaggttcgtccgagtcagactgtcatacaacgacatatcaattcgttcttcttcagacagtttatatgtgacaacggatccggaattcaggtaactgtttcaattgacgagtttatgacttccacctgtaacacatttatccaattcttggatgatatgagcacaaatcaagcagaagagtgtaaattcaaaaaagtttttggaaaaaacatcgcatataccataaatgtcacaaaggaaacaatacaagcaattcagaaagaatacaatactgtaattggtgaacttaatgcagcctttgttcagttccaaaatgatacaagacgacagatagctattagcaatcagataagaaaaaccaagtcggaaggtttgctaaactacctgtctgaccaccagtttataccaaatgcaaatatgccaacaggtgtagtaacatttgatttcactgatagagaccagtctgtaaaactacatcgcctgtacgataatgttgataaattacaaaacagaatagctgcagagtccgatagtatagagaaatttaacctacagaacgaactgaataaggttcgtaaagagattaccaatcttcgtcgtgcaacaacggcttcgcgtgatattcatacagctctcgatgaatatgcaccagagcagactgttgttgtaaacgaaaaaaactatgtttctgctggaatcaaactacttggtgcctataatgaagaaacacaaaccaaagcaatctatcattgcatacattgcggtaagactgaatataaaaggattctacaaaaaggtgcattatgttcctgcggtaatccatatcatagcattattgataaagatcatggctcattcactcttgcttatgaacctataggtttctgtactgatcagaatgtagatagttcacgtgaagaaaagaccgtaaaacattactatgacattagacctgtcttgttgaaaacagattggagtaaacataaggacataaatatgtgcgagcttatcaccagtggtgaaactggtaacattttattctataatgttggtaatggacatggatttgctttctgtaagcgctgtggacgagcatctgttgagtataccgccataacttcaaaagaaagtgtaccttatgcggtcaagcctggacataagagactttggggtgatggctgtgaagccaacgataatgatattgcacgtcacgttgtattaacaggtaatcatcctacttgctatacagtgctacgtttcaagaaggatgcagtatcttcaaaatttgaaaacgatgagcaacttgtatactctcttggtgttgtccttaaacgtgcattagctttaagcgaaggaatagatgagggcgaagttgactttggcatcaaacaagaacttgacgcctgggttctcttcatctttgatacagcaaaaggaggatgcggttattcactgaaattgatgaatcctgttctttgccaggaaatttttgaccttgcaagacaagcacttgaagaaacaacatgtaactgtcatatagaaggtggcgcttgtgcaagatgtttgattgaccgtaacaattatcgttattcataccttttatcaaaggcaaaggctcttgattggctgaaccatcaaaagaacaaagccattgaagtacctgctcatgtaaaggcttcaagcccttcagcaagagtagtttgtcaacccttgaaggatatagtaaaactgtcggtcacggatcctgaagtcaagaagataaccctgtgcatttctgacctgacagatgataatgttgttacggattggtcaagtgtccgttcagagatgggaaaacacatcaaaacaggagtatcaaatggtaaaaacatttcccttgtagttgagtatcatcctgaacttcataattcacttacagagaaacttccattcatcaatttgaaggataaatttcctgattgtgaagtctcgattgtcaaggatctaggtgaaatgaagactgctgttattgttgagcgtaacaccggggtactcaggtacttcacagacaaagactctgtcttgtcgttttctaataactggggaaagaattgtcattatgtctttgtggataataatcgcgtaacattcaatgaacagaaagaaccaacctatgtaatgtctccatcacaagttgtacgtgaaggtcttacacacgcaagaacattccagattaagaattatttctctactgcaattgcacctttcctgctgaatcagcaggacacagatatgctcgttgaagtcttgaaaggtaaacatgttaatattacatttagtgatatgtatgtaaacagtgccttggcaagtttgatgcttgtttacctcatcaaagagatgaagcaactctttggttatacgatcgatagtataaccttacaattagactctccaaagagaaaatgttataacgacaggtacaacgaatggactcctattaatatgaatttctcctgtaaagaggatgctgacgaatatacggataatttgtttatgaatgtattgggtatagagccagaacattcatttaatgacgcaaaccaccatcgttggctgaaaatagaaacaaaagacggaggtcttgttgaaatcaggcctgaccacggaattagtggtggttataaatctgacagcaagtatttgaaccttgactctctcaatggttctgtaaatgtcgtaagaaataacgaggatgtactctattatgtaattattaaaaaaagtgacgcctaa

SEQ ID NO: 29757 - DNA, 879 bp, Prevotella sp. C561
atgggttattttgaaactatcctaacggctcacaacctcgaaaaatgtccagaatatttgtggcaaatccgagttactgctgaagagtatgccaacctgaaacaactcttagcacgccaaatccatatttacaatagaaattgtagtaatcgtttcattaccgttcgtaaggaatgtgtcctgtatattgcagaattttggcgtagggaatatcatgaaggtcctcatagtgtccaaatgatacttgactctttgggtatttatgttactttagaactacgtgatgaattctatgagtctgctcaacgtggtcttaaagcgttagacttagaactctttgagggaaatgggggcagaagataccttgactccatgttatatcaaggtggtttgccaatgaagctggtaacaggaagtgaaaatggtggcgtatgggaccgatttacccgtggactggtaaacagaaaagtagattttgaagaacttaatttgggaatagttgcttctcaaagtaagtgcttgaaggattattgtaaccagctgattattggagttgagtcagcgcaattcatgcttatgccattctattgtcagaatgagcaagatgtttggtatatatatttgcaggaacttgccaaacaagaaaagatccgtcaccgtcaaatccacccctactctcttggttgggaattcagaattgatactgtagaaaagaaaatatattcaaagtacgtagttgaaggctaccaaaatcttcctgaggcttttcttattgagaacagattggcccatgtacctttttttctgttcaagtcagaaagaacgggcaagcagttgacacattcgattatgttaaaaacttctgtcgctatccggtag

SEQ ID NO: 29758 - DNA, 6285 bp, Proteus mirabilis
atgacccgttatttttcttctctcgttgagcaagctattagtcgtactaaagaatcgacattgagtatcttgggcgtaactaatcctaatcttcgcaatcaccttagcgaaatcatgtcttctgattgtggccaagagagtgcatttttggcaccaccggtattcgagcataccttcggctgggagtttgcagacccgaagatgagcgatctggcggggaatcttctgtctgaagcggttgttgctgccctggatagcaaaaagaacgggcgctatcgatttggtgcagattttcaacctttccgccatcagctccgcagttgggagcatctcttaaacgagcataaatcgctagtcgtgacatcaggcacgggttcaggcaaaacagagtgtttcatggtgccgatcattaatgatttacaccgcgaatacgaagataaaggagagcccttggtcggtgtgagggcgttatttctgtaccccctcaatgcactaattaactcccaaaaagagcgtttggatgcatggaccaaacattttgatgatggcattcggtattgcctttacaacggcaataccgagaactctaagaacaagatgcgtggaaagcaaaaagatcgtccgaatgaagtgctttcacgtgaattaatgcgggaagcaccagcgccaattttggtgacgaacggcaccatgcttgaatatatgatggttcgccaaattgacgctccgatcattcaacgctcgcgcgaagaaaagtctttgcgctggattgtactggatgaagcgcacacttatgttggctcccaagctgcagaactggcgttgcagttacgtcgtgtacttcaagcttttgatgtagaagcaaaggatgtacgttttgttgctacatcagcgaccattgccgacgaggatgcggaaaaacagctaaagaactacctagctcatttggcgggtgtggaaccgaaccagattgaagttgttggcggtaagcggagcgtccctgaccttcctgagtgcccgagcaacaactattcaattgaagaactgctttctattgagcctgatggtgaaccgactacaggcaaaaccaagcaaatgcccgatgtgtcaaagcgtcgatttgaagctctctgtggaaacacaacggcacttgctcttcgaaacacattagtggaagcgaaaaaaccgctggatctgaatgacatcaactcccagttgtccattcgtctgaatcgtgctctctttacgcaacaacaactccttgagtggcttgatatcgcatcgggtacaaaagcaactggcagcggcgaagcatttttaaagttacgcgcgcatttcttccagcggatgacccaggggctttgggcttgtattgatgctagttgtgggtgtaagaaaaacacaccgcttgaagataactggccatttggttttgtttacgcaacacaacgtcaacagtgtgattgcggcgccccagtacttgagctgaccttctgccaagactgtaatgaaccccacttgctgggcaaagtctcccgtaaaaatcaacttcgccaatggaacgccagtgcgggagatgagttttcacttctcaatgaaacctccagtgacgatgatgactatgagaaccaagactgtgaaacaacaaacagcccatatgtgttttcacgaccatttgcagataaaaatggttacagtgacgtgcatgtagggaagtctggtgtttatggtgcactggaaggtgaacgcattggtttgtcgcaatactttaggggcgaggagaacggtgttcgaatgggggagcatcgctgtgtcgaatgtggttttgagggctatcgtggcgcaatgccttttcgcagagcaatgctaggctcgccattttatgtggctaacgccgtgcctactttgctggaatattgcccggatatcgacgtagataaagacactaaacttgggcctcaatctctacctggccgcggtcgacgtctgattacctttaccgacagtcgccaaggtactgcacgcatggcagtgcgtatgcagcaagaagctgagcgctcaaagctgagaggtctggtgttcgacattttaagagatgctcagctatcccagccaataccagaactccctccttcaaatacatcaccggaggagttgttggcccttgcggataacctgcgaaagtttgggcaatcagacatggcttcgcagcttgaacagcaggctagagctttgcaaaacggaggtataacgctacctattgtcgatgtgacatggtcggagatggtttcacgtctctccaaaaaaactgatgtcactggcagcatgctggaatacggcaagtatttatcgccagagacgtttaagcaatctgatggtcccttgaagctcgctgagatgctcttgtttcgcgagttttcgcgtcgtccgaaacgacagaacagctgtgaaacacaaggcctaattaaagttggatactcaggtctgaaggctataaagcgtgtacctgaaaaatgggagcagcatggattaacactccaggattggctggactttcttaaagttgccttggatttttatatccgcgaaaacaccttcatgctgttggaggaagattggagaaagtggattggtaatcgcttttctgcaaaacgcttgagaaaccctgactcggaagagcaagatgagaacagtgtgaagaaatggccacttgcaagccgaaacagtatgaaccgattggtcaagctgcttgctttaggaagtggtgtggataaagactcggtgattggcattgaccttattgatagctggctacgcgcggcatggggtgacctaacatcgaaaaacgtgggtgttctaaaaaatgatgggaacaaattcttcctaaacagagaacaacttaccttctcattcaccgataaagtgtacgtttgctcgcgtactcataagcttctcgatacgaccttcaagggattgacgccatatttaccggtaaagctgggtaacgatgattacacctgcgtggctgtagactacccacagatttgggaatttggagacgaccaagctgatttcggtaagggtctactgcttacacgtaagcaggtctcagaggatccaaaggtacaggctttaagggagcaaaacttatggacggatatcaacgacagagtcgttgaaggtggtttttactaccgtaccgctgaacattctgcacagcagtctgctgagcgtttagagaaatatgaggagatgttcaagtcgggcaaaatcaacgtgctcaactgttctacaaccatggaaatgggcgttgatatcggtggtatttctgcagtagtgatgaataacgtaccgcctcacccagctaactatttacagcgagctggacgtgcgggccggagcaaagagtcacgcgctatttcctacacgttgtgtaagggaaaccctcatgatcagcaggcgttcaataaccctaagtggccttttgaaacgtcgatcccagcaccgtatgtcgcgtttaattcttcacgcttggttcagcgtcatgtcaattccatgctgctttctgtgttcctgcgagaacaggtcggaaatacaaaaacagagcgaacgtcgcttaatttggagtggttctatcttgcgtcaggagagtcaatatccgtcagcgatagattcataacatggctaaagacaggtgcgatcgcgttagacaaggagctccaaaccctagtagctggaacagtgctggcctccagttcagctaccagcttattggaacaagcgtcgcttatgatgcaaacgctttccaaacgctggctggaagactacaagcgacttgaatctgagcaagcgagagctgaagagggaagtccttttgctttccgtctcaaacaagaactgaaccgtttatgtaaagagtatttacttcgagaattggcggcgaaatcattcttaccaggttatggcttcccaactgatgtggtcacgttcaataacactaatattgaagacttcaagcgagacaagctcgaagggaagaagaaagaagatgacagggaagataatgtctctcgagcgcggggtttaccaagccgaaaccttgcggttgccattcgagagtatgcccccggtgcagaagttgttctggatggccgagtattccgttcaggtggtgttgcccttaactggcacaacatttctaaatcggatgcagtggaggctcaaaagtttgatttggcctggcgctgcaatcattgcgggcagaccggttatctagatggtgtcgcgattgaacaagatgatatctattgtgataacgaaaaatgtggcgagaagatagacacgaagaatcagcgcaaggtgcttcagccaacagggttcgttacagacttctatcacagtccttcaaacgatatctcgcagcaggcttttatccccgttgaggcaccatggatctctgtttctggaacacaaaagaacttacctaaccctgatatgggttatatggttgctagccctgatgggagagtcttcaatcacacagcaggtgcatctggcaaagggtatgcactgtgtatgtcatgcggtcgcgctgagtcaatgatttctagcggcgagtttcctaaacatttctcaccgtctgtacttcatgttccgttgcaggcaggtaagcttgatggtgaggaccctcgagcctcgtgtggcggtagcacgacaatattgaaagatgttcatttggggagtcacataaagacagacgtttttgagcttgttctcaagcatccgcttcgaaatgagtttattgcagacaatgaagatgggagaacagttgctaccacgcttgctgtgtctcttcgtgctgctcttgctgagcttcttggtgttgcggttaatgaaatgggttatgcggttcgaccgataattctacccaatggtgaagcaggtttggccttacagctcttcgatataatcagtggtggtgcgggtttcgcttcatcagcaccaaagcatatagaggctttactggcaaagacagtatcaaagttgaagtgtccaaagtgccaatcagtttgtggtgactgcctactagagaccgattcaaggcatgatgttgaaaaactcgacagactcgctgctttagactggcttgaagggttggatctatcgaacacgggtccagaagtgattgatggagggtcgtatagtcctttctcagttgcagagaatgttgaccattatgttcagaggggctgttcgaaggttgttttcttactctcagatagcgtaaatgactgggatctctgccatccagttttcaagaaacagctagctagctttgttttaaatgaagatcgtgttgttaagtttatcttacctaaaaatattgttctggatgaagaaacaaaatccgaactgaatgcatatcgtgcaatgggcgttgaagtagaagaagcagttcttagcccagaaaacctcgttgcacagattgttggcgattcaggcgttgtctcttttgccgctcgggacgcagatgcacttcgcgtacctggtcgatattggatgatgtcatcgggcgcttcaactattagcaaaacactagctttagttgattctgtgcccgttgctttggagttggctgagttcaatcagcctactcaatatggcgaagcggaaatcgttagcgaactaaatggtaagttagactcctttggtgttagtttctggcagcatcttttattaaataacccagatctgaaaacactgatgcagaatgataatattgaagcgattcaatattcagatagatatcttcaatcacctgctgctctgctgttcttacgtcaggtattctcttcactgactagcgttatgaagacaagcccaactttgaccattgaaacgcttttcagtgagaaagaacaaaatgcaagatttcttcaccaggattggtatcacaaggatgatcaaagacttgttatgacaagggtcattgagcaagcaacaggcattgcacctgaagttgtcctattcgaaaaccgtagcgatattgctcatcgccgaatgctgacccttgctcttaaatccggtaagcgggtagtcataaggcttgatcaggggtttggctactggcgtttgaaaatgaccggctggcaaaacaagccgcttcaatatagtttcaatgctcattggactgagcaagttgaaattctagaggagtatgtcaaacacttggaagtgtataacagtgagaaatggtcaactgatattagttttcgcgtggtttaa

SEQ ID NO: 29759 - DNA, 3039 bp, Proteus mirabilis
ttggggtttgagctttcaccacaacagcgctcagatgtcgttcaaagagggttgaagcattgggggcgttctgtttcccgctacgagaactctcaagggaacaactatctcggatcggttttccgagaaggtggattaccaaccaagctactctctgacgatcacaacggatatcaagatgctttttcaaagatattcggtcgatacagtgaggccaaggagctagggcagcattctgttcggcagcttatccaatcccgtatccaacgtttaccagaggcactgcaaggtgatgactctgtagaactattcgctgatatgctcgataagcttgatagcctagtttaccagtttgggttagatcggcagtcggtacccgcaaactatctcgatatacattgtccgaactggcgtactcagttcccgctgccactggaagatgacataggtacgcgctttctgaacaacttattggtgattgcatccaacgaggttaaaaagaaagcgaagaaggaagtcaaacttagctgcacgcactatttttcatgggacaaccaatcgattcgcaccgaagtcactttgccacataagcaactgttcatgtttactcgagaacagttaagtgttagcagaattgatttggtgttgtttgaaggtcaaaagctgcttgccaaccttggcactggttatgcgcagtttgacggggagcagtgtcatgttgtgatccgaaaaacgcgtgctgaagtgaaaagggttgacgccaaacaaaggctttctcttgtggccatgcaatcgggtgaaaagcttgctcaggtatcaataggtgacagcgagctggattggggcgaagtgccagttatcttgagtgaggaagatggtgaatggcgagtgttagggcaagcctcactctcaatccgcaaaaaacatgtttacatattaatcccggaagaagcgaagacggaaacgctatcgggtgagcttactgacactccataccgtttttgtcgcttaaaagtttgccaagtaacaggaacatgtttaatcactctacccggtgatgatacgtatcgtatagcgacggggtgcgatgatccggaacatgttggcgttatgcttgaaagcgatgtaatgacgtggcaaaccaagccgactatgatttttcgtggtttaagagtcatcaaccatgcggctaccagagtaactggtgaaagcttggatgtttgtcttgatggaaaatcggtctcgcacttaactcgagagaattttcttggtaaacagcgtttaaccatcaaaaagcacagtggtgaagtgctattgcgaaaacaagttggtgtgctgcccgcagattttgatattagctttaaaagtggtgatgcacccaatactggcgtgattatcatcactactgccgcacccaaggtctgtgcaattaaaactcctggggtgattcttgagaacatagagaaatctgaaaaacaggttgctttgcaccttctagctgaagggacgccgccttcttctgtccaagttgacatcacgttgaatatgctgggtgaggcgataacctttatcctgccttttccttcaaaaggtgctgtcgcttttaatgcacatggtaaacctttagcacaaagattaacagtggatgacttacttggcagtcgactacatctgttctctatgtcaggtcaggtggctcgctatcaaatagaagcatcaagcaatattaaggggataaagcaaacctccgcgccttattaccgctggcaatatgtggtgagcgataagcctgtagaagtgagcctttacgcgctgaaaaccagtctactggagttgttgtcgctgaataatcacttggatagcatcgttgatctcgtcatttcgggcccaggaaagacacttcgtttttccatcagtcattactcatcagtcatggattatgatcgggagagaaatgtggtttatgcgcgttcaaaccgactcgctgacacgcaggctcttcgccctgcgttgatgcaccttacagcaccagagcaagcgccaatctatcttgaaagtcttactactgaaggtgtttcaacaggggagtttgccttgcctagttacgtgacagaaggtggtccttggcttgtagttcctgcttcggactctgatgttctatttcgggctaaatttatcccatgcatgggtgagcaaacaaatgactgtgacgtaaaaacgttacaaaaggcatctcgtctttttcacccttcatctaatcccaatgtgattgcagatgtgtttcatcaaatgaaaacagattggggacacagcggttggcagtacctgcgcgatacatataagaactacgggcatcttccactttcaacgtttgaagtgttcaagtatttggtgagagataccaaagcattggctgtggcattgtttcagtttgaattgaacccagagctgatttcgcgactggaaagtgagttgccagtgttttggcagtttgtacccctggtggattggcggcatgcgattcagcttcaaatctcgatgctggaaggtatgtgtttaccagccgaaatcgttgatgagttgatggctaaacaaataacgaagttggttgacgccattcctgctttgtcagacgaagtggctattttcttagaaacaggcaaattaccccaactttgtccgagcgctttgatggagattcttgttcataacgagtggtatcaagatcttttgcgccagaacgcagaaaataacagttggccaaccgagtttggcgctgatttgaaacgctggtgcacacagtctggcttaatgccgtttgaaattaaaaccaatgcctggttccatgatggagttgtttacctgccggttttcgctgctgctgtggtaacagagcttgtgcctgccgaagtatcttcaaccttccgtgattacgacttgttccatttaagaaaactacgtgacttcgattgtgcgtggtttgaacccgtattccgctgttttgtctcctattttttgttaaaccaaacaggtaattag

SEQ ID NO: 29760 - DNA, 6303 bp, Pseudoalteromonas sp. H103
atgaatgtatttttttcaacactaaaaaaacaagcaaactcacgtgctaaagaagctactttgagtgtgctaggcattaataacccaaatttaagaaaccacttaaataataaaatggaaacagacgagcaatttattcacggccctgtttttgagcaaatgtttagttgggagcgtaatactgattacacaatgcaggatttagtgcaaaaaggcttgttatctcaagaagttgttgatgcattagactctaagaataatgggcgctatgtatttgataaaacttggagcccgtttaaacatcaatataaagcatggaacgatttattatcatctaatattcagtcaagaattattactagtggtacaggctcgggtaaaacggaatgttttatggtgcctgttttagaagatttatatagtgaggtaaaaacctcaaagcaacagcttgaaggggtccatgcaatattcttataccctttaaatgcattaattaattcacaacaagaacgtttaaatgcatggacacaacattttaacggagatatccgcttttgtttattcaatggtaaaacaccagagtacttatcaagcaaagctcgtcaaatacaaaaaagcagacctcaggaagttatgtgtagagaaggacttcgcgaaagccctgcgccaattttagttacgaatggcactatgctggagtacatgcttgtgaggcaaactgatgcgcctattattgaaaagtctaaaggtaaattgcgttggataatacttgatgaagcacatacatatgtaggatcacaagctgcagaattagctttgcagttgagacgcgtaatgcaagcatttgaagtgaaagcagaagatattcgctttgtagctacgtcagcaactattgcaggagctgcagcagaggaaaacttaaaaaaatatctagcgagcttggcaaatatctcagttgatcaggttgatgtaataggtggaagacgtgtagtacccgctttaaattcaatgagtatggagaatttaacgctagaaaaaattgagcaaattgaacctcagggggtcttaccagataacaaaaaagaggaacaagatcctcacgtttctaaactcagatatttagcattagaaagtagcgaggtagccgtagcaatacgtgaaatgttaactgcacataatactcctccaaaaactatttatgaattaaaacaagcgctatcaaagtttgatttaagcgaaaacaatatttataaatggattgatgtttgtacaggcactaaaccaagttctaatgctgaagcatttttaaaacttagggcgcattattttcaacgaacgcttgaaggcttatggtcttgcattgataaaaattgcgaacacaaaaagcattctgaactaaaaaataattggccttttggtactgtctattcaaaacataaaatgcactgtgattgtggtgcgccagtattggagttaactttttgtaacgagtgtaatgagccgcacttactgggagtgtatgataatcaatcatatgttcagcaatgggtgaataggcatacagatgagtttgcactcacagaaggcgaaagagaagatttacagataagtgatagcaatgatgagagtgatattatttctgctgatagaacatcccaagtagttgtatttagcggtcatagcaatgaagagcatgactactacgaaatcgatgtaagcaaagatggtaaaatatctaaagaaagtgataaagctgttgagcattgtgaaattgtcttagctatgcgtgatcttgatgggcaagaatgtgttagttgtggctttaaaggtaaaaataaatacgctaatgcgtttagacgtgccatgttaggtgctcctttttatactaccaatgcggtgcccacaattttagaatattgtcctgattttgaacccgacaaatatagtgacataaagcaacttgggccaaatgaattgccagcaagaggccgtagattaattacttttactgatagccgccaaggaacagcgaaaatctcagtgagtatgcagcaagaagctgaaaggtctcactttagaggaacccttgttagagagttacgtaaacatgttgaagaaaagctaaatatagatcctcaactattagacaaagtaaaagaatatcaatccatgtcaattgagactcttcgccttgtgttacctcaaatcaaacaagttaagccagaagatgcggtcgctcttgatacatactttagctttttagaagctggaaaacagactaagccagtgcctatgtcattctcttggaaagagctcattaatgttttaaagaatgatgaaaacattgctaattcgatgacccaggaaaatcattattttgctcctgaggtctttgagctcggcgatgccacaaaattatcagaaatgattttaactcgtgaaattgcacgcagacctaaaaatagaaataacgttgagacacaaggattagttaagcttatctatccagggattgagtcaattaaggagatacctgaaaagtgggcagagcataattttacacttcaagattggaaagactatttgaaagtatgtatggatttttttgtaagagaaaatacttatgtatctgtttctagtgagatatcgcgctgggtaggtatgcatttttatcctaaatcactaattagccctgattcaaaagataaagacgaaaatagggtaaaaagttggccattggtcaaatcaggtaaaaagcgccagcagcgtatagtgatgttacttgctaaagctgcaaaatttaaagcaataaataaaatagaagaagacacattaaatacttggctaagggctgcttggattgatttagtaaaaacgaaaacattgaatgaatatgcaggtaagcaatatcaactagatttaagtagtgttgagtttagtttattgacacatgcatatatatgtccgattacaaataaactgatagatactgtattttctggtattacgccttacttgccgtggaataaagagttatcagattatacatgtgagcttatagagctaccttcaatttgggagtttgataccagctctgatgtatctaattttgttgatgatatacgaaaaaatgtagcaggagactctaaggtaaagcaactgcgtgagcaaaacttgtggactgatattaatgatagagctttagaaggcggtttttactatacaactgcagagcattctgcgcagcaatcatccgataatttggagcgctatgaggaaatgttcaaacaaggaaagaaaaacgttttaaattgttcaaccacaatggaaatgggagtcgatattggcgggatttctgctgttgtaatgaataatgtaccgcctcaccccgccaactacttacagcgtgcagggcgtgcaggtcgctcaagcgagtcaagagcaataggttttactatctgcaaaaataatccgcacgatcagtacgtttttaatcaacctctatggccatttataacggtaattcaagctcctactgttacatttagttcagaaaagctggtgcaacgccatgttaactcattacttttaggaacttttttacgtgataaaattggcactaccaaaaaagaaaaattgtttttaaatttgagttggttctatttaagacaagatggaaataaagcagtttacgagcagtttatagattgggttaaggctggtcagaagacattaaaaaatcaactatctatattggtacaaggtactattttatctgatagttcagaagttaaattatgtgcggacacaaaccttaaagttcaagagttggcgtctcgctggttaaatgaacatagttatattcaaactgaaatgaatggcaccgaggcagaaagcccttatgggtataaattaagtaatgacttgaaacgtcttgaaaatgagtacttgctaagagatctggccactagaggattcttacctggatatggctttcctacagatgtagttaatctttcggtagattctttaacggattatattcgccaaaaagaacaaaaaaatagtcgctctaaagataaaatagggcgtgaagataatgtttcacttagcaggggaatgccaagtaggaatttagcggtagctattcgcgagtttgcgcctggaacagagcttgttttagatgggcgggtgcataaatcagcggggatttcacttaattggcaaaatattcatgtagaaggaggaaaagactctcaaaaatttgatattgcatggaggtgtgattgctgtgggcaaacaggctatgaagctgatttagccaaacaatcagagataatctgttcaaactcccagtgcgcatcaaatattaagttaaagaaccaacgcagagttattcaaccaacgggctttgtcgttgattattatcatccacctacaaataatattgcgaacacacattatgtacctgtacaacagccttgggttataggtaagggggcacatatacctcttcctaatcctgaattaggctatatggtaaatgataacgctggacacgtatttcattattgctcaggtttacatggtaaaggttatggaatctgcttgagttgtggtaaagcagaatcaatgacttctacgagcgaacttcccccagaactttctctacagaaggcacataggccgccgatgccgaataaatttcagcgagatgagaaaggtaaacctgaatgtgattcaacaggtaaaattttagaaggtattcatttaggttataactcaactactgatgtatttgagttgattttacgaaatccaaatacaagtgaatatctcgcagaacagtcaattgcagtaacaattgctgttgctatacgaaaagcattggtcgaaacgttaggtatctcagtgaatgaggtaggctatagcacaagattaactttaatagaaaaaagtcagcaagcttatgctattcaattgtttgatatggttagtggtggggctggctttgcaacatctgcaaaagagcacattgcaaaaatattagagaaaacaatcgctattttggattgcgttgataattgtgaacgcttttgccataagtgtcttttagagtctgattctcgccatgatattgatcagctaaaccgtaagttagcgttcgattggataaataaaagcatacgagattatattgcattgccagttaattgccaaaaaatgctgggcagtgacatcactgtaaaatatgtggcgagttcacttaaagaaaaactgagtgaattaatacggatgaaacctgatacattaaagtttgttttctctaaaggtagtgatgattgggatacctcactggcatactttaagtcgctattccacagttgcttagctgaagaagttaacattcaaataattattcccgatgaaaaattaaatgaaggtataaataattttttagcggagttagataaaataggcgttaaaatatttattgctgatattaaataccctgttatttttcaatcgatcaaaggtgacgtttgtacgacagttgctaatgctgacgaagaggcaacgcgaccaggtgaaaactggttaaatagtaatgatataacggtacaaactaactctttttctgaaataaaagggcaatcactctcttttgaattgataggtgaagcaggtgccgtagagatacccacacttcgcgaattaaatgggcccttagctgggtttggtgtgcggttattaaaccgtttaaccgatttagatgatcatttaaaaaacctattgagtgtgagctcattgcaaaacatcacttataccgaccgttatattcaaagcccgacaagcatgatgatgctctgtgagctgctctctgcattagctaaaggtaaagaagcaactattgaggtgaaaacatgttttgcagataaaaaaggacaacttggctatgcaattcaacatgattgggcttatgaagatgattacaaatcaatttttggtgcctggttgcaacataactgttcaccaaaggcacagcttataataactgataaacataaagtgccgcatagaagaacgcttactctagaatttgattctggtgataaagtaacagttacctttgatcagggactcgggtattggcgagttgaggttgatagggggttgcataaacttgactttaaaagagatccaaaagaacagctagcttgtctttgcaaagcttttgaaagagcaaaagtaactaacagtgctgattgggaaacgtggtttacagttagctcagtaaaataa

SEQ ID NO: 29761 - DNA, 3273 bp, Pseudoalteromonas sp. H103
atgcatcaattgatgagggaatcctctgtgcaaaataattttttaactccatctcaatggctttctcagtttctttcttctcgtaatttagactcagtaactggcggacctttgtttacgctccacgtatctgaaaatgaatattttaatttaaagtcatttttaaaataccgaaaaccatcaacagtaacctttaaagatagagactggtgtgcttgtttttgtttgtttggtgcagaatggtatcgcagggagtataaatctggttgggcttggttgggtatttttgagcaacttggttatgaactagatgctaatcataggtcaactgtcgttataaaagggctaactttttggaagcgcccaataaataaacatagcagcgatagaaatgattatttaggctcagtatattctgaaggtggattaccttttgggttgctagcttcagaaggtagccgttttcaaacattgtttaaaaaattgcttattgaatttgataaggcaaaaacttttggccaatcaccaatacctttaattgagcgacaattactcagaatgccggacgcatttaaagaagaaagtaccgtaacgttacttcacgacatggtgagtaatttatacggtttaattgatacctatgagttagataacaaaacaaacccgcccgaatatcttgattcaatgatgccaaaatggcgaattagttttcctattccgctagacaataaaacgggagatattttcttatcgggtttattacattctgcagcgcagcagcgtaaagaatctaaaaagagagagcagcggcttaaactttcgcaatggttcatagatagtgatgagctttctttttctgcaagtattacagtaaatagtaaattacctgtcgcactaaaaaagaaagatttgtcagctcccatagttgaagtcttagtgtacgaaggtcattctcagatagctgatttgggcatagctcgagcagaggtttttgatgataatcttattttacatatgcgaaaactaaatacagtatttaggcgctttgtaaatgagtcaccattaaaacttgtaataatgcaggcaggacgggttcgacatattgaggaaattccagaatcttcgttacctcatgatgaaatgcctatattacttaaaaaaagtaaagataagcatattgtaattggtagtggtactacaagtaaaaagtctgaaaatttagaccttattatttctaaaaatgcaaaattaacctcagaaaatgctgaactatttgttgatgtacaaagaggtaattatcgatttctaacgtttagtggtgagctaagtattgattatagttttgataatcatactgatacatatgagttatctacaaaagaagacagttttagtaaagagttacttactatatctggtgaaatgttcgagtttgaaacagataaaggttacccagtatttaaaggtcttccacaaattagctgtgattttccaaataccagtattcttattggtgataatgaagtaagtaaagttaataatttatccaacttttatggccgacaagttttaagagtaaaaaatggtgataaaacgctctgtaggcgtaagttggcaattttaccaaaagattttgatatggagttgttcgctgggcaaaaatcaaatcaaggtagtgtatcgatacatagcgaaaaggcgtttatctataaagttggggataatcttaaagtgcaggctgtatcgatagagggcggtaagcgtattaatttaatcgctgatggaattccccctccacattttgaaatgacgattcaagctaatttaatttctgaccctattgatttaaagataccttttccaagccgaggcgctattttatttgatggcaatggacgtgaattaccttttcacttttcagttgatggcttgttaggtgcaaggattaatctttttaaacaaccaggtaaagtaagcagttcatttgaaattgaattaaaagcccctactagtgcctcgggaaatgcttcatatgtattccattaccaagtaaataaatttattgaagaagtgaatctatttgatcttcgagaaaaaataaaagagttattagcaaccgctcaatcttcagaactggatgaagttgtaagaatgattatcagtggcccaggaatgcaaacaaaacaatacactataggttggtttgctttatttggtataaaagatgaaaatttacttacatttgaagctaaagctaatattgatttttccggcttaaaagctgaattaattaatttaggaaatcctgagcaaaagcctacgcaattagcgcaaagaatatcggcaggggcatgtattggaaaatttgagttaccgttagtaagtgaatcaccacaactcgcggtacctgaggaaagctctcgtgttcaatttcgtcctgtatttattcccccaactacaagtaatttagatcataaatcagttaaatcacttggcaaagctgctgaaacttttcacccgatttataacaagtttgcatttgataaagtacttgatgcaatgacaagtgatattgaacattctgggtggcgttattttgattgctttttagataaatattcacatttgccaatgctaacatttgaggcgtttaaagcattagcccgacatcctaagtgtttagctgtactgccatttgcgacaaagctaaatgtcgcgagtgtactccaagttttacagactgaatttaatattgtgtgggaactcattcctttggaaatgtggcgtggtgggttagatctataccagaaaaatttggaaaaaataggcttaccagagatgttaataactaaatatgtaaatgagaaaacagcaaatattagtaattttatatcactgccggatatctttttattacaacctaataaaaaagctatgtaccacgcacttattaatatttggcgagaagagttactaagggaaaacgcagatattagtgttcgatggccacagcaatataaccaacaactttacagctgggtgacagctaagtttcctgagctagcaatatttaatgtcccaaatgattttcagcgtgctgttatgtattttccactcgctgcagcagtcgttgcttcaacggatacaacgtgggaggaggtatttagtagtaacgatgttaattattttcttttacggcaattaatggagtttgaccgaaactggtttaactcagtatatcaatgctcattgtgcttttttatttcggagtag

SEQ ID NO: 29762 - DNA, 6309 bp, Pseudomonas aeruginosa
atgcgttttttcagggacctgattgagcaaagccttgagcgtacccgcgaagcgactctgggcgttctgggtattaaccatccgggcctgcgccatcacctaagccagagcatggttaatgatttgggagatgatggttgtttcctggctccgcccgttttcgagcacacctttggctggaaggagtcgaatgtaaaactgcaagatctgcagggtaaattgctttcggcaagtctgctggacacgttggagcggccgcactatcgaccagatccgaaccttcccgccgaaaagcggccttacagattcggtaggcaccaatacccctacacccaccagttgcaggcctggcgtgctcttctcgacgaacagccacgctcggcagtcatcaccaccggcaccggctcgggcaagaccgaatgtttcatggtgccgatcctcgaggatctggttcgcgaacatgagcgcagcgaggctgccctggtgggcgtccgcgcgctgttcctctacccgctcaatgccctgatcaactcccagcaggaacgacttgacgcctggacccacaagtacggcaacaacatccgcttctgcttgtacaacggcaagactgaggagcgcgccgacaaggtccgtaaggagcagcagcagaagcccaaccagatcctgtcgcgggaactgctgcgcagggagcctgccccgatcctgatgaccaacgccaccatgctggagtacatgctggtccgtcaggtcgacaatcccatcttggaaatctcgcgccagcagcaatcgctacgctggatcgtccttgacgaagcacacacctacgtgggctcccaagcggccgagctgtccctgctgctgcggcgggtggtccaggcattcggaaggcagtccgagcagatccgctttgtcgctacctcggccactatcgccggtgcagatgccgaggagcggctgaagcgctacctggcggatcttgcggatgtgccgcttgagcaggtgtatgttatcggaggttcgcgtgtctggccggatcttgccttcgattcgacaggcaaggacatcgctctgcagacaatccgtcatatcgagccggaggtcgaagtatcgccggcgcgcttcgaggtgcttagccaaagcagtatcgcccgacgtttgcggcatgcggttatcagctcagccaagccccttgacctcaacgatctggtagatgaggtcgctgaccaactgcagggatgcagacggctcgaacggcagcaggaggtgctcgactggctcgacaccatgaccggcactcatccagccgagaagcagccgccgtttctcaagctgcgagtccacttgttccagcgcatgctgcatggcctctgggcctgcgtcgatccgaagtgcagtgcaaaatccagtcatctgctggactggccgttcggcaatgtctatgtggcccagcgtgcacgttgcgagtgcaatgccccggtgtacgaactgggcttctgtgaggactgcaagacgccgcatctgctggcagaagatcgtaatggcgaactgcaccaacccagcccttacgccggcgatgagttcgccctcaatcacgaaaacggtggcgaggacgcacgagccgaagtgctagcgtcggcaaatgtcaccagcacacgcttgatcattgccggattgtctgcagcacataatccctacttctcgatgaccctagatcttgagagccaaaagctgggagcagtcaatgccgtcggcaatatcaatctctggctggttacggaaggaaaagaggatgcaggaaaaaaagaaagaaacttcgcctgctgcagcttctgtgatcactcgacgtggggaacgagtgattttctgagaaaggcctacctcggtgcaccgttctacattgccaacgctgttccgaccgttctggagttctgccctgatcctgaaaaggaggattgtgaaggccgctcccccgaggagttgccggggcgcgggcgcaagttgattactttcactgacagtcgccagggcacagcgcgcatggcagtcagaatgcagcaggaggctgagcgctcgcggctgcgcgggcttgtggtcgaagcgttaaggaatgcacaagcaaagcaagataatgagcaacctccagagccacccggctatcagcagctactcgatgccgccaatcttttagagaaactcaaccagtacgatgaagcaaaaaaaatccgcctgcaggcagaatcgctgattccaccatctacaccgccagcacagattccctggcaggatatggtgcagacgctttcatccactaaggatgtagagcaattcattctgcgctacaaccgctatgccaatccggcgctgttcgatggctccgaaggcggtctgaccatggcgcgcctgctgctagctcgcgagttctccaggcgccccaagaaccagaacagcactgaaacgctggggctcatcaaggtcggctaccaggggctggaaaaggttacgacaactccgccgctgtggatcgatacccgcgccattccctcgcggggcgctacaagtgatcccagaagctctctgacgctggacgactggcgcgacttcctcaaggtggtgctcgacttctacgttcgggaaaacaccttcatcccgatggacaacaagatgcgccgctggatgggcagccgcttcagtcccaaggcgctttactcgcccaagagcgacgtgcaggaaagcagcaccatcaggaagtggccgcagatcaagtcgggcacgccccaccgcctgatcaagttactcgagcttgcaaccagtctgagtcgcgccatgaatgcggatgcaaacaagatcaacagctggctcgaggcagcgtggctggcgctggtcaatgctggcattctggagccctccgataccggccaccgtttgcgcctggaatcccttaccttctcgctacctaccgagggttgggtctgcccgttgacccggcgcatcttcgataccactttccgtggtctgacaccctatttgccgcaaaagctgctgagccaggattaccgttgccagaagatccagcttccaaccttgagcgtcctgatgccggacggctctccggtgcccaagcagggtcagatccggcagctggttgcaaaagatcctgtcatagctcagttacgccaagaaagcctgtggacggatatcagcgaccgcacagtcgaaggtggtttctactaccgaactgccgagcactcggcccagcagtcggcaaaacggttggatgactatgtcgaggagttcaagcgcggcgatatcaacgtgctgaactgctccaccaccatggagatgggcgtggatatcggcggcatctctgctgtggtgatgaataatctgccgccacatccggccaactacttgcagcgcgctggtcgagccggacgacgcagcgaagctcgggcaatcgcatatacgctgtgcaaggccgatccgcataaccagcgtgcattcgccaatcctaaatggccgttcgtgaccgccattccagcaccgagcattaccctcagctcagcgcggatcgtacaacggcatgtcaactctctgttgctggcgttattcctgcgaatgcacagcagcaatgatggtgaccgtacaaaactgaccctgcaatggttcttcgctccagacgattcgcccggtcagcagttccaggcctggctcatggcaagccccgcggaatttggtagtgccgtgaagcaactggtacggggcacctctctggaaggtcgctcgctcagctcaatcactggcgaaacccggctggcattgcgtgacctcgaggagcgttggctgggcgagtaccgcaatatcaaccataagctgcaggccgccagcgatggtccgtacaagaaggctctggctctggagaagcagcgccatgagagcgagtacctgctccgttatttggcgtcgtctgcattcttgccgggctatggtttccctaccgatgtggtgagcctcaagacgtacaacgtggaggacttcctgcatcagcaacgaaagggcgatgctagccgcgaggacagcatcttcgacaacaaggaaatgccgtcgcgcagcctgaacatcgccattcgcgaatacgcccccggcgctcaggtggtcatcgatggacgggtctatcgttctgccggggtcagcctgcagtggcatggcgacgggcaggtcaacgaagcacagaagttcgatatcgcctggcgctgcccagagtgcggcagcaccggggtgatcgaaaatgcctatgcgaacaatagcggactgtgctgctcgcattgcacgaccccgattccgcccacagagctctgtacggtgttgcgcccgggtggcttcgtgaccgacttttacgaggaagccaccaacgatgtcacttcgcagaagttcatccgcgtcgagcgcccgcgcattcagctgaatggcgaaagcatcgcgttacccgatcagcgttgcggatttgtgcgcttcggccacgacggaagcgttttccatcattcgtccggcgagtatgaaaagggatatgccgtctgcatgacctgtggacgtgcggagtccatgcttgcctcgggcgaagttcccaaggacttgcagcctgataaaagccaccgtccggttggcggattggccggtagtcgcaaggagcgcgattgctcgggcgaaacggtgaaggccaacctgcatctgggctatcagattcgcactgatgtgctggaggtcttcctcaggaacccccttactggagagtggctgcgcgatactcccgagggtcggctggtcgctacaacgctgggcgttgccatacgcgatgtgatcgccgatcagctcggtatcgccagcagcgagatgggtttcggctatcgtctggaccgcgaccgagaaacccggcagggccgctccgtcatccagttgttcgatgaagtcagcggaggggccggattcgtactggctggtctggctgatatcgctctgctgctgggcaaggctttggatcggttgcagtgcccggccaactgcgagaatgtttgctcgcactgtctggccagccaggacagccgtgtcgagcgtgaagaactggaccgcaatctggcgttgcggtggctgagcgagtgccgactggttgaatatctggggcttcccgatgcatttgctggtctgcatggcgctcgctattgctcggttggtccgctgcgcgaactgagttccgccatcaactcactggatcgtcgtgatcagactgcatcgattctgctatgcctccacggcgactgtgcggattgggatctcgaccatcctcgcttccgggaacaggtactggcctgggccattgcagagagactcaaggtccgccttggtattgctgatcctgctcagttgagcaccgagcaaaaagagaccttggcactgtttgcgcgcttgggcgttgagctaatcgaactgaatactgcagcgctgcaatctccgcatctgattgcccaactcccatcccaggcaggcgtacggagcctgtacagcagcatgagcagcgtcggggtgcctggccccgattggctacagggtcatgctgatgtggtttgggctaccagtaaattgatgccaaccgtcacggggagctccatcgacagcagcggctggcaccaacagctgcagggggcgcgtatcgttgaaatttcttcgcagcttgatgggcctgtcaacaccctgaaaaaacgcctcactgcactggtctatgctcagatgccggagttggccgctttgatcggcaatgatcaggcgatttccgtcagctactcggaccgctacttaaagacgcccctgtcgctgatgttccttacaggcttcctggaactgttccggagtgatgaacttcagtctctatcggtacagacgctggcaccgagcggtaaccaacccagctatctgctcagtcatgattggatgcgggcggatgaccagaagaccattctcaggctttggctcaaggagcaattcgatatcgaaccggacatcaccgtaatgaacaaccctcgcgatttgctgcactgccgggttattacagtgaggtgggcgtcaggtaggaccagcaagatcctgctggaccagggtatgggctactggcgcgggaggatgccatacagggatcaaatgaacttcgacttcaatgcttcgccgcatgatcagaaagagctcatgtgcgataaatatggatacgttcaaatgcagcagggtggggagtggccgacctatgtcagttgcgtcattgattga

SEQ ID NO: 29763 - DNA, 3300 bp, Pseudomonas aeruginosa
atggacgtgactgcacctgttaccagtgctgcgaaggcatggttgagtgagttcctgtttaaccgtgagatgttcaaggggcctgacggtacgcctctttatagttatcacgtcacagaggatgaattccggtcgcttgttgagctacttcgttcctacttcaagcgtggttctgtggcaaacagttccgctcatctggcggcttgtttttgtctgttcgtcagcgagcagtatcggcgcgcctataacagctcttggtcatggtcagggccagagtctttgctggaggcatccttttctccgcagcagcatgccagcctcacggccactgggttggcgtattggaaacggccgattcgactccgggagaatgggcgcgactggcttggatcgctattcgctgagggcgggcttccgtggccattggttcaaagcgaatcacatggattcgggcgtgctgtgcgcaggggtattaagcatttctaccgaactgaaggtaaccgcagaacaaccgcggacctaatggcggacttcgaaaacgacctaccgctcattttccgcaacctcgaagcgcgccggcttttagcgggcatcgttgatcagctcatgtatctggtcgagcatcacccactcaaggatcaacaggatccagtcagttatctggatcaggcagcaccaggatggacagatgccttcccaattccattggatgaaagcaatgcacgcacgctgctcaatgactggctccgcgacgccgggcagaagcgcaaggagcgtcaagagtccttggagagggcgagggccttcacttgcgagcattttttgcatggcacattgccgcaatggttgatacgcaccgaattgatcctgccccaggagacagagtttgcggttgatccgacaagtctgagtagtacccgacttgagttggcctactacgagggcgaaaggctcctggctagagggcccgccgtttacgggcagcttaccgaaaaaggtatcaaggcgcgcttctccaatcctcaagtcacgctcgaacgtcgcaaacctggcgagccgctgagtcttcgcttgttggacaacgggcgagtggtgcattgccaatatttcgatggcagcgccctcgattatcacgatgtacctttgattttcgagagtcgctccgaacgctggcaactggtcgctgtgtctagttgctcgctgtcatccgggcttgttcgacttcgagttccccagggcttttccaccagttgcgcaggtgacgctgcaaaacctttggccgaggaccaagaaaatggcctctggatggaggtaaactccgacttcacgctggtaaagggggacgatcgctatctagtcgcgcttaatcaggcggacagcgatgactctaaaccaactctctcgggtgtatttgcactttacgaaagtactcccgcgatggtcttcctgggttggcccaaccttgagctgcctgaagattaccctcatgccagagacgacttgttcgagttcgtcaatggcgagctacttgaccgccgacttatcagccattacggctcggttcgttataccttgcgcacccgctcgggcaagacactcatgcagcgccgtttcggcgttctgcccagagatttcagcctctcactgttccccgaggtacgcgaacagcctgcacgtattcaaatcaagggggctgcgcagcttgatccgcacattgtcagcaatgccttggtagtggagcagtctgaaaattcgctgtatctgcgccaccaaggtgacgtaccgccttcgacctttatgatcgaagtaggtcaaggattgcccacgctgcaacttcacttgccctatccctaccagggagcccgcctgctggaccagtgcggcaacccgtcgcgagccagagagttgttattggctgatctcatggggtatcgcatttcactgacctcagggttaacccaaggacagaccttccacatgcagttggagctggtgagcgcggagcagccgcatccgcagcgtacatacagcattcgggtaggctcggcacctgtgatgctcaacctgttcagctacctcgctgacatgcagaacatgcttggagcagtggatgagcaggatgcctatatcaggctttctgttgaggccgaacaaccactgcttaaattcgatatccgccgctatggtggccagcttgattgggaaggacgctatgtcttccatgtaggcggcgtctccaataaagctgtactggatggcgtgaaggcagaggctatgctgctgtccgatcccaagcgaacccctttgcaattgatcgagaagaccagcgaatcagttggtaccggtagtttcgagataccccaggctatgcagtctcgtgggccgtggctgatctacccagcagacgactcggacattcgttttcgtccggccctgtatttgatgcctgaaaacagcctggatacctctgcagaggtaatctcactacaccgagccgccgagctgtttcacccttggcgcaatccgtatgtcatcgaccatcaggttgctgccatggcggacgatttcaaccacagcggctggcagtacctagccgacttgaagcaaaactaccatcacctgccgctttcatccttcgagacctggaaggctctatcgcgcaaccaggaggcattgagcttcgcagtattccgtcttgagatggatgagtcgttctgcgttcgcatccgtgacgagctcgctgttatttgggaaaccatcccgcttccgctatgggtaagggcgcatcggcttttccaggacgctctgcgtttgactgggcttcccgaggttctggtcaacaatcttgtatcgaatcgtgccagcgtactgcgcttcattgtttccggatttgagtatcttggggattacctgagcaccggtagtcgtagctcattgataaaactgccaccagaaaatgttctgccgatctggtatcaggatctgcgtcgatttcacgaagctaaccggaattggccaactctgctgggccgcgagctttccaactggattgaagggcagcaactgccgtctttggtaaaggctctttcattggctgagttcactgatgcggtcacctatctgcccgtcttcatggcctatgtcactgctggtcgggcaagaattaccgacctgccggcgacgccggcctatctgaaatttgcggttcgattgatttccgacttcgatcgtcaggggtggttcgtgcctgcacacgcccttatggtgtcctatttgctcgcctcgcaggacgaggcataa

SEQ ID NO: 29764 - DNA, 6216 bp, Pseudomonas aeruginosa
atgctctatcagaagaactatttctccgctctcaccggcaacctgagcacccgcagcgagcgcgccgcccagggcctgctcagtctaggcaatccgcagctgcggcagttcctgcatgatcagctgaccgccgcccccggcactccgggcgcctggctggccgacccggtcttcgaaccgaccttcggctggcaggaaagctctgaaaccatgagttcgctggccggcggtgacctactacaccgacgccttgccgaagccatggcggccccgcccaaggagccccatgatcttgcagaggaatatgccttccccagcaatcgccatcctttcacccaccagttggcggcctgggagattctcaaccgtcccgagccgcaatcgctggtggtgaccagcggcaccggctcgggcaagaccgaatgcttcctggtgccggtcctcaaccagctggccaaggccatcgacgcgggcgaagacccggaaggcgttcgcgccctgttcatctatccgctgaacgcgctgatcaactcgcagcagaaccgcctggatgcctggacagacggcttcggcgggcagattcgccactgcctgtacaccggcgcgctggagaatgagcgcaagacgtccgaccagcagtacaagggtcaggtgatcgaccgcaagagcctgcgcgccagcccgccgcaactgctggtgaccaacgcgaccatgctggagtacatgctcatccgcaaggatgatgagccgatcctgcagaagtcggccggcaagctgcgctggatcattctggacgaggcgcacactcacatcggctcccaggccgcggagatggcgctgctgctgcgccgggtgatgctggccttccaggtcaaaccgcaggatgtgcgcttcgtggcgacctcggccaccttcggctcggatacccagaccatcgagagcctgcgcaccttcctcgccgatatcggcggagtggatccgcagcaggtgcatgtcgtgcagggtcatcgggatatcccggcgctgctgaacgccacgcccgatgccgagcaggacacccctgaagccatcggcgccatcgaggcggaccaggagcagtcgacgctgcgctaccggcgtctggaggccagccccaccgctcggcggctgcgcgccctgttcatgcctgatggccaggtgaaaccacaaagcctgcaagggctgatccgtgagtccggtctaccctcggcgcaggtgctcgcctggctggatctgctgtccggcaccaagagtgccgagggcctgtccttcctgccgctgcgcgcacacctgttccataacgtgattccggcaatccgcgcctgcgtggaccgccactgcagccacaaggccggcaccgcgctggcacatgccgactggccgttcggcatggtctatctggaggagcggactcactgccgctgcggcgcgccgctgatgccactggtgtcctgcgaggagtgcaacgagagcttcctgcaggcggccaccaaaagcagtagcagtgctctggtcgatccgacacagcaacaggacgacgagttcgctctcgaagatgaaaccacggaggccgatgatcagaccaaggataaggatactgtgtcatccatccagatcctgatcaccaatcgcgccgtcaagaatggcagtgcagacttcctcgatcgcgccactcaccgactgacgcccaatcgtccggcggatggtggcatcgagctgcagctcttccgcactgccaagaacgaatgcccctgctgtggcgccaatatccagggccgcagcctgctgcgccccacgcgcatcggtacgcccttcaccctcagcacggtgatcggcaccctgctggagttctgcccgccggatccgatgccgaccggcaagccgttccagggccgcaagctgatctccttcaccgacagccgccagggcaccgcacggattgccatcaagctgcagcaggactccgagcgcaaccggattcgcgggctgatctatcagcgcctgctgcaggcacaacccgtcaatgggctgtccgcagaggacttgcaggacctgcaagaccttcaaacagcaacgcaactgagtcgtatcgagcagaaacacctgcagtctttgctcgacaggcaggctgaagctacaaagggcgcggaaataagctggacagatatggccaaccatctggccggcacgcctgagctacagatgggcatgctcgactactacaacaacctcgcgccgaacaccttcggcaagcaggacagtgtcgccctggccagcatgctgctggcgcgcgagttctatcgccgcccgaagcgcgccaacagcttggaaaccctgggcctggtacaggtctgctatcccaagctggccaacgtcaccggcaaacccatggcctggcccgcgcacctggatgccgagtcttggcgtacctacctgaaagtgctgctggacttcttcgtccgcgaaaacaccatcctgaacatcaacgaacgctggcagtcactgatcggcgcacgcattcgccccaaatgggtagttgcgccggtcttgggggaaaagcctgaaaagctgcagagccgctttgtccgctggccggcggtcaataccgtcaatggcatccagtcgcgggccatcctgctgctctgcaaggcgttcaactggtcgaccgcggcccatcaggaccagatcgactcgatcctgagcgaggcctggcgggtactgacccagcaggcaaagctgctgatttcgtcaggcgacggctatcagctcgacctcaaggacctgagcttccggctgcccgaaacggtctaccagtgcccggtatcgcggcgcttcatcgacaccccgttcgagcagctcagtccctatacgccacgtaccgaccgcgagatggtcgtcaaggtgacgccctacactctgccgcgtccgcccgaggcgctcctgcatgtgccgggtgatgagggcctgctggcgatccgcgactggctgaacagcgagccgcagatccagcagctgcgcaaggacgcgctctggtcggacgtcatggaccgggtcatcgaggggggccactacttccgtgccgccgagcactcggcgcagcagccgaagagcaagctggacagctacgaaggcctgttcaagaccggcaggctgaacctgctgagctgctcgaccaccatggaaatgggcgtggacatcggcggcatcagcgtggtggcgatgaacaacgtgcccccgcacccggccaactacctgcagcgtgccggccgtgccgggcgccgccgcgagggacgctcgctggccctggccgtctgcaagaacaccccgcacgaccagagcgtgttcaacaacccgctctggccgttcaacacgcccatgcgcatgcccaaggtgtccctgcagagccccgatctggtacagcgccacgtcaatgcctggctgctgtcgcactggctcaagcacgtggtcgccgcccaggaaatcaagtcgatgaccgccggtgccttcttcctcgacggcgaactgcctatgtcgctggccgcgcgtttctgcctgtggtgcgacaaccaggcggtcgataccgaaacgctggtgggacaggccctcaaggacatcacccgccgcagcatcctcgacaccaccccgcagcccgagctgttcaagcatgccagccgccgcatgaaagagatcatgcaggcatggcagcaggaatactcggccagccacgcccagctgctgcagattgccgacaagaaggccgctgcctaccgcgccatggatgcacagctcagccgcatcgcgaaggagtacctgctcagcgagctggctgaccggcgcttcctgccgggctacggcttcccgaccgacatcgtcagcttcgacaaccgctgcatgcagaccttgaagcgggaggacggcgaccagcgcgaggacaaccgcgcccgttaccgctcgctggcttcccgcgaccgcatcaccggcctgcgcgaatatgcgccgggcgccgagctggtcatggatgggctggtctacaagtcctccggcatcaccctgaactggcacgctcccgcgtctgccgaaaacgtcaaggagcttcagctgttcaagaaggcctggcgctgtgggcaatgcggtgccagtgactcggccatcaatcccggactggagatcaactgccaggaatgcggcgcgccgatcgagcgcgacaacatccgtgaatacctggtgcctgcaggctttgccgtggacttcttcgacgagccgcacaacgacatcagccgcctgcagtatgtgccggtcaatgcgccctggctgaacgtgccggccagctgggtctgcctggccaacccggcactcggccagttccgcgccagccagcaggcgcagctgttcaactacacctcgggcgccaaccagaagggctttgccatctgcctggagtgcggcaaggccgagcccatgctgagctatcccgatgcatccgcccctgccaatgaacagtatctgccggctattttccgccagaaggcacagcaccgccgcctgcgcggtggcaaaagcaatgaacaaggcgacgggacaaacatctgccccggcagccacaacagctggaagatcaaacagaacgtccaccttggccatgacagcctgaccgatgcgctggaactggtgctgcgcaaccctaccagcggcgaactgctcaacgacgatatcaccgcctactcgattgccgtggcgctgcgcgaggcgattgccgccgatctgggcatacaaaccgaagagctgggctgcgcaagccatccgatcaaggtcgatggccagccaacccgcgccatccaggtgttcgacctgcgcagcggtggctacaccacccaggccgcggagcggctgaatgaagccagcctgtggcgaaaggtcatcgctcgtctggacagctgcaactgctcgcatgcctgccagaactgcctactcagtttcgatacccgcttcgaggccgagcgcctcaatcgtcacgtcgcgctggagtggatcaatcagacttggcttgccggcctggcgctgcccgccgagctcgctgtctttggtccgaaaagccaggcagaaatcgccactctacaggaagcggtcgaaagagcgattactagggacgacaacgcgaagaccgtagccatttacttcactgcacccgccgaagagtgggatcttgctgtcgcacgccgcctgaggcatcaactgcatagctgggaaagcgtcggacacctagtgcaattacatttactggaaagtaccgtttccagcctgccaagagaccaaaaggaatggttggcaaagctagccttcaacggagtacagatatgcctacacaattccataccggatctcggggcgctggcactcaatgtctcactgcaaggcccacaaggctgcattgcctgggctagcgacaatacgaacctggccgcacctggccacacatgggatctagcggaggccggtgcacggatcatccgaggcaccccctccgacctcaaggcagagcgcatcttgaatgctgccgatctcatgccggccccaccccctggcttgatcaagatcgagatcggcaatcagctggatggctcgctcgacaactttgctcgtcggttctgggagcacctaggtactgaggccaatggcctgattaatgatgccctcacaggcaaggatccaattacagaactggtttacagcgaccgttacgtatgcagcccgctagttgtgaatctgctggtcagcgtgatccacgagctcggacggctgagtgatgcagatttcgctatccgaatcctaggccgacaatatcagcggggagacaatcgctcgccttggcagtaccggcatgactggcactcagctcgcgagcgcgatgaggccctccgccaggctctggcgtactgcggccgcgagggagaggtgctaagcctgcctaccttgccgcactaccgccggctacagcttaagctgcgctccggtaatcaactgaccatccagtttgatcaggggctttcgtattgggaagccgagcgcagcgaaaagtcttaccagctcaggttcgactttgcatcacgcgagcttggagaagaaatcatggagcacatcaggtgtaaagtttcggcggctggggaggaaaacactcagatattcctctcttcctcttga

SEQ ID NO: 29765 - DNA, 3060 bp, Pseudomonas aeruginosa
ctggtaattgatgggcgtcgtcagtggcgtctgcaaaccactataaaaagtgaaggcaaacgtttcatcggcctggtcgcggtgaatggcggcctgcccatgcgccttgtcgagtcggcacagggcgggttatcccgcctgctacgcatggtcactgagcaggcactggaataccgcctgcaggatgagcgtctgcgccaggccatcgaggcccaggccgagcttttgcccgcctgctaccagcaggcgccggtctacgaactgctcgacagcttggtcaaggcggtgctgcacatccgcaaggcctatgccctgcagagcgcccaagacccaatcgcccggctgcaggaagagtgccctcactgggaagagctcttccccatcgccctcgattcccaggccgccgccagcctgatcaagggtctggtccgggatacagtcagcatcacgccccagtcgcggcggcctcctttccagatccagcgcggcctgcgcttcagttccgatggctccatacccgtctacgagctgtccttcgtgatgcaggctcaggccaggcgcgatcaggttgccgaggcgctggggatggccgtggatgcgctgccgccacacttccagctcctgctgcgcatcggcgagcgggaatacctggtcggcgaagccctgcttagagacgaggaataccagctgatcgccaggccgctgccggccatccacagcctgcacaatgccgcgcagctgatcgtcagccgctggggcgccaccctgcacattgccaacctaccgggcggcgaagccttgagccatgacgagccgctgatcttcgagaatacctacccctttgcccgcctgctcgcccagggcgatgcgctggtcaagggcgagtcggcactggcggccatgccggcaagaaccatcgtgtatgccgaagaaggcgaggctcgcgagctgcatgactgcctggccgacgggcaaatgctgatggaacttcccgccggtaccacccggctcacgtacaaacaacagcccttcgttgtcaccatcagcgccagcgctacccgccacccggaagcctactggcatggcaacagtctggaggcgctctccgtgccggggctgctgttccgtggcacgccgcgcctacgcattgagcagggaacgggcttttccagctatgcgcccgcccatgagctgtttgtccgcacgcagggcaaggagctgccgctcgcccaagcccgggcgccggggctgtgccggctgatctggcgcaaggatggccagcgcctgctgaacacccgcgccgtgcttctcccggacgaagcctccatcacctacgcgccgggcgccactaccctcgagggcagcattcgccttcaccactggcctgatgtgcccgtgcgctgcgagagcgaacagatcgcgctggagcgccgccatgatggaacaggcctgaccctgcggctgaagagcaccggcagccggccggccaccacggttccgctgtgcctgcagtggcccgacggcgagcagaagctcactctgcccttccccggctatggcgtcacgctgctgcgcaacgacactcctctcaagctgaatcaggccctgaccatcgaagaactgatcggctgccgcgcggtactgatgtcggctcagggcgccgaaaactggcggattcgcctgacctccagcggcaccgactcacgctccaccctgtcgcaggaaattcgctacaccgggatccgcgaaatccgtctgttcgagctgattccggcgatccagcagatgatgtcctgccacccggggctcgatcatgtcgtgcagctagagttgattcatgcccaccagacccacgctcgcctacaggtgggccgctactcgacgcgcatccgcctgcacagccagcgcgagatggcgtcactgaacgatagcggctccgacgttctgcttgagcagccgcatgccgagggtctgatattgggcctgccactggcagaaccggaacatgacccggtcagcctgccgctgcatttttccgaacaggtgttcaccggcagctggctggtcagcctgccagacgatgccgtcggcccttggttgctgtacacctctgccgagtcaccgctacacagccgtgcgaccatcgtgccaccgaccgcgagccaactgtcgaagcccctgaccccgctgcgcgaggcgctctgcgaaggcgatggcgaagagcgcatgcgccagctcagggccgcgctgcgcgccatggccgcagacccgcaggctgatgactggcaaacgctggagctgctgctggatcggctgcaccacctgccgctggccagcctggatatctgccaggcactaatccgcgagccgcaggcgctgaccatggccaccctgctgctggatgatttctccagccgcctggccgagcgcctgccctgcgagctgcccttcgagtggctgctgatcgccccggagcactggttcggcaccttcgcgacactgcgccagcaactggccgccgacaatccgcgcatgctgtcggtaatccgcaacgacatccagagcaagagccagttcctgtcccgctggcagcccgcgctgcgcttcatcttcgatcagggcctgcaccactccttcgatctgcaaagcccggatgtggggttcttcctgaaaaacccggcgatgctcaccgcctcctggcagtcgtacctgtttgatggcgagaactcggccatgcagcagatgttccggcgcaaccccgccgaaacccatcaatatcccggcagcggcaatacggatatcggagccttcctgaaaacgccccacgggcaaatgctcctccgctgctgcaagctcccggccaatgacttcaagctggccacggtcatgctgcccttcatggccgccttcgatacctacgccggccgcgggcagcaatggcaagccgacccgccacgcctgttcagcctcagaaacgctcgccagttcgataccgtctggttcgactcggtctatcaacttggcctggccatggcgcaagccgcctcgatgcagaagtga

SEQ ID NO: 29766 - DNA, 6336 bp, Pseudomonas aeruginosa
atggataagtatttctctgggctagtcgagcaggcgctttcccgtgccactgagtccaccttgagtatcttgagcattaccgatccggacttgcgtgagcacctggaaagtctgatgcgcgcggagtgcgggaaagagggtgcattcctggcgccacccgtgtttgagcagaccttcagctgggaagagtcggcgttcaccatggagcaactggcgagcaaggagcacttgctgagcaaggagatcgtggcctcgctcgatggcaaggcgaatgggcgttaccgctttggcgcgagttggaaacccttcacccaccagttggccagctggcgctcattgctagagaagaagcattcggtggtcgtcaccagtggtaccggctcgggtaagaccgaatgctttatggtgccggtgctggaggatctttatcgcgagtaccgtgacgcagctcgtcagccgctggtcggggttcgggcgctgttcctgtatccacttaacgccctgatcaactcgcagcgcgaacgtttgaatgcctggactcagagctttggaagcggcattcgctattgcctgtacaacggcaatacaccggagttgcaggcgaatgtgcgcagcgagcagagcctaaagcctaacgaaattctgtcgcgcgagctgatgcgtacgcaaccggcgcctattctggtcaccaacggcaccatgctcgaatacataatggtgcgccaggtcgatgcgcccatcgtaagaatctccagagagcagaaatcgctgcgctggattgttctggacgaggctcacacttacgtgggttcccaggcggctgaattggcattgcagctgcgacgggtgatgacagccttcggcgttacgcctaaggatgtccgctttgtggcgacctctgcgactattgccggtgaggacgctgcaggacagttgaagcagtttctctcggatctgtcgggggggccggttacgcagattgatgtctgggggggtaaccgggtcattcctcctcttgccccctgtcaacaaacgctggttgctctggatacgctcgagtccatgccgcctgtaattgcggacgatccagaggttcatccggatcgatacgaggccctggtccattctccgcaagcccgagcactgagaaatctgctggtgaccacccccaagccgttgaagctaaccgagatggtcagccagatgcgtcaggaaggtgggtggtcactgtcacaggacgaaatactacgttggttggatgtgtgttcaggcactcgtctttcagccagtgagccggcgtttctgaagctgcgggcgcacttcttccagcgcactactcacgggttatgggcctgctttgacaagtgctgctcagcaaagtccggaacggcgctgcaacaaaactggccctttggttatgtctacgccaatcagaggcaaacctgcagctgtggcagcccggtattcgagttggcgttctgcaatgactgcaatgagccgcatctgttggcgcgggataagaacggaaagctgatccagtgggaaagctctggtggcgatgaattttccctgcagactgaaacacctgttgaggaagatgcgggggctggtggctcaggggtactttcagtcaagacaccgctggtgctttgctcgttcgaaaatgccggcagcgcatacatccccgttgaggtcgataagttcgctggttcattcgcagctgtttcagctgaacgggtacggtttggggttagagatcttgatgccaagtgcagccacaacagctgtggatttagtgggctgcacggagcttctcctttccgccgcgcaatgctgggcggacccttctatgtagccaatgccgtgccgacagtccttgaatactgtcaagactatcaagaggaagatcagacgccggagcacggtccgcagtctctgcctggcagaggccgtcggctaattacctttacggacagccgccagggcacggcgcgcatggctgtacgtatgcaacaggaggcggagcgcagcaggttgcgcggacttgtcgtggagattttgagctggcaccagcggagccaggccagctctcaggtagattccagccgcatcgatccgtcggttttgcaacaattaatcgccaaggcgaaagaggaagtagagctataccgcagcgttggtatcaaggaggaagtcagggccgcggaggaaaaagttacacggtttacagccatgctagcttcagcaactggagcgaaagttaggccgacgctagtttctctagcttggtcggagctctccaatgagctcaagcagaaggcagacctgaaaggctcgatgctgctttacaacaagtatcagaagcccgagatcttccgggaccatgatggcccctacaagctggcggaaatgttgctgttccgcgagtttatgcgccgcccgaaacggcagaacagtctggaaacccaagggctggtgaaggtcgcatacgttggcatggataaggtccaagaagtgccggcgtactgggggcagaaaggtctgacgctcgatgattggcgtgacttcctaaaggtggcgctggactttcatgttcgggagaacagctatattcaggtcgatgagggctggttgagttggatcggtagccgtttttctgccaagagtctgcgtaatcccgagtcgaaagaagcggatgagatccgggtcaagcgctggcctcagatccgcaatggcaaccattcccagcgcctgatcaaactattgttgcttggcgctggcttgaacccggctaacacggccgacgttgatctggtcaatgcttggctaagagctgcctggttgcagttggccagaccgggctcagcgctgaaggctgacgaaaaccggtactacctacccagagagcacatgctgttctcgttggttgaccgggcctatgtctgtccagttaccaacaagctgttggataccaccttcaaaggctttacgccttacctacccgctcacctggatttctctcagttgactgaagagcagcgcgagagctatcaggcagagccgattgagctacctgacctgtgggagtttgaccgttctcaggacgactatgcgccgggacttgcgcgagttagaaacctggtggcgaatgatcctcttgtaagcgatctacgagcacggaacctgtggacggatatcaatgatcgggtagtggaaggtggcttctattaccgcacagcggagcactcggcccagcagtcttctgaacgcctcggctcctatgaagagatgttcaagaaggggcagctcaacgttctgaactgctccaccaccatggagatgggcgtagatattggcggtatttctgctgtggtcatgaacaatgtaccaccgcacccggccaactacctgcagcgtgccggtcgcgcggggcgaagcaaggaatccagggcgattacctacacgctttgtaagaacaacccgcatgatcagcaggttttcgccaatccgagttggccgttcgagaccaggatccccgcgccagtggtggcattgaactccgagcgactcgtacaacggcacatcaactcgctactgttggcggactttctctgcaatgtggttgggctcactcagactgagaaaaccagtctgaatacgcagtggttctacgacgatgagcacggtctctcacaatgtgaccgattcattgagcggctgggacaagttgtctccgatctggacgacgcgctcaaagacttggtgaaaggcacagctctggtcggtgtggacccggctcagctgcgccgtcgttcaatcgattcgatcaagccgctgcagagtcgttggctgaagagctatcgcttcttactttctgaggagaagctcgcgaaagccaacagcccctatctgaagcgtctccagattgaaaaggctcgccactgcaatgagtatctgttgcgggatcttgctgcgcgtaccttcctgcctggttatggcttccctaccgacgtggtgaacttcgataacttcacgattgaggattacatccgcgagcaggacgcagggaaaaagttgaagcacgatcgcgaggacaacgtatcccgctacaaggggctgccgtcacgcaatctgtcgattgccattcgcgagtacgctcctggtgcagaaatcgttctggatggccgggtgttcaggtctgccggcgtttccctccactggcataacctcaatgctgatagcaaagaagcgcagaaaatggacattgcgtggcgttgcgatgtctgtggcgctctggactatgaggaggggttgataaagaccgatgagctgacttgcagcaatgtcgactgccagtcactgatcaagccccaaaacattcgcaaggtcctgcagccctctggttttgtcaccgatgcttatgagtcggcctccaatgacatccagcatcagaaattcatcccagttgaaaccgcctgggttttcgtcaacgccaacaagactccattgccaaacccggcggttggggcaatggcttatggtgcggatggaaaggtcttccatcacagctcgggcgagcacggaacaggttatgccttgtgcatgagttgtggtcgagctgagtccatgcaaccggatagcgggttcccgcgagacctgtcgccgtctggcgagcactatccgccacgcccgaccaaagaggacaaagatcagaacaacaagcgccttccctgccagggcagcgggagcattcttcctagtgtgagccttggcgctgtagctactactgatgtgtttgaactcaccttgcaccatcccgtgcgcggggagttcattgcagactcagcgcagggaagtgcaattgccatgacgctagcagtggctttgcgggctgcgctggccgagatactgggcgtatctgcttccgaattgggttatgcaactcggccaagcaaactgccaagtggacagtccattcgcgtccttcagcttttcgacgtaatcagcggtggtgcgggctttgccactagcgcgccgctgcatgtcgaggagctgctgcgggggatggtgaagaagctcgattgcaagcattgtgaaactggctgtagtgagtgcctgctggactcccaaacacggcatgatcacgacaagctggatcgcaaggcagcgctcgactggctgggcccagacttcattcatcacgtgggtttgaccgccgaaaacaaactctcattcgccgatggccagtatgcgcctggcagcattgagagcgttctgcgccggctgatcaacgagggtgcaaagagaattactctagtggcctctggtgatgtggcagagtgggatcttcttgctccacagtttcgtaaggcgattcaggcctatgttctggccgacgagctgactgttgagctgctcgtcccggcagatatcactgatggggttcttgtgcaggatctccagcgcctgtcggaccttggagtaaacgtcgggaatgcgatcactgagccaggtgagcatctcgttgcccaggtgtttaaagagagcgaagttgtcacgctggcctcgcgcagcctcgtggcaactgttccaggccgtagctggcatcaaagtgatgagctagtcgtactctcgaagagtcagccggagtttggctggcaggtgatggacctttccagtgcagcgagcgactccttcggcaaggtagcgatcgtcgacatatcaatccacgaggaactcaatgggtcgctgctgcaattcggtgagcgtttctgggagctgcttggcgctcgagatcagcaagttgctgacgtgattgcgactgcgaagatcaacaggctgacctactcagatcgttacattcagaaccccgcggtagttacgatcctgggtgcggttctgaaagatctgaagagccgcatttctgcggatgcggttgtgcaggtgaagacgctattcaaatcaggtcggctgcaaggtcgtaaagccttcgacgactgggccaatcaggacgatttcgagttcttttcacgcaattggctgtcggcaatggttgggcatcaagttgaactgattgtggagtcgtcgaatcgcgaaatccctcatcaccgtaggttggagcttgagtttgaagacggcaggacgctgaaggtccggttcgaccaaggagtggcctattggcaggttcgctttagctcgcatagcgacatgtggtttgactttgatctggctgcccaggatcaactcatgcacatggcctggatagttgaaaccgcacggatacaaaactctgagcagaagtgggcgacggacgtgttggtcgagctaaagagctaa

SEQ ID NO: 29767 - DNA, 3336 bp, Pseudomonas aeruginosa
atgtcgtactccgtaattaagtactcgtcctggctgggaggctttctccagcgtcgtgggctttcagcgcctgatcagcgcggactctatgcgtaccactgcagtctcgaagagtacggagagctgcagcatttgctccgtgagtttgggggctttgatgcggcgttaaaggacccggcagcctgtgcttgtttggtactttttggttcggagtggtatcgccgtgagtaccgcagtgagtatgcctggacctgggacccgatctggaaaactctgggatttaatctgtcgccgggagagctaagcaaggtcatccctaaagggttggaggggtattggaaacgtccccttcatttctacgaagcgggtcatcgggattttctagggtcgctgtttggtgaggggggcttgccctttcaggtattgcgcgagggaggcagccgcttccagtggctgtttgaccgcttgctaaggcagtacgaccagtggcacctgctgggcttcaacaccctacagcaggtggagcagcaactggaaaaggccagtcttcctcaggtgtttgcctcacgtacgtcgatcgaactgattgcgcgtatggtcgatgagcttgtggctctggtccggaattatgggctggcgcaggcggatgagcccgtcgtccgcctggatgctctgaaccccaagtggcgtgaattgttccctctgcctctggataacgagactggcagcgaactcctcaatggtcttttaaagactgcgaccattgagggcaaaaagcgacgccgggatgcgactggatggtcttgtcgacacttttggcatgaggcgcagccggatgtgctcaaggttcaggtctcgatgccggaggaggtggtgcttcgtctgacgacgcagccatctaccacccgttttgagctggccattgtcgaagatggacaggcgattgctgcgcttggacccggctacgcgctggtcgacaacggtgttgcccatatccggctgcgccttcgtgaggtgatcggaaagcggcaggattgcagtgcccaactgagcctggtggctatggcaggtggcatgctgatcgccacccagccgatagagggcagtgcagtggcccttggcgaagtaccgttgggtttcgagccagtgaatgatcgctggcagctgtgcggtcaggcttcattcaatacggctggtgaagagctgctgctggtgctgcccgaaggtgggaagttgaacatggctgcagagggcgaggaagccatcttcagcgatatggcaccggctttttcgctgcatacggtaaaggttcagggcaaggcgcagttccaggttgagagtgatgaactctaccggatacgcacgggacatgcggttggtatgggcttggggctggaactggctggtacccagatcgactggccgaccaagcccgctctgacctttgtcggtctgcctcgtgtgcagtggccgaccgctgctggggaactgcaacagcagggcggtgacctgtacgttgccggcaaacagccgggaagcggcttgttgcaggaggtactcggtacccaatatgtgtcggtgcgcaaccgcagtggcaacgccctgttacgtcgcagggtgggtatcttgccgacggatttccgtgttgagctgcgcagtggtgagaagccggggcaggggagcattttggtgcattcccggcagcgctgcctgctccagattgttgacgacagtctgcaggtacagcaggtaaagcgtgaggatcacaccgagcttaggctctcggcaaagggctttcctccagtcagggtccgcctttcagttacccccagcttgatggctgacccagtggagattgacctgccgtttcccaactcgggttttctggcctttgatggcacaggcaaacatctgaaacgcgatctcagtgtcgacgacctgttgggggcgcgtctgtatctgtttggccgggctggcgcaccaacccgttttagccttgagctgaccctcaggggtagtgcggccaggaatgcttgttacagctggacctacacggtggccgaaaagccgctggagctcagtctgttcaatatccgtgaacagattgttgacctgctttcgcttcagtcgggcattgatcaggtcgtcgagttgcgggtgttcggtaacggtcaggataccagttaccgcatccgtaggtattcgacggagatgcaactggatcgcgaccgtcagatgctgtgtgctgccaatctgcacgatggcgccgacgccattcccgaaccggtgttgatgctgttgcatgatcctatgcgtagctccatcgcgctccgttcccgcaccagcgaaggtgtgcccaccggcgacttcgagttaccgatagctgttgaaagggatggtccctggctggtgttgcccaaatcgggctcatctgtatcgttccggccgctatttatcgctggtggatggaagccgttggcgccgagcgatggaatccagagtctgcaaaaggcagtgttgaccttcgatcatgcttcacctgttagctccttcacgcctgtgttggatgccatggcggttaaccctatgcatagcggctggcagttcttgcgggccttgtatgaagggtacggctatctgcccctggcgaccttcgaggtctggaaggctctggtagggcacacccgcgcgttggcgatggcacttttcaagtttgaaatggaggcgacattccttggccggctggagactgagtttccgattttctgggagtttcttcccattacagaaatccatcttgcggccaagcgcttcgctgcattccttaaggtgaaaggggtcgctgaggaagccattgatgctctgatcggacgaatgttttcgcgattgggggaaacctattcagcctacgggcagagtgtgcagcgcttcctttctggcaagcctgttggcccagagatcaaggtgccgctagcgactttcaagagtgtcctgcatggctggtaccttgagttgattcgcgagcgcagtgaggcaaagtggccggagttcggcggcaagcggctggagcgttggcacagcagccaaggctgctcggtgattgccttcaggtcggaaatggattaccgcaatgcggtgctctatctaccggtattcgccgctgcggtcgcctgtggcaaggctcggttcacagatgcgtttgcggatggcgtcgaggcgattttcttcttgcgccaggtccgcgatttcgattcgaagtggttcaactcgatctatcaatattgcttgttgaacagcgtcatggatatgcagaaggcagagtcggttaatggataa

SEQ ID NO: 29768 - DNA, 6216 bp, Pseudomonas aeruginosa; identical to SEQ ID NO: 29764

SEQ ID NO: 29769 - DNA, 3111 bp, Pseudomonas aeruginosa
ctgtgcgaggcagctggccagagaaaggtagctcatgagaagacccgcagcctggtaattgatgggcgtcgtcagtggcgtctgcaaaccactataaaaagtgaaggcaaacgtttcatcggcctggtcgcggtgaatggcggcctgcccatgcgccttgtcgagtcggcacagggcgggttatcccgcctgctacgcatggtcactgagcaggcactggaataccgcctgcaggatgagcgtctgcgccaggccatcgaggcccaggccgagcttttgcccgcctgctaccagcaggcgccggtctacgaactgctcgacagcttggtcaaggcggtgctgcacatccgcaaggcctatgccctgcagagcgcccaagacccaatcgcccggctgcaggaagagtgccctcactgggaagagctcttccccatcgccctcgattcccaggccgccgccagcctgatcaagggtctggtccgggatacagtcagcatcacgccccagtcgcggcggcctcctttccagatccagcgcggcctgcgcttcagttccgatggctccatacccgtctacgagctgtccttcgtgatgcaggctcaggccaggcgcgatcaggttgccgaggcgctggggatggccgtggatgcgctgccgccacacttccagctcctgctgcgcatcggcgagcgggaatacctggtcggcgaagccctgcttagagacgaggaataccagctgatcgccaggccgctgccggccatccacagcctgcacaatgccgcgcagctgatcgtcagccgctggggcgccaccctgcacattgccaacctaccgggcggcgaagccttgagccatgacgagccgctgatcttcgagaatacctacccctttgcccgcctgctcgcccagggcgatgcgctggtcaagggcgagtcggcactggcggccatgccggcaagaaccatcgtgtatgccgaagaaggcgaggctcgcgagctgcatgactgcctggccgacgggcaaatgctgatggaacttcccgccggtaccacccggctcacgtacaaacaacagcccttcgttgtcaccatcagcgccagcgctacccgccacccggaagcctactggcatggcaacagtctggaggcgctctccgtgccggggctgctgttccgtggcacgccgcgcctacgcattgagcagggaacgggcttttccagctatgcgcccgcccatgagctgtttgtccgcacgcagggcaaggagctgccgctcgcccaagcccgggcgccggggctgtgccggctgatctggcgcaaggatggccagcgcctgctgaacacccgcgccgtgcttctcccggacgaagcctccatcacctacgcgccgggcgccactaccctcgagggcagcattcgccttcaccactggcctgatgtgcccgtgcgctgcgagagcgaacagatcgcgctggagcgccgccatgatggaacaggcctgaccctgcggctgaagagcaccggcagccggccggccaccacggttccgctgtgcctgcagtggcccgacggcgagcagaagctcactctgcccttccccggctatggcgtcacgctgctgcgcaacgacactcctctcaagctgaatcaggccctgaccatcgaagaactgatcggctgccgcgcggtactgatgtcggctcagggcgccgaaaactggcggattcgcctgacctccagcggcaccgactcacgctccaccctgtcgcaggaaattcgctacaccgggatccgcgaaatccgtctgttcgagctgattccggcgatccagcagatgatgtcctgccacccggggctcgatcatgtcgtgcagctagagttgattcatgcccaccagacccacgctcgcctacaggtgggccgctactcgacgcgcatccgcctgcacagccagcgcgagatggcgtcactgaacgatagcggctccgacgttctgcttgagcagccgcatgccgagggtctgatattgggcctgccactggcagaaccggaacatgacccggtcagcctgccgctgcatttttccgaacaggtgttcaccggcagctggctggtcagcctgccagacgatgccgtcggcccttggttgctgtacacctctgccgagtcaccgctacacagccgtgcgaccatcgtgccaccgaccgcgagccaactgtcgaagcccctgaccccgctgcgcgaggcgctctgcgaaggcgatggcgaagagcgcatgcgccagctcagggccgcgctgcgcgccatggccgcagacccgcaggctgatgactggcaaacgctggagctgctgctggatcggctgcaccacctgccgctggccagcctggatatctgccaggcactaatccgcgagccgcaggcgctgaccatggccaccctgctgctggatgatttctccagccgcctggccgagcgcctgccctgcgagctgcccttcgagtggctgctgatcgccccggagcactggttcggcaccttcgcgacactgcgccagcaactggccgccgacaatccgcgcatgctgtcggtaatccgcaacgacatccagagcaagagccagttcctgtcccgctggcagcccgcgctgcgcttcatcttcgatcagggcctgcaccactccttcgatctgcaaagcccggatgtggggttcttcctgaaaaacccggcgatgctcaccgcctcctggcagtcgtacctgtttgatggcgagaactcggccatgcagcagatgttccggcgcaaccccgccgaaacccatcaatatcccggcagcggcaatacggatatcggagccttcctgaaaacgccccacgggcaaatgctcctccgctgctgcaagctcccggccaatgacttcaagctggccacggtcatgctgcccttcatggccgccttcgatacctacgccggccgcgggcagcaatggcaagccgacccgccacgcctgttcagcctcagaaacgctcgccagttcgataccgtctggttcgactcggtctatcaacttggcctggccatggcgcaagccgcctcgatgcagaagtga

SEQ ID NO: 29770 - DNA, 6336 bp, Pseudomonas aeruginosa
atggataagtatttctctggactagttgaacaggcgctttcccgcaccactgagtccaccttgagcatcttgagcatcaccgatccgggcttgcgtgagcatctcggtagtctgatgcgagcggagtgtggcaaagaaggagcattcctggcgccccctctgttcgaacagaccttcggttgggaagagtcttcactcacgatggagcagctggcgagtgatgagcgcttgcttagcaaggagatcattgcttcgctcgacggcaaggcgaatgggcgttatcgctttggggcaagctggaagcctttcacccaccagttggccagctggcgctccttgcttgagaagaagcattcggtagtggtcaccagtggtaccggctcgggcaagaccgaatgctttatggtgccggtgttggaggatctgtatcgcgagtaccatgatgctggccgtaagccgctggtcggtgtccgggcactgttcttgtatccactgaacgctctgatcaactcgcaacgcgagcgtttgaatgcctggacgcagagctttggaagtggcatccgctattgcctttacaatggtaatacaccggagctgcaggccaaggtgcgcagcgagcagagccaaaagcctaacgaaattctgtcgcgcgagctgatgcgctcgcaaccggcgcccattctggtcaccaacggcaccatgctcgaatacatgatggtgcgccaggttgatgcgcccattgtaagaatttccagagagcagaagtcgctgcgctggatcgttctggacgaggcccacacctatgtgggatcgcaggcggctgagttggcattgcagctgcgtagggtgatgacagccttcggcgttacgcccaaggatgtccgcttcgtggcgacttcggcgacgattgccggtgaggatgctgcaggacagctgaagcagtttctctcggatctgtctggggtgccggtcgcgcagattgatgtttggggcgggaaccgggtcatcccttctcttgcaccatgtcaacaaacaccggttgctctggatgcgctcgaatcgatgccggcggtcaacgcgaacgatccagaggttcatcccgaccgatacgatgccctggtgcactctccacaagcccgcgcactgagaaacctgctggtcaccagtcctaaaccattgaagctgaccgagatggttagccatatgcgtcaggagggggaatggtcgctatcgcaaggagaaatactgcgctggttggatgtgtgttcgggcactcgtccttcggctagcgagccggcgtttctgaagttgcgagcgcacttcttccagcgtactactcacgggctgtgggcctgttttgacaaaaactgctcggcaaagtcaggcacggctctgcagcaaagctggccctttggctatgtctacgccaatcaaaggcaaacctgtagctgtggcagcccggtattcgagctggcgttctgcaatgattgcaatgagccgcatctgctcgcacgggataagaacggaaagctaatccagtgggaaagctccgggggggatgagttttccctgcaggctgaaacacccgttgaggaggacgcggcggatgcttctgccgggcagctgtcggccaagacgccgttggtgctgtgttccttcgagaatactggtagcgcctatatccccgttgagatcgataagttcgctggttcattcgcagcagtttctggtgagcgggtacggcttggggtgagggatcttgatgctgtgtgcagccgcaccagttgtggcttgagcgggctgcacggggcgtctccattccgccgcgccatgcttggcggacccttctatgtggccaatgccgtgccgacagttcttgagtactgtcaggactatcaagaagaagatcagaagccggattatgggccccagtctctgccgggtagaggccgtcggctgattacctttacggacagcaggcagggcacggcgcgtatggctgttcgtatgcagcaggaggccgagcgcagcaggttgcgcggacttgtcttggaaattctaagctggcaccagcggagccagaccacctcgtcggcggatgccagcagcctcgacccgtcggtgttacatcaacttattgccaaggcgaaagctgacgtggagttgtaccgcagcattggcatcaaggaggaagccagagccgcagaggaaaaagtcgcacgactctcggccatgctagctgcaactactggatcgaaaattaggccaaagctggtttctctagcctggccggagctcgccaatgagctcaagcagaaggcggacttgaaaggctcgatgctgctttacaacaagtatcagaagcctgagatattcagagacaatgatggcccctacaagctggcggagatgctgctgttccgcgagttcatgcgccgtccgagacggcagaacagtctggaaacccagggactggtgaaggtcgaatacgctggcttggctaaggtccaggaagtgccggcgtgctgggaacagaaaggcctgacgctcgatgattggcgtgacttcctgaaggtggcgctggactttcatgttcgggataacagctatatccaggtcgatgagggctggttgagttggatcggcagccgcttttctgccaagagtctgcgtaatcccgagtcgcaagaatctgatgagatccgggtcaagcgctggcctcagatccgcaacggcaaccattcccagcgactaatcaaactgttgttgcttggtgctggcctgaatccggccagcacggccgacgttgatctggtcaatgcttggctgcgggctgcctggctgcagttgaccagaccgggctcgacgcttaaggctgacgaaaaccgatatttcctgcccagagagcacatgcagttctcgttggttgatcgggcttatgtctgtccggtgaccaacaaactgttggataccaccttcaaaggtcttaccccttacctgcctactcatctggatttctctcggctgactgaagagcagtgtaagcgctatcaggcggagctggttgagctaccaggcctgtgggagtttgaccgttcgcaggacgactatgcgcctggacttgtgcgagttagaaacctggtggcgaacgatcctcttgtcagcgatctgcgagcacgaaacctgtggacagatatcaatgatcgggcagtggagggtggatactactaccgcacagcagagcactctgcccagcagtcttccgagcgcctcggctcctatgaagagatgttcaaaaaggggcagctcaacgtcctgaactgctccactaccatggagatgggcgtggatattggcggtatttctgctgtggtcatgaacaatgtaccgccgcacccggccaactatctgcagcgtgccggtcgtgctgggcgaagtaaggagtccagggcgcttgcctacaccctttgtaaaaacaacccgcatgatcaacaggttttcgccaatccgggttggccgtttgagactaagatccctgcgccagtagtggcgttgaattccgagcgactcgtgcaacggcacgttaactcactactgttggcggactttctctgcaatgtggttggtcctactcagacagagaaaaccagtttgaatacccagtggttctacgacgatgagcacggtgtttctcagtgcgaccggtttattgagcgactgggtcaggttgtctctgatctggatgatgcactgaaggacttggtaaggggcacggctctggccggtgtggacgcggctcagctgcgccgtcgtgcagttgatgcaatcaagccattgcagagtcgctggttgaagaactatcgcttcctgctttctgaggagaagcaggcgaaagccagcagcccttatctgaagcgccttcaaatagaaaagacccgccattgcaatgagtacctgttgcgggactttgcggcgcgtaccttcctgcccggctacggcttccccaccgatgtggttaacttcgataacttcacgatagaggattacgttcgcgagcgagatgcggggagcgctctgaagcaggaccgtgaggacaatgtatcccgatacaagggactgccttcacgcaacctgtcgatagccattcgtgagtacgctcctggcgcagaaattgttctagatggtcgggtgttcagatctgccggtgtttcccttcactggcataacctcaatgcagacagcaaagaggcgcagaaattggacatcgcgtggcgttgtgatgtctgcggcacggtggattatgaggaggcgctggtgaaggccgatgagctgacttgcagcaatgtcgactgtcaggcgctgattaagccccagaacattcgtaaggtcctgcggcccaccggctttgtcactgatgcctatgtgtcggtatccaatgacatccagcatcagaaattcatcccagttgaggctgcctgggttttcgtaaatgccagcaaaaccccgctgccaaacccggcagtcgggtcgatgacttacggtgccgatgggaaggtcttccatcacagctcaggtgagcacggagcaggttttgcgttgtgtatgagttgtggccgagcggagtccatgcagccagatgggacgtttccgcgagacctatcaccgtccggtgaccactatccgccgcgcccgaccaaagaagatagggaccagaacaacaagcgcctcccttgtcagggaagcgggagcattcttcctagcgtgagccttggtgcggtggctactactgatgtatttgagctcaccttgcatcatccagtacgcggtgagtttatttctgactcggcgcagggcagtgtaattgccatgacactcgctgtagctctgcgtgccgccctggctgagatattgggggtatctgcttccgaactgggctatgcaacccgtccaagcaagctgcccagcgggcagtccattcgcgtccttcagcttttcgacgtcatcagcggtggtgcgggctttgctactagcgcgccgttgtatgtcgaacgactgctccgcgagatggtggaaaggctccactgcaagcattgtgaaacaggttgtagcgagtgcgtgctggactctcaaacgcggcatgaccacgacaaactggatcgccaggcagcgctcgactggctaggctcggacttcattcatcacgtggggttgaccgccgaaaacaaactctcctttgctgatggccaatatgcgcctggcagcatcgagagcgttctgcgccggctcatcaatgagggggctgagagggtcactctactgacctctggtgatacggcggagtgggatcttcttgcaccacaattccgtaaggcgattcagacctatgttctggctgatgagctaactgttgatctgctagtgccagcggatatcaacgatggggagctcatgcaggatctccagcgtctgtcgagccttggggttaatgttgggaatgttattactaagccaggtgagcatgtcgttgcccaagcatttatagggggcgaggttattacgctggcctcgcgcagccttttggcaaccgtcccaggctgcagttggcatcaaagcgatgagctagtcgttctctcaagaagtcagccggggctctactggaaagcgatggacctttcccaggcctcgagtggctcctccggtaaggtagggatcgtcgatatatcaattcacgaagagctcaatggggcgttactgcagttcggtgagcgtttctgggagttgcttggcgccagagatcagcaagttgctgaagtgattgcgactgcgaagatcaaccggctgacctactcagatcgttacattcagaaccccgctgtcgtgacgatcctgggggctgttctgaagaatctgaagagtcgcatttctgccgacgcggttgtgcaggtgaagaccctattcaaatcaggtcggatgcaagggcgtaaggcatttgatgactgggcctgccaagatgatttcgagttcttttcacgcaaatggctgtcggccatggttgggtgtcaagttgaactgattgtggagtcgtcgaatcgtgatatccctcatcaccgtaggttggagattgagtttgaagacggcaggacgctgaaggtccggttcgaccaaggtgtcgcttattggcaagttcgcttcagctcgcacagcgacatgtggtttgactttgatctggctgcgcaagatcagctaatgcacatggccagggtggttgagagcgctcggatacagaactctgagcagaagtgggcgacggacgtgttggtcgagctaaaggtctaa

SEQ ID NO: 29771 - DNA, 3330 bp, Pseudomonas aeruginosa
atgtcgtactccgttattaagtactcgtcctggctgggatgctttctccagcgacgtgggctttcagcgcccgatcagcgtggactctatgcgtaccactgtagtcttgaggagtatggcgagctgcagcatttgctccgtgagcttgggggcttcgatgctgcgttaaaggatccagcggcctgtgcctgtttggtgctttttggctcggaatggtaccgccgtgagtaccgcagcgagtacgcctggacctgggacccgatctggaaagctttaggattccgcctgtctccggtagacctgagcaaggctatccctaaaggacttgaggtgtattggaagcgtcctcttcatctctacgaagcaggccaccgcgattttctggggtctctgtttggtgaggggggcttgccctttcaggttttgcgcgaggggggaagccgcttccgatctctatttgaccgtttgctaaagcagtacgaccagtggcacctgctggggctcaacaccctccagcaggtggagcagcaactggaaaaggccagtcttcctcaggtgtttgcctcgcgtacgtcggtggagctgattgcgcgaatggccgatgagctggtggctctggtccggaattatggactgacgcaagcagatgagcctgtcatgcacctagatgccatgaaccccaagtggcgtgaattgtttcctctgccgctggataaccagacgggcaacgaactcctcaatggcctgctgaaaaccgcgaccaacgagggcaaaaggcgtcgccgggatggatggtcatgccagcatttttggcatgaggcgcaggcggatgtgctcaaggttcaggtatcaatgcctgaggtggtggtgtttcgtctgacgacgcagccatccaccactcgttttgagctggtgattgccgaagaggggcaggtgattgctgaccttggtcccggctatgcgttggtggacaacggtgttgcgcacattcgcttgcgcctgcgagaggtgattggcaagcggcgggattgcagtattcctcttagcctggtggctatggccggcggcatgcagatctctaccctgccgatagacagcagtgcggtggcactgggtgaggtgccgctgggcttcgagccaatgaacgaccgctggcagctgtgcggccaggcttcatttaatacggccagcgaagagttgctgctggtgttgcctgacggtggcagtttgggcacggtaggcagcaacgaggaggccattttcagtgatatgcctccagcgttctcgcggcgtacggttaaggtgcagggcaaggtgcaagtcctggttgagggggaagagtgttaccggatacgcacgggccatgccgccggtatggggattgggttggaactgacaggtgcccagactgggtggccgaccaagcccacgatgacctttgtcggcctgccccgtgtgcagtggccgaccgctgctggtgagctgcaacagcagggcggtgatctgtacgttgccggcaagcagccgggtagcggcttgttgcaggagatgctcggtacccagtatgtatcggtgcgcaaccgcaccggcgataccttgctgcgccgcagggtaggcatcttgccgacggatttccgtgttgagctgcgtagtggtgacgcaccggggatgggcagcgttctggtttactctcagcagcgctgcctgcttcaggttaatgacgaaagcctgcaggtacagcagataaggcatgaagcccataccgagcttaggctttcggcaaagggcttccccccgatcagggtccggctttccgttttcccgagcttgatggccgatccggtggaaattgatctgccatttcccagttcgggttgcttggcttttgacggcaacgggaagcagctgaagcgcactttcagtgtcgatgacctactcggggcacgattgtttctgtttggccgatccggtacacccactcgctttggtattgagttgaccctcaggggcagcgtggctagaaatgcttgttacagctggacctacacggtcgtcaacaagccgttagagatcaatcttttcaatatccaggagcagatcgttgatctgctgtcgcttcagtcgggtatcgatcaggttgtcgagatgcgagtgtacggtaatgggcaggatagccattaccgtatccgcaagtatgcgatggaaatgcaactggatcatggtcgccagttactgagtgctgtgaatctgcacgatggcgccgacgctattcccgaaccagtgttgatgctgctgcatgatcctatgcgtaactctatcgcacttcgttcacgcgccagtgaaggtgtacctacaggtgacttcgaattaccggcagccgttgagagggacggcccctggctagtgctacctagggcaggctcatcggcatcctttcggccgctctttgttgcgggtggctggcagccattggcgtctgacgacatgatccagagtctgcaaaaggcagtgctgaccttcgatcatgcttcacctgtcagttctttcttgcccgtgctggatgccatggcgacaaaccccatgcatagcggctggcagtttttgcgggctttgtatgaggggtacggttatctgccgctggcgaccttcgaagtctggaagacattggtggggcatacccgcgcactggcgatggcgcttttcaagtttgagatggatgcgaaattccttggccgcctggaggctgagttcccgcttttctgggagtttcttcccattgcagaaatccatcttgcggcaaagcgtttcgcggcattccttaaagtaaagggagttgctgaggaggctgttgatagcctgatcgggcgaatgttttcgaaattgggggaaacctatccgtcttacggtcagagtgtgcaacgcttcctttcaggcaagcctgttggcccggagatcaaggtgcctctagcggttttcaaggacgtcctgcatggctggtaccttgagttgattcgtgagcgcagcgaggcccagtggccggagttcggcggcaagcgcctggagcgttggtacaacagccaaagcgactcggtaatcgcttttaggtcggatatggattatcgcaatgcagtgctatacctgccggtttttgctgctgcagtcgcctgtggcaaagcccagttcaccgatgtatttacggacggagtggaggcgattttcttcctgcgccgagtccgcgatttcgattcgaaatggttcaactcaatctatcagtattgcttgttgaacagcgtcatggaaatgcataaggccgagtcggttaatggataa

SEQ ID NO: 29772 - DNA, 6216 bp, Pseudomonas aeruginosa
atgctctatcagaagaactatttctccgctctcaccggcaacctgagcacccgcagcgagcgcgccgcccagggcctgctcagtctaggcaatccgcagctgcggcagttcctgcatgatcagctgaccgccgcccccggcactccgggcgcctggctggccgacccggtcttcgaaccgaccttcggctggcaggaaagctctgaaaccatgagttcgctggccggcggtgacctactacaccgacgccttgccgaagccatggcggccccgcccaaggagccccatgatcttgcagaggaatatgccttccccagcaatcgccatcctttcacccaccagttggcggcctgggagattctcaaccgtcccgagccgcaatcgctggtggtgaccagcggcaccggctcgggcaagaccgaatgcttcctggtgccggtcctcaaccagctggccaaggccatcgacgcgggcgaagacccggaaggcgttcgcgccctgttcatctatccgctgaacgcgctgatcaactcgcagcagaaccgcctggatgcctggacagacggcttcggcgggcagattcgccactgcctgtacaccggcgcgctggagaatgagcgcaagacgtccgaccagcagtacaagggtcaggtgatcgaccgcaagagcctgcgcgccagcccgccgcaactgctggtgaccaacgcgaccatgctggagtacatgctcatccgcaaggatgatgagccgatcctgcagaagtcggccggcaagctgcgctggatcattctggacgaggcgcacactcacatcggctcccaggccgcggagatggcgctgctgctgcgccgggtgatgctggccttccaggtcaaaccgcaggatgtgcgcttcgtggcgacctcggccaccttcggctcggatacccagaccatcgagagcctgcgcaccttcctcgccgatatcggcggagtggatccgcagcaggtgcatgtcgtgcagggtcatcgggatatcccggcgctgctgaacgccacgcccgatgccgagcaggacacccctgaagccatcggcgccatcgaggcggaccaggagcagtcgacgctgcgctaccggcgtctggaggccagccccaccgctcggcggctgcgcgccctgttcatgcctgatggccaggtgaaaccacaaagcctgcaagggctgatccgtgagtccggtctaccctcggcgcaggtgctcgcctggctggatctgctgtccggcaccaagagtgccgagggcctgtccttcctgccgctgcgcgcacacctgttccataacgtgattccggcaatccgcgcctgcgtggaccgccactgcagccacaaggccggcaccgcgctggcacatgccgactggccgttcggcatggtctatctggaggagcggactcactgccgctgcggcgcgccgctgatgccactggtgtcctgcgaggagtgcaacgagagcttcctgcaggcggccaccaaaagcagtagcagtgctctggtcgatccgacacagcaacaggacgacgagttcgctctcgaagatgaaaccacggaggccgatgatcagaccaaggataaggatactgtgtcatccatccagatcctgatcaccaatcgcgccgtcaagaatggcagtgcagacttcctcgatcgcgccactcaccgactgacgcccaatcgtccggcggatggtggcatcgagctgcagctcttccgcactgccaagaacgaatgcccctgctgtggcgccaatatccagggccgcagcctgctgcgccccacgcgcatcggtacgcccttcaccctcagcacggtgatcggcaccctgctggagttctgcccgccggatccgatgccgaccggcaagccgttccagggccgcaagctgatctccttcaccgacagccgccagggcaccgcacggattgccatcaagctgcagcaggactccgagcgcaaccggattcgcgggctgatctatcagcgcctgctgcaggcacaacccgtcaatgggctgtccgcagaggacttgcaggacctgcaagaccttcaaacagcaacgcaactgagtcgtatcgagcagaaacacctgcagtctttgctcgacaggcaggctgaagctacaaagggcgcggaaataagctggacagatatggccaaccatctggccggcacgcctgagctacagatgggcatgctcgactactacaacaacctcgcgccgaacaccttcggcaagcaggacagtgtcgccctggccagcatgctgctggcgcgcgagttctatcgccgcccgaagcgcgccaacagcttggaaaccctgggcctggtacaggtctgctatcccaagctggccaacgtcaccggcaaacccatggcctggcccgcgcacctggatgccgagtcttggcgtacctacctgaaagtgctgctggacttcttcgtccgcgaaaacaccatcctgaacatcaacgaacgctggcagtcactgatcggcgcacgcattcgccccaaatgggtagttgcgccggtcttgggggaaaagcctgaaaagctgcagagccgctttgtccgctggccggcggtcaataccgtcaatggcatccagtcgcgggccatcctgctgctctgcaaggcgttcaactggtcgaccgcggcccatcaggaccagatcgactcgatcctgagcgaggcctggcgggtactgacccagcaggcaaagctgctgatttcgtcaggcgacggctatcagctcgacctcaaggacctgagcttccggctgcccgaaacggtctaccagtgcccggtatcgcggcgcttcatcgacaccccgttcgagcagctcagtccctatacgccacgtaccgaccgcgagatggtcgtcaaggtgacgccctacactctgccgcgtccgcccgaggcgctcctgcatgtgccgggtgatgagggcctgctggcgatccgcgactggctgaacagcgagccgcagatccagcagctgcgcaaggacgcgctctggtcggacgtcatggaccgggtcatcgaggggggccactacttccgtgccgccgagcactcggcgcagcagccgaagagcaagctggacagctacgaaggcctgttcaagaccggcaggctgaacctgctgagctgctcgaccaccatggaaatgggcgtggacatcggcggcatcagcgtggtggcgatgaacaacgtgcccccgcacccggccaactacctgcagcgtgccggccgtgccgggcgccgccgcgagggacgctcgctggccctggccgtctgcaagaacaccccgcacgaccagagcgtgttcaacaacccgctctggccgttcaacacgcccatgcgcatgcccaaggtgtccctgcagagccccgatctggtacagcgccacgtcaatgcctggctgctgtcgcactggctcaagcacgtggtcgccgcccaggaaatcaagtcgatgaccgccggtgccttcttcctcgacggcgaactgcctatgtcgctggccgcgcgtttctgcctgtggtgcgacaaccaggcggtcgataccgaaacgctggtgggacaggccctcaaggacatcacccgccgcagcatcctcgacaccaccccgcagcccgagctgttcaagcatgccagccgccgcatgaaagagatcatgcaggcatggcagcaggaatactcggccagccacgcccagctgctgcagattgccgacaagaaggccgctgcctaccgcgccatggatgcacagctcagccgcatcgcgaaggagtacctgctcagcgagctggctgaccggcgcttcctgccgggctacggcttcccgaccgacatcgtcagcttcgacaaccgctgcatgcagaccttgaagcgggaggacggcgaccagcgcgaggacaaccgcgcccgttaccgctcgctggcttcccgcgaccgcatcaccggcctgcgcgaatatgcgccgggcgccgagctggtcatggatgggctggtctacaagtcctccggcatcaccctgaactggcacgctcccgcgtctgccgaaaacgtcaaggagcttcagctgttcaagaaggcctggcgctgtgggcaatgcggtgccagtgactcggccatcaatcccggactggagatcaactgccaggaatgcggcgcgccgatcgagcgcgacaacatccgtgaatacctggtgcctgcaggctttgccgtggacttcttcgacgagccgcacaacgacatcagccgcctgcagtatgtgccggtcaatgcgccctggctgaacgtgccggccagctgggtctgcctggccaacccggcactcggccagttccgcgccagccagcaggcgcagctgttcaactacacctcgggcgccaaccagaagggctttgccatctgcctggagtgcggcaaggccgagcccatgctgagctatcccgatgcatccgcccctgccaatgaacagtatctgccggctattttccgccagaaggcacagcaccgccgcctgcgcggtggcaaaagcaatgaacaaggcgacgggacaaacatctgccccggcagccacaacagctggaagatcaaacagaacgtccaccttggccatgacagcctgaccgatgcgctggaactggtgctgcgcaaccctaccagcggcgaactgctcaacgacgatatcaccgcctactcgattgccgtggcgctgcgcgaggcgattgccgccgatctgggcatacaaaccgaagagctgggctgcgcaagccatccgatcaaggtcgatggccagccaacccgcgccatccaggtgttcgacctgcgcagcggtggctacaccacccaggccgcggagcggctgaatgaagccagcctgtggcgaaaggtcatcgctcgtctggacagctgcaactgctcgcatgcctgccagaactgcctactcagtttcgatacccgcttcgaggccgagcgcctcaatcgtcacgtcgcgctggagtggatcaatcagacttggcttgccggcctggcgctgcccgccgagatcgctgtctttggtccgaaaagccaggcagaaatcgccactctacaggaagcggtcgaaagagcgattactagggacgacaacgcgaagaccgtagccatttacttcactgcacccgccgaagagtgggatcttgctgtcgcacgccgcctgaggcatcaactgcatagctgggaaagcgtcggacacctagtgcaattacatttactggaaagtaccgtttccagcctgccaagagaccaaaaggaatggttggcaaagctagccttcaacggagtacagatatgcctacacaattccataccggatctcggggcgctggcactcaatgtctcactgcaaggcccacaaggctgcattgcctgggctagcgacaatacgaacctggccgcacctggccacacatgggatctagcggaggccggtgcacggatcatccgaggcaccccctccgacctcaaggcagagcgcatcttgaatgctgccgatctcatgccggccccaccccctggcttgatcaagatcgagatcggcaatcagctggatggctcgctcgacaactttgctcgtcggttctgggagcacctaggtactgaggccaatggcctgattaatgatgccctcacaggcaaggatccaattacagaactggtttacagcgaccgttacgtatgcagcccgctagttgtgaatctgctggtcagcgtgatccacgagctcggacggctgagtgatgcagatttcgctatccgaatcctaggccgacaatatcagcgggaagacaatcgctcgccttggcagtaccggcatgactggcactcagctcgcgagcgcgatgaggccctccgccaggctctggcgtactgcggccgcgagggagaggtgctaagcctgcctaccttgccgcactaccgccggctacagcttaagctgcgctccggtaatcaactgaccatccagtttgatcaggggctttcgtattgggaagccgagcgcagcgaaaagtcttaccagctcaggttcgactttgcatcacgcgagcttggagaagaaatcatggagcgcatcaggtgtaaagtttcggcggctggggaggaaaacactcagatattcctctcttcctcttga

SEQ ID NO: 29773 - DNA, 3111 bp, Pseudomonas aeruginosa; identical to SEQ ID NO: 29769

SEQ ID NO: 29774 - DNA, 6216 bp, Pseudomonas aeruginosa
atgctctatcagaagaactatttctccgctctcaccggcaacctgagcacccgcagcgagcgcgccgcccagggcctgctcagtctaggcaatccgcagctgcggcagttcctgcatgatcagctgaccgccgcccccggcactccgggcgcctggctggccgacccggtcttcgaaccgaccttcggctggcaggaaagctctgaaaccatgagttcgctggccggcggtgacctactacaccgacgccttgccgaagccatggcggccccgcccaaggagccccatgatcttgcagaggaatatgccttccccagcaatcgccatcctttcacccaccagttggcggcctgggagattctcaaccgtcccgagccgcaatcgctggtggtgaccagcggcaccggctcgggcaagaccgaatgcttcctggtgccggtcctcaaccagctggccaaggccatcgacgcgggcgaagacccggaaggcgttcgcgccctgttcatctatccgctgaacgcgctgatcaactcgcagcagaaccgcctggatgcctggacagacggcttcggcgggcagattcgccactgcctgtacaccggcgcgctggagaatgagcgcaagacgtccgaccagcagtacaagggtcaggtgatcgaccgcaagagcctgcgcgccagcccgccgcaactgctggtgaccaacgcgaccatgctggagtacatgctcatccgcaaggatgatgagccgatcctgcagaagtcggccggcaagctgcgctggatcattctggacgaggcgcacactcacatcggctcccaggccgcggagatggcgctgctgctgcgccgggtgatgctggccttccaggtcaaaccgcaggatgtgcgcttcgtggcgacctcggccaccttcggctcggatacccagaccatcgagagcctgcgcaccttcctcgccgatatcggcggagtggatccgcagcaggtgcatgtcgtgcagggtcatcgggatatcccggcgctgctgaacgccacgcccgatgccgagcaggacacccctgaagccatcggcgccatcgaggcggaccaggagcagtcgacgctgcgctaccggcgtctggaggccagccccaccgctcggcggctgcgcgccctgttcatgcctgatggccaggtgaaaccacaaagcctgcaagggctgatccgtgagtccggtctaccctcggcgcaggtgctcgcctggctggatctgctgtccggcaccaagagtgccgagggcctgtccttcctgccgctgcgcgcacacctgttccataacgtgattccggcaatccgcgcctgcgtggaccgccactgcagccacaaggccggcaccgcgctggcacatgccgactggccgttcggcatggtctatctggaggagcggactcactgccgctgcggcgcgccgctgatgccactggtgtcctgcgaggagtgcaacgagagcttcctgcaggcggccaccaaaagcagtagcagtgctctggtcgatccgacacagcaacaggacgacgagttcgctctcgaagatgaaaccacggaggccgatgatcagaccaaggataaggatactgtgtcatccatccagatcctgatcaccaatcgcgccgtcaagaatggcagtgcagacttcctcgatcgcgccactcaccgactgacgcccaatcgtccggcggatggtggcatcgagctgcagctcttccgcactgccaagaacgaatgcccctgctgtggcgccaatatccagggccgcagcctgctgcgccccacgcgcatcggtacgcccttcaccctcagcacggtgatcggcaccctgctggagttctgcccgccggatccgatgccgaccggcaagccgttccagggccgcaagctgatctccttcaccgacagccgccagggcaccgcacggattgccatcaagctgcagcaggactccgagcgcaaccggattcgcgggctgatctatcagcgcctgctgcaggcacaacccgtcaatgggctgtccgcagaggacttgcaggacctgcaagaccttcaaacagcaacgcaactgagtcgtatcgagcagaaacacctgcagtctttgctcgacaggcaggctgaagctacaaagggcgcggaaataagctggacagatatggccaaccatctggccggcacgcctgagctacagatgggcatgctcgactactacaacaacctcgcgccgaacaccttcggcaagcaggacagtgtcgccctggccagcatgctgctggcgcgcgagttctatcgccgcccgaagcgcgccaacagcttggaaaccctgggcctggtacaggtctgctatcccaagctggccaacgtcaccggcaaacccatggcctggcccgcgcacctggatgccgagtcttggcgtacctacctgaaagtgctgctggacttcttcgtccgcgaaaacaccatcctgaacatcaacgaacgctggcagtcactgatcggcgcacgcattcgccccaaatgggtagttgcgccggtcttgggggaaaagcctgaaaagctgcagagccgctttgtccgctggccggcggtcaataccgtcaatggcatccagtcgcgggccatcctgctgctctgcaaggcgttcaactggtcgaccgcggcccatcaggaccagatcgactcgatcctgagcgaggcctggcgggtactgacccagcaggcaaagctgctgatttcgtcaggcgacggctatcagctcgacctcaaggacctgagcttccggctgcccgaaacggtctaccagtgcccggtatcgcggcgcttcatcgacaccccgttcgagcagctcagtccctatacgccacgtaccgaccgcgagatggtcgtcaaggtgacgccctacactctgccgcgtccgcccgaggcgctcctgcatgtgccgggtgatgagggcctgctggcgatccgcgactggctgaacagcgagccgcagatccagcagctgcgcaaggacgcgctctggtcggacgtcatggaccgggtcatcgaggggggccactacttccgtgccgccgagcactcggcgcagcagccgaagagcaagctggacagctacgaaggcctgttcaagaccggcaggctgaacctgctgagctgctcgaccaccatggaaatgggcgtggacatcggcggcatcagcgtggtggcgatgaacaacgtgcccccgcacccggccaactacctgcagcgtgccggccgtgccgggcgccgccgcgagggacgctcgctggccctggccgtctgcaagaacaccccgcacgaccagagcgtgttcaacaacccgctctggccgttcaacacgcccatgcgcatgcccaaggtgtccctgcagagccccgatctggtacagcgccacgtcaatgcctggctgctgtcgcactggctcaagcacgtggtcgccgcccaggaaatcaagtcgatgaccgccggtgccttcttcctcgacggcgaactgcctatgtcgctggccgcgcgtttctgcctgtggtgcgacaaccaggcggtcgataccgaaacgctggtgggacaggccctcaaggacatcacccgccgcagcatcctcgacaccaccccgcagcccgagctgttcaagcatgccagccgccgcatgaaagagatcatgcaggcatggcagcaggaatactcggccagccacgcccagctgctgcagattgccgacaagaaggccgctgcctaccgcgccatggatgcacagctcagccgcatcgcgaaggagtacctgctcagcgagctggctgaccggcgcttcctgccgggctacggcttcccgaccgacatcgtcagcttcgacaaccgctgcatgcagaccttgaagcgggaggacggcgaccagcgcgaggacaaccgcgcccgttaccgctcgctggcttcccgcgaccgcatcaccggcctgcgcgaatatgcgccgggcgccgagctggtcatggatgggctggtctacaagtcctccggcatcaccctgaactggcacgctcccgcgtctgccgaaaacgtcaaggagcttcagctgttcaagaaggcctggcgctgtgggcaatgcggtgccagtgactcggccatcaatcccggactggagatcaactgccaggaatgcggcgcgccgatcgagcgcgacaacatccgtgaatacctggtgcctgcaggctttgccgtggacttcttcgacgagccgcacaacgacatcagccgcctgcagtatgtgccggtcaatgcgccctggctgaacgtgccggccagctgggtctgcctggccaacccggcactcggccagttccgcgccagccagcaggcgcagctgttcaactacacctcgggcgccaaccagaagggctttgccatctgcctggagtgcggcaaggccgagcccatgctgagctatcccgatgcatccgcccctgccaatgaacagtatctgccggctattttccgccagaaggcacagcaccgccgcctgcgcggtggcaaaagcaatgaacaaggcgacgggacaaacatctgccccggcagccacaacagctggaagatcaaacagaacgtccaccttggccatgacagcctgaccgatgcgctggaactggtgctgcgcaaccctaccagcggcgaactgctcaacgacgatatcaccgcctactcgattgccgtggcgctgcgcgaggcgattgccgccgatctgggcatacaaaccgaagagctgggctgcgcaagccatccgatcaaggtcgatggccagccaacccgcgccatccaggtgttcgacctgcgcagcggtggctacaccacccaggccgcggagcggctgaatgaagccagcctgtggcgaaaggtcatcgctcgtctggacagctgcaactgctcgcatgcctgccagaactgcctactcagtttcgatacccgcttcgaggccgagcgcctcaatcgtcacgtcgcgctggagtggatcaatcagacttggcttaccggcctggcgctgcccgccgagctcgctgtctttggtccgaaaagccaggcagaaatcgccactctacaggaagcggtcgaaagagcgattactagggacgacaacgcgaagaccgtagccatttacttcactgcacccgccgaagagtgggatcttgctgtcgcacgccgcctgaggcatcaactgcatagctgggaaagcgtcggacacctagtgcaattacatttactggaaagtaccgtttccagcctgccaagagaccaaaaggaatggttggcaaagctagccttcaacggagtacagatatgcctacacaattccataccggatctcggggcgctggcactcaatgtctcactgcaaggcccacaaggctgcattgcctgggctagcgacaatacgaacctggccgcacctggccacacatgggatctagcggaggccggtgcacggatcatccgaggcaccccctccgacctcaaggcagagcgcatcttgaatgctgccgatctcatgccggccccaccccctggcttgatcaagatcgagatcggcaatcagctggatggctcgctcgacaactttgctcgtcggttctgggagcacctaggtactgaggccaatggcctgattaatgatgccctcacaggcaaggatccaattacagaactggtttacagcgaccgttacgtatgcagcccgctagttgtgaatctgctggtcagcgtgatccacgagctcggacggctgagtgatgcagatttcgctatccgaatcctaggccgacaatatcagcgggaagacaatcgctcgccttggcagtaccggcatgactggcactcagctcgcgagcgcgatgaggccctccgccaggctctggcgtactgcggccgcgagggagaggtgctaagcctgcctaccttgccgcactaccgccggctacagcttaagctgcgctccggtaatcaactgaccatccagtttgatcaggggctttcgtattgggaagccgagcgcagcgaaaagtcttaccagctcaggttcgactttgcatcacgcgagcttggagaagaaatcatggagcgcatcaggtgtaaagtttcggcggctggggaggaaaacactcagatattcctctcttcctcttga

SEQ ID NO: 29775 - DNA, 3111 bp, Pseudomonas aeruginosa; identical to SEQ ID NO: 29769

SEQ ID NO: 29776 - DNA, 6336 bp, Pseudomonas aeruginosa
atggataagtatttctctgggctagtcgagcaggcgctttcccgtgccactgagtccaccttgagtatcttgagcattaccgatccggacttgcgtgagcacctggaaagtctgatgcgcgcggagtgcgggaaagagggtgcattcctggcgccacccgtgtttgagcagaccttcagctgggaagagtcggcgttcaccatggagcaactggcgagcaaggagcacttgctgagcaaggagatcgtggcctcgctcgatggcaaggcgaatgggcgttaccgctttggcgcgagttggaaacccttcacccaccagttggccagctggcgctcattgctagagaagaagcattcggtggtcgtcaccagtggtaccggctcgggtaagaccgaatgctttatggtgccggtgctggaggatctttatcgcgagtaccgtgacgcagctcgtcagccgctggtcggggttcgggcgctgttcctgtatccacttaacgccctgatcaactcgcagcgcgaacgtttgaatgcctggactcagagctttggaagcggcattcgctattgcctgtacaacggcaatacaccggagttgcaggcgaatgtgcgcagcgagcagagcctaaagcctaacgaaattctgtcgcgcgagctgatgcgtacgcaaccggcgcctattctggtcaccaacggcaccatgctcgaatacataatggtgcgccaggtcgatgcgcccatcgtaagaatctccagagagcagaaatcgctgcgctggattgttctggacgaggctcacacttacgtgggttcccaggcggctgaattggcattgcagctgcgacgggtgatgacagccttcggcgttacgcctaaggatgtccgctttgtggcgacctctgcgactattgccggtgaggacgctgcaggacagttgaagcagtttctctcggatctgtcgggggggccggttacgcagattgatgtctgggggggtaaccgggtcattcctcctcttgccccctgtcaacaaacgctggttgctctggatacgctcgagtccatgccgcctgtaattgcggacgatccagaggttcatccggatcgatacgaggccctggtccattctccgcaagcccgagcactgagaaatctgctggtgaccacccccaagccgttgaagctaaccgagatggtcagccagatgcgtcaggaaggtgggtggtcactgtcacaggacgaaatactacgttggttggatgtgtgttcaggcactcgtctttcagccagtgagccggcgtttctgaagctgcgggcgcacttcttccagcgcactactcacgggttatgggcctgctttgacaagtgctgctcagcaaagtccggaacggcgctgcaacaaaactggccctttggttatgtctacgccaatcagaggcaaacctgcagctgtggcagcccggtattcgagttggcgttctgcaatgactgcaatgagccgcatctgttggcgcgggataagaacggaaagctgatccagtgggaaagctctggtggcgatgaattttccctgcagactgaaacacctgttgaggaagatgcgggggctggtggctcaggggtactttcagtcaagacaccgctggtgctttgctcgttcgaaaatgccggcagcgcatacatccccgttgaggtcgataagttcgctggttcattcgcagctgtttcagctgaacgggtacggtttggggttagagatcttaatgccaagtgcagccacaacagctgtggatttagtgggctgcacggagcttctcctttccgccgcgcaatgctgggcggacccttctatgtagccaatgccgtgccgacagtccttgaatactgtcaagactatcaagaggaagatcagacgccggagcacggtccgcagtctctgcctggcagaggccgtcggctaattacctttacggacagccgccagggcacggcgcgcatggctgtacgtatgcaacaggaggcggagcgcagcaggttgcgcggacttgtcgtggagattttgagctggcaccagcggagccaggccagctctcaggtagattccagccgcatcgatccgtcggttttgcaacaattaatcgccaaggcgaaagaggaagtagagctataccgcagcgttggtatcaaggaggaagtcagggccgcggaggaaaaagttacacggtttacagccatgctagcttcagcaactggagcgaaagttaggccgacgctagtttctctagcttggtcggagctctccaatgagctcaagcagaaggcagacctgaaaggctcgatgctgctttacaacaagtatcagaagcccgagatatttcgggaccatgatggcccctacaagctggcggaaatgttgctgttccgcgagtttatgcgccgcccgaaacggcagaacagtctggaaacccaagggctggtgaaggtcgcatacgttggcatggataaggtccaagaagtgccggcgtactgggggcagaaaggtctgacgctcgatgattggcgtgacttcctaaaggtggcgctggactttcatgttcgggagaacagctatattcaggtcgatgagggctggttgagttggatcggtagccgtttttctgccaagagtctgcgtaatcccgagtcgaaagaagcggatgagatccgggtcaagcgctggcctcagatccgcaatggcaaccattcccagcgcctgatcaaactattgttgcttggcgctggtttgaacccggctaacacggccgacgttgatctggtcaatgcttggctaagagctgcctggttgcagttggccagaccgggctcagcgctgaaggctgacgaaaaccggtactacctacccagagagcacatgctgttctcgttggttgaccgggcctatgtctgtccagttaccaacaagctgttggataccaccttcaaaggctttacgccttacctacccgctcacctggatttctctcagttgactgaagagcagcgcgagagctatcaggcagagccgattgagctacctgacctgtgggagtttgaccgttctcaggacgactatgcgccgggacttgcgcgagttagaaacctggtggcgaatgatcctcttgtaagcgatctacgagcacggaacctgtggacggatatcaatgatcgggtagtggaaggtggcttctattaccgcacagcggagcactcggcccagcagtcttctgaacgcctcggctcctatgaagagatgttcaagaaggggcagctcaacgttctgaactgctccaccaccatggagatgggcgtagatattggcggtatttctgctgtggtcatgaacaatgtaccaccgcacccggccaactacctgcagcgtgccggtcgcgcggggcgaagcaaggaatccagggcgattacctacacgctttgtaagaacaacccgcatgatcagcaggttttcgccaatccgagttggccgttcgagaccaggatccccgcgccagtggtggcattgaactccgagcgactcgtacaacggcacatcaactcgctactgttggcggactttctctgcaatgtggttgggctcactcagactgagaaaaccagtctgaatacgcagtggttctacgacgatgagcacggtctctcacaatgtgaccgattcattgagcggctgggacaagttgtctccgatctggacgacgcgctcaaagacttggtgaaaggcacagctctggtcggtgtggacccggctcagctgcgccgtcgttcaatcgattcgatcaagccgctgcagagtcgttggctgaagagctatcgcttcttactttctgaggagaagcacgcgaaagccaacagcccctatctgaagcgtctccagattgaaaaggctcgccactgcaatgagtatctgttgcgggatcttgctgcgcgtaccttcctgcctggttatggcttccctaccgacgtggtgaacttcgataacttcacgattgaggattacatccgcgagcaggacgcagggaaaaagttgaagcacgatcgcgaggacaacgtatcccgctacaaggggctgccgtcacgcaatctgtcgattgccattcgcgagtacgctcctggtgcagaaatcgttctggatggccgggtgttcaggtctgccggcgtttccctccactggcataacctcaatgctgatagcaaagaagcgcagaaaatggacattgcgtggcgttgcgatgtctgtggcgctctggactatgaggaggggttgataaagaccgatgagctgacttgcagcaatgtcgactgccagtcactgatcaagccccaaaacattcgcaaggtcctgcagccctctggttttgtcaccgatgcttatgagtcggcctccaatgacatccagcatcagaaattcatcccagttgaaaccgcctgggttttcgtcaacgccaacaagactccattgccaaacccggcggttggggcaatggcttatggtgcggatggaaaggtcttccatcacagctcgggcgagcacggaacaggttatgccttgtgcatgagttgtggtcgagctgagtccatgcaaccggatagcgggttcccgcgagacctgtcgccgtctggcgagcactatccgccacgcccgaccaaagaggacaaagatcagaacaacaagcgccttccctgccagggcagcgggagcattcttcctagtgtgagccttggcgctgtagctactactgatgtgtttgaactcaccttgcaccatcccgtgcgcggggagttcattgcagactcagcgcagggaagtgcaattgccatgacgctagcagtggctttgcgggctgcgctggccgagatactgggcgtatctgcttccgaattgggttatgcaactcggccaagcaaactgccaagtggacagtccattcgcgtccttcagcttttcgacgtaatcagcggtggtgcgggctttgccactagcgcgccgctgcatgtcgaggagctgctgcgggggatggtgaagaagctcgattgcaagcattgtgaaactggctgtagtgagtgcctgctggactcccaaacacggcatgatcacgacaagctggatcgcaaggcagcgctcgactggctgggcccagacttcattcatcacgtgggtttgaccgccgaaaacaaactctcattcgccgatggccagtatgcgcctggcagcattgagagcgttctgcgccggctgatcaacgagggtgcaaagagaattactctagtggcctctggtgatgtggcagagtgggatcttcttgctccacagtttcgtaaggcgattcaggcctatgttctggccgacgagctgactgttgagctgctcgtcccggcagatatcactgatggggttcttgtgcaggatctccagcgcctgtcggaccttggagtaaacgtcgggaatgcgatcactgagccaggtgagcatctcgttgcccaggtgtttaaagagagcgaagttgtcacgctggcctcgcgcagcctcgtggcaactgttccaggccgtagctggcatcaaagtgatgagctagtcgtactctcgaagagtcagccggagtttggctggcaggtgatggacctttccagtgcagcgagcgactccttcggcaaggtagcgatcgtcgacatatcaatccacgaggaactcaatgggtcgctgctgcaattcggtgagcgtttctgggagctgcttggcgctcgagatcagcaagttgctgacgtgattgcgactgcgaagatcaacaggctgacctactcagatcgttacattcagaaccccgcggtagttacgatcctgggtgcggttctgaaagatctgaagagccgcatttctgcggatgcggttgtgcaggtgaagacgctattcaaatcaggtcggctgcaaggtcgtaaagccttcgacgactgggccaatcaggacgatttcgagttcttttcacgcaattggctgtcggcaatggttgggcatcaagttgaactgattgtggagtcgtcgaatcgcgaaatccctcatcaccgtaggttggagcttgagtttgaagacggcaggacgctgaaggtccggttcgaccaaggagtggcctattggcaggttcgctttagctcgcatagcgacatgtggtttgactttgatctggctgcccaggatcaactcatgcacatggccaggatagttgaaaccgcacggatacaaaactctgagcagaagtgggcgacggacgtgttggtcgagctaaagagctaa

SEQ ID NO: 29777 - DNA, 3336 bp, Pseudomonas aeruginosa
atgtcgtactccgtaattaagtactcgtcctggctgggacgctttctccagcgtcgtgggctttcagcgcctgatcagcgcggactctatgcgtaccactgcagtctcgaagagtacggagagctgcagcatttgctccgtgagtttgggggctttgatacggcgttaaaggacccggcagcctgtgcttgtttggtactttttggttcggagtggtatcgccgtgagtaccgcagtgagtatgcctggacctgggacccgatctggaaaactctgggatttaatctgtcgccgggagagctaagcaaggtcatccctaaagggttggaggggtattggaaacgtccccttcatttctacgaagcgggtcatcgggattttctagggtcgctgtttggtgaggggggcttgccctttcaggtattgcgcgagggaggcagccgcttccagtggctgtttgaccgcttgctaaggcagtacgaccagtggcacctgctgggcttcaacaccctacagcaggtggagcagcaactggaaaaggccagtcttcctcaggtgtttgcctcacgtacgtcgatcgaactgattgcgcgtatggtcgatgagcttgtggctctggtccggaattatgggctggcgcaggcggatgagcccgtcgtccgcctggatgctctgaaccccaagtggcgtgaattgttccctctgcctctggataacgagactggcagcgaactcctcaatggtcttttaaagactgcgaccattgagggcaaaaagcgacgccgggatgcgactggatggtcttgtcgacacttttggcatgaggcgcagccggatgtgctcaaggttcaggtctcgatgccggaggaggtggtgcttcgtctgacgacgcagccatctaccacccgttttgagctggccattgtcgaagatggacaggcgattgctgcgcttggacccggctacgcgctggtcgacaacggtgttgcccatatccggctgcgccttcgtgaggtgatcggaaagcggcaggattgcagtgcccaactgagcctggtggctatggcaggtggcatgctgatcgccacccagccgatagagggcagtgcagtggcccttggcgaagtaccgttgggtttcgagccagtgaatgatcgctggcagctgtgcggtcaggcttcattcaatacggctggtgaagagctgctgctggtgctgcccgaaggtgggaagttgaacatggctgcagagggcgaggaagccatcttcagcgatatggcaccggctttttcgctgcatacggtaaaggttcagggcaaggcgcagttccaggttgagagtgatgaactctaccggatacgcacgggacatgcggttggtatgggcttggggctggaactggctggtacccagatcgactggccgaccaagcccgctctgacctttgtcggtctgcctcgtgtgcagtggccgaccgctgctggggaactgcaacagcagggcggtgacctgtacgttgccggcaaacagccgggaagcggcttgttgcaggaggtactcggtacccaatatgtgtcggtgcgcaaccgcagtggcaacgccctgttacgtcgcagggtgggtatcttgccgacggatttccgtgttgagctgcgcagtggtgagaagccggggcaggggagcattttggtgcattcccggcagcgctgcctgctccagattgttgacgacagtctgcaggtacagcaggtaaagcgtgaggatcacaccgagcttaggctctcggcaaagggctttcctccagtcagggtccgcctttcagttacccccagcttgatggctgacccagtggagattgacctgccgtttcccaactcgggttttctggcctttgatggcacaggcaaacatctgaaacgcgatctcagtgtcgacgacctgttgggggcgcgtctgtatctgtttggccgggctggcgcaccaacccgttttagccttgagctgaccctcaggggtagtgcggccaggaatgcttgttacagctggacctacacggtggccgaaaagccgctggagctcagtctgttcaatatccgtgaacagattgttgacctgctttcgcttcagtcgggcattgatcaggtcgtcgagttgcgggtgttcggtaacggtcaggataccagttaccgcatccgtaggtattcgacggagatgcaactggatcgcgaccgtcagatgctgtgtgctgccaatctgcacgatggcgccgacgccattcccgaaccggtgttgatgctgttgcatgatcctatgcgtagctccatcgcgctccgttcccgcaccagcgaaggtgtgcccaccggcgacttcgagttaccgatagctgttgaaagggatggtccctggctggtgttgcccaaatcgggctcatctgtatcgttccggccgctatttatcgctggtggatggaagccgttggcgccgagcgatggaatccagagtctgcaaaaggcagtgttgaccttcgatcatgcttcacctgttagctccttcacgcctgtgttggatgccatggcggttaaccctatgcatagcggctggcagttcttgcgggccttgtatgaagggtacggctatctgcccctggcgaccttcgaggtctggaaggctctggtagggcacacccgcgcgttggcgatggcacttttcaagtttgaaatggaggcgacattccttggccggctggagactgagtttccgattttctgggagtttcttcccattacagaaatccatcttgcggccaagcgcttcgctgcattccttaaggtgaaaggggtcgctgaggaagccattgatgctctgatcggacgaatgttttcgcgattgggggaaacctattcagcctacgggcagagtgtgcagcgcttcctttctggcaagcctgttggcccagagatcaaggtgccgctagcgactttcaagagtgtcctgcatggctggtaccttgagttgattcgcgagcgcagtgaggcaaagtggccggagttcggcggcaagcggctggagcgttggcacagcagccaaggctgctcggtgattgccttcaggtcggaaatggattaccgcaatgcggtgctctatctaccggtattcgccgctgcggtcgcctgtggcaaggctcggttcacagatgcgtttgcggatggcgtcgaggcgattttcttcttgcgccaggtccgcgatttcgattcgaagtggttcaactcgatctatcaatattgcttgttgaacagcgtcatggatatgcagaaggcagagtcggttaatggataa

SEQ ID NO: 29778 - DNA, 6198 bp, Pseudomonas aeruginosa
atgctctatcagaagaactatttctccgccctcaccgacaacctgagcacccgcagcgagcgtgccgcccagggcctgctcagcctcggcaatccgcagctgcgccagtttctgcatgaccagctaaccgccgcccctggcactccgggcgcctggctggccgatccggtcttcgagccgaccttcggctggcaggaaagtgctgaaaccatgggttcactggccggcggcaacctgctgcactggcgccttgccgatacgatggcacacccgcccaaaaaggaagacggagaaggccttatagatccttttccaaaagaccgtagattgtttacgcatcagttagcagcgtgggagatcctcaaccgtgcggagccgcaatcgcttgtggtgaccagcggcaccggctcaggcaagaccgaatgcttcctggtgccggtcctcaaccagttggccaaggccatcgacgcgggcgaagacccggaaggcgttcgcgccctgttcatctacccgctgaacgcgctgatcaactcgcaacagaaccgcctggatgcctggacccacggattcggcggacagattcgccattgtctatacaccggtgccctggagaacgaacgcaggaatagagaccagcagtacgatggccaggtgatcgaccgcaagagcctgcgcgccagcccgccgcaactgctggtgaccaacgcgaccatgctggagtacatgctcatccgtaaggatgatgagccgatcctgcagaagtcggccggcaagctgcgctggatcattcttgacgaggcgcacacccacatcggctcccaggccgcggagatagcgctgctgctgcgccgggtaatgctggccttccaggtcaagccgcaggatgtgcgcttcgtggcaacctcggccaccttcggctcggatacccagaccatagagagcctgcgcaccttcctcgccgatatcggcggagtggatccgcagcaggtgcatgtcgtgcagggtcatcgggatatcccggcgctgctgaacgccaccccggatgccgagcaggacacccctgaagccatcggcgccatcgaggcggaccaggagcagtcgacgctgcgctaccagcgtctggaagccagccccaccgctcggcggctgcgcgccctgttcatgcctgatggccaggtgaaaccacaaagcctgcaagggctgatccgtgagtccggtctaccctcggcgcaggtgctcgcctggctggatctgctgtccggcaccaagagtgccgaggggctgtccttcctgccgctgcgcgcgcacttgttccataacgtgattccagcgatccgtacctgcgtggaccgcaactgcagccacaaaaccggtaccgcgctggcacacgccgactggccgttcggcatggtctatctggaggagcggactcactgtcgctgcggcgcaccgctgatgccgctggtgtcctgcgaggagtgcaacgagagcttcctgcaggcggcgacgaccagccacgggatgctgatcgaccagtcgcagcaacagctcgacgagttcgccctcgatgaagagcctacagatactgacgagccagccgaagacagcgcgctactcagtcagactctgattaccaaccgcccggtcaaccacagctatccggagtttctcgatagagccagccagcgcctgatgttcgatggccccaagaatggctacatcgagctgcaggttttccgcagccaaaagaatgagtgcccatgctgtggggctaccttgcaaggccgcagcctgcttcgcccggcacgcatcggtacccccttcaccctgagcacggtaatcggtaccctgctggagttctgcccgccggatccgatgcctaccggcaagcctttccagggccgcaagctgatttccttcaccgacagtcgccagggcacggcgcgtattgccatcaagctgcagcaggactccgagcgcaatcggatccgcgggctgatatatcagcgcttgctgcaggcacaaccgatcgatggactgtccgcagaggacttgcaggatctgcaagacctacaaacagcaacgcaactgagtcgtatcgagcagaaacacctgcagtctttgctcgacaggcaggctgaagctacaaagggagcggaaataagctggacagatatggccaaccatctggccggcaccccggagctgcagatgggcatgctcgattactacaacaacctcgcgccgaataccttcggcaagcaggacagtgtcgccctggccagcatgctgctggcgagcgagttctatcgccgcccgaagcgcgccaacagcttggaaaccctgggcctggtacaggtctgctatcccaagctggccaacgtcaccggcaaacccatggcctggcccgcgcacctggatgccgagtcttggcgtacctacctgaaagtgctgctggacttcttcgtccgcgaaaacaccatcctgaacatcaacgagcgctggcagtcactgatcggcgcacgcattcgccccaaatgggtagttgcgccggtcttgggggaaaagcctgaaaagctgcagagccgctttgtccgctggccggcggtcaacaccgtcaatggcatccagtcgcgagccattctgctgctctgcaaggcattcaactggtcgaccgcgacccatcagaatcagatcgactcgatcctgagtgaggcttggagggtactgacccagcaggcaaagctgttgattacgtcaggcgacggctatcagctcgacctcaaggacctgagtttccggctgcccgaaacggtctatctgtgcccggtatcgcggcgcttcatcgacaccccgttcgagcaactcagtccctatacgccacgtaccgaccgcgagatggtcgtcaaggtgacgccctacaccctgccgcggccgcccgaggcgctcctgcatgtgccgggtgatgagggcctgctggcgatccgcgactggctgaacagcgagccgcagatccagcagctgcgcaaggacgcgctctggtcggacgtcatggaccgggtcatcgagggtggtcactacttccgcgctgccgagcattcggcgcagcagtcgcagcagaagctaaagggctacgagaagctctttgaaaaaggcaagctgaacctgctgagctgctcgaccaccatggaaatgggcgtggatatcggcggcatcagcgtggtagcgatgaacaacgtccccccgcacccggccaactacctgcagcgagccggccgcgccgggcgccgccgcgaggggcgctcgctggccctggccgtctgcaagaacaccccgcacgaccagagcgtgttcaacaacccgctctggccgttcaacacgcccatgcgcatgcccaaggtgtccctgcagagccccgatctggttcagcgccacgtcaatgcctggctgctgtcgcactggctcaagcacgtggttgctgcccaggaaatcaagtcgatgaccgctggcgccttcttcctcgacggcgaactgcctatgtcactggccgcccgtttttgcctgtggtgcgacaaccagagggtcgataccgaggcgttggttgaacagtcgctcaaggacatcacccgacgcagcatcctcgatactgccccgcagcccgagctgttcaagcacaccagccgccgcatgaaagacatcatgcaggcatggcagcaggaatactcggccagcgaagcccaactgcagcagattaccgacaagaaggccgccgcctaccgcgctatggaggcacagctcagccgtatcgagaaggagtacctgctcagcgaactggctgacaggcgcttcctgccgggctacggcttcccgaccgacatcgtcagcttcgataaccgctgcatgcagaccttgaagcgggaggacggcgaccagcgcgaggacaaccgcgcctgctaccgctcgctggcttcccgcgaccgtatcaccggcctgcgcgaatatgcgccgggtgccgagctggtcatggacgggctggtttacaaatcctctggcatcacgctgaactggcacgcgcctgcgtctgccgaaaacgtcaaggagcttcagctgttcaagaaggcctggcgctgtgggcaatgcggtgccagtgactcggccatcaatcccggactggagatcaactgccaggaatgcggcgcgccgatcgagcgcgacaaaatccgtgaatacctggtgcctgcaggctttgccgtggacttcttcgacgagccgcacaatgacatcagccgcctgcagtatgtaccgatcaaagcgccatggctgaacgtgcctgccaactggatctgtctggtcaatccggcgctcggccagttccgcgccagccagcaggcacacctgttcaactacacctcgggcgccaatcagcagggctttgccatctgcctggagtgcggcaaagctgaacccatgctcagctatcccgatgcatccgcccctgccaatgaacagtatctgccggctattttccgccagaaggcgcagcaccgccgcctgcgtggcggcaggagcgacgacggggacaacatctgccccggcagccacaacagctggaagatcaagcagaacgtccacctcggccatgacagcctaaccgatgcgctggagctggtgctgcgcaaccctaccagcggcgaactgctcaacgacgacatcactgcttactcgattgccgtggcactgcgcgaagcgattgccgccgatctgggcatacagaccgaagagctgggctgcgacaaccacccgatcaaggtcgatggccagccaacccgagccatccgggtgttcgacctgcgcagcggtggctacaccacccaggccgcggagcggctgaatgaagccagcctgtggcgaaaggtcatcgcccgtctggacagctgcaactgctcgcatgcctgccagaactgcttactcagtttcgatacccgcttcgaagccgagcgcctcaatcgtcacgtcgcgctggagtggatcaatcagacttggcttgccggcctggcgctgcccgccgagctcgctgtctttggtccgaaaagccaggcagaaatcgccactctacaggaagcggtcgaaagagcgattactagggacgacaacgcgaagaccgtagccatttacttcactgcacccgccgaagagtgggatcttgctgtcgcacgccgcctgaggcatcaactgcatagctgggaaagcgtcggacacctagtgcaattacatttactggaaagtaccgtttccagcctgccaagagaccaaaaggaatggttggcaaagctagccttcaacggagtacagatatgcctacacaattccataccggatctcggggcgctggcactcaatgtctcactgcaaggcccacaaggctgcattgcctgggctagcgacaatacgaacctggccgcaccaggccacacatgggatctagcggaggccggtgcacggatcatccgaggcaccccctccgacctcaaggcagagcgcatcttgaatgctgccgatctcatgccggccccaccccctggcttgatcaagatcgagatcggcaatcagctggatggctcgctcgacaactttgctcgtcggttctgggagcacctaggtactgaggccaatggcctgattaatgatgccctcacaggcaaggatccaattacagagctggtttacagcgaccgttacgtatgcagcccgctagttgtgaatctgctggtcagcgtgatccacgagctcggacggctgagtgatgcagatttcgctatccgaatcctaggccgacaatatcagcgggaagacaatcgctcgccttggcagtgccggcatgactggcactcagctcgcgagcgcgatgaggccctccgccaggctctggcgtactgcggccgcgagggagaggtgctaagcctgcctaccttgccgcactaccgccggctacagcttaagctgcgctccggtaatcaactgaccatccagtttgatcaggggctttcgtattgggaagccgagcgcagcgaaaagtcttaccagctcaggttcgactttacatcacgcgagcttggagaagaaatcatggagcgcatcaggtgtaaagtttcggcggctggggaggaaaacactcagatattcctctcttcctcttga

SEQ ID NO: 29779 - DNA, 3111 bp, Pseudomonas aeruginosa
ctgtgcgaggcagccggccagcaggggttaccccaggataagacccgcagactggtcatcgacggacgccacctatggcgtctgcagaccgccatcaagaatgaaggcaagcgcttcatcggcctggtcgcagtgaatggcggcctgcccatgcgcctggtcgagtcggcacagggcgggctgtccggcctgctgcgcatggtcaccgagcaggcactggaataccgcctgcaggatgagcgtctgcgccaggccatcgaggcccaggccgagctcttgcccgcctgctaccagcaggcgccggtctacgaactgctcgacagcttggtcaaggcggtgctgcacatccgcaaggcctatgccctgcagagcgcccaagacccaatcgcccggctgcaggaagagtgccctcactgggaagagctcttccccatcgccctcgattcccaggccgccgccagcctgatcaagggtctggtccgggatacagtcagcatcacgccccagtcgcggcggcctcctttccagatccagcgcggcctgcgcttcagttccgatggctccatacccgtctacgagctgtccttcgtgatgcaggctcaggccaggcgcgatcaggttgccgaggcgctggggatggccgtggatgcgctgccgccacacttccagctcctgctgcgcatcggcgagcgggaatacctggtcggcgaagccctgcttagagacgaggaataccagctgatcgccaggccgctgccggccatccacagcctgcacaatgccgcgcagctgatcgtcagccgctggggcgccaccctgcacattgccaacctaccgggcggcgaagccttgagccatgacgagccgctgatcttcgagaatacctacccctttgcccgcctgctcgcccagggcgatgcgctggtcaagggcgagtcggcactggcggccatgccggcaagaaccatcgtgtatgccgaagaaggcgaggctcgcgagctgcatgactgcctggccgacgggcaaatgctgatggaacttcccgccggtaccacccggctcacgtacaaacaacagcccttcgttgtcaccatcagcgccagcgctacccgccacccggaagcctactggcatggcaacagtctggaggcgctctccgtgccggggctgctgttccgtggcacgccgcgcctacgcattgagcagggaacgggcttttccagctatgcgcccgcccatgagctgtttgtccgcacgcagggcaaggagctgccgctcgcccaagcccgggcgccggggctgtgccggctgatctggcgcaaggatggccagcgcctgctgaacacccgcgccgtgcttctcccggacgaagcctccatcacctacgcgccgggcgccactaccctcgagggcagcattcgcctgcaccactggcctgatgtgcccgtgcgctgcgagagcgaacagatcgcgctggagcgccgccatgatggaacaggcctgaccctgcggctgaagagcaccggcagccggccggccaccacggttccgctgtgcctgcagtggcccgacggcgagcagaagctcactctgcccttccccggctatggcgtcacgctgctgcgcaacgacactcctctcaagctgaatcaggccctgaccatcgaagaactgatcggctgccgtgcggtactgatgtcggctcagggcgccgaaaactggcggattcgcctgacctccagcggcaccgactcacgctccaccctgtcgcaggaaattcgctacaccgggatccgcgaaatccgtctgttcgagctgattccggcgatccagcagatgatgtcctgccacccggggctcgatcatgtcgtgcagctagagttgattcatgcccaccagacccacgctcgcctacaggtgggccgctactcgacgcgcatccgcctgcacagccagcgcgagatggcgtcactgaacgatagcggctccgacgttctgcttgagcagccgcatgccgagggtctgatattgggcctgccactggcagaaccggaacatgacccggtcagcctgccgctgcatttttccgaacaggtgttcaccggcagctggctggtcagcctgccagacgatgccgtcggcccttggttgctgtacacctctgccgagtcaccgctacacagccgtgcgaccatcgtgccaccgaccgcgagccaactgtcgaagcccctgaccccgctgcgcgaggcgctctgcgaaggcgatggcgaagagcgcatgcgccagctcagggccgcgctgcgcgccatggccgcagacccgcaggctgatgactggcaaacgctggagctgctgctggatcggctgcaccacctgccgctggccagcctggatatctgccaggcactaatccgcgagccgcaggcgctgaccatggccaccctgctgctggatgatttctccagccgcctggccgagcgcctgccctgcgagctgcccttcgagtggctgctgatcgccccggagcactggttcggcaccttcgcgacactgcgccagcaactggccgccgacaatccgcgcatgctgtcggtaatccgcaacgacatccagagcaagagccagttcctgtcccgctggcagcccgcgctgcgcttcatcttcgatcagggcctgcaccactccttcgatctgcaaagcccggatgtggcgttcttcctgagaaatccggcgatgctcaccgactcttggttgtcccaactgctggatggcgagcactcggccatgcagcagatgttccgacgcaatcccgctgaaacccatcaatatcctggcagtggcaatacggatatcggagccttcctgaaaacaccccacgggcaaatgctcctccgccactgcaagctccccgccaacgacttcaagctggccacggtcatgctgcccttcatggccgccttcgatacctacgccggccgcgggcagcaatggcaagccgacccggcacgcctgttcagcctcagaaacgctcgccagttcgatactgtctggttcgactccgcctatcaactcggcctggccatggcgcaagccgcctcgatgcagaagtga

SEQ ID NO: 29780 - DNA, 6336 bp, Pseudomonas aeruginosa; identical to SEQ ID NO: 29776

SEQ ID NO: 29781 - DNA, 3336 bp, Pseudomonas aeruginosa; identical to SEQ ID NO: 29777

SEQ ID NO: 29782 - DNA, 6216 bp, Pseudomonas aeruginosa
atgctctatcagaagaactatttctccgctctcaccggcaacctgagcacccgcagcgagcgcgccgcccagggcctgctcagtctaggcaatccgcagctgcggcagttcctgcatgatcagctgaccgccgcccccggcactccgggcgcctggctggccgacccggtcttcgaaccgaccttcggctggcaggaaagctctgaaaccatgagttcgctggccggcggtgacctactacaccgacgccttgccgaagccatggcggccccgcccaaggagccccatgatcttgcagaggaatatgccttccccagcaatcgccatcctttcacccaccagttggcggcctgggagattctcaaccgtcccgagccgcaatcgctggtggtgaccagcggcaccggctcgggcaagaccgaatgcttcctggtgccggtcctcaaccagctggccaaggccatcgacgcgggcgaagacccggaaggcgttcgcgccctgttcatctatccgctgaacgcgctgatcaactcgcagcagaaccgcctggatgcctggacagacggcttcggcgggcagattcgccactgcctgtacaccggcgcgctggagaatgagcgcaagacgtccgaccagcagtacaagggtcaggtgatcgaccgcaagagcctgcgcgccagcccgccgcaactgctggtgaccaacgcgaccatgctggagtacatgctcatccgcaaggatgatgagccgatcctgcagaagtcggccggcaagctgcgctggatcattctggacgaggcgcacactcacatcggctcccaggccgcggagatggcgctgctgctgcgccgggtgatgctggccttccaggtcaaaccgcaggatgtgcgcttcgtggcgacctcggccaccttcggctcggatacccagaccatcgagagcctgcgcaccttcctcgccgatatcggcggagtggatccgcagcaggtgcatgtcgtgcagggtcatcgggatatcccggcgctgctgaacgccacgcccgatgccgagcaggacacccctgaagccatcggcgccatcgaggcggaccaggagcagtcgacgctgcgctaccggcgtctggaggccagccccaccgctcggcggctgcgcgccctgttcatgcctgatggccaggtgaaaccacaaagcctgcaagggctgatccgtgagtccggtctaccctcggcgcaggtgctcgcctggctggatctgctgtccggcaccaagagtgccgagggcctgtccttcctgccgctgcgcgcacacctgttccataacgtgattccggcaatccgcgcctgcgtggaccgccactgcagccacaaggccggcaccgcgctggcacatgccgactggccgttcggcatggtctatctggaggagcggactcactgccgctgcggcgcgccgctgatgccactggtgtcctgcgaggagtgcaacgagagcttcctgcaggcggccaccaaaagcagtagcagtgctctggtcgatccgacacagcaacaggacgacgagttcgctctcgaagatgaaaccacggaggccgatgatcagaccaaggataaggatactgtgtcatccatccagatcctgatcaccaatcgcgccgtcaagaatggcagtgcagacttcctcgatcgcgccactcaccgactgacgcccaatcgtccggcggatggtggcatcgagctgcagctcttccgcactgccaagaacgaatgcccctgctgtagcgccaatatccagggccgcagcctgctgcgccccacgcgcatcggtacgcccttcaccctcagcacggtgatcggcaccctgctggagttctgcccgccggatccgatgccgaccggcaagccgttccagggccgcaagctgatctccttcaccgacagccgccagggcaccgcacggattgccatcaagctgcagcaggactccgagcgcaaccggattcgcgggctgatctatcagcgcctgctgcaggcacaacccgtcaatgggctgtccgcagaggacttgcaggacctgcaagaccttcaaacagcaacgcaactgagtcgtatcgagcagaaacacctgcagtctttgctcgacaggcaggctgaagctacaaagggcgcggaaataagctggacagatatggccaaccatctggccggcacgcctgagctacagatgggcatgctcgactactacaacaacctcgcgccgaacaccttcggcaagcaggacagtgtcgccctggccagcatgctgctggcgcgcgagttctatcgccgcccgaagcgcgccaacagcttggaaaccctgggcctggtacaggtctgctatcccaagctggccaacgtcaccggcaaacccatggcctggcccgcgcacctggatgccgagtcttggcgtacctacctgaaagtgctgctggacttcttcgtccgcgaaaacaccatcctgaacatcaacgaacgctggcagtcactgatcggcgcacgcattcgccccaaatgggtagttgcgccggtcttgggggaaaagcctgaaaagctgcagagccgctttgtccgctggccggcggtcaataccgtcaatggcatccagtcgcgggccatcctgctgctctgcaaggcgttcaactggtcgaccgcggcccatcaggaccagatcgactcgatcctgagcgaggcctggcgggtactgacccagcaggcaaagctgctgatttcgtcaggcgacggctatcagctcgacctcaaggacctgagcttccggctgcccgaaacggtctaccagtgcccggtatcgcggcgcttcatcgacaccccgttcgagcagctcagtccctatacgccacgtaccgaccgcgagatggtcgtcaaggtgacgccctacactctgccgcgtccgcccgaggcgctcctgcatgtgccgggtgatgagggcctgctggcgatccgcgactggctgaacagcgagccgcagatccagcagctgcgcaaggacgcgctctggtcggacgtcatggaccgggtcatcgaggggggccactacttccgtgccgccgagcactcggcgcagcagccgaagagcaagctggacagctacgaaggcctgttcaagaccggcaggctgaacctgctgagctgctcgaccaccatggaaatgggcgtggacatcggcggcatcagcgtggtggcgatgaacaacgtgcccccgcacccggccaactacctgcagcgtgccggccgtgccgggcgccgccgcgagggacgctcgctggccctggccgtctgcaagaacaccccgcacgaccagagcgtgttcaacaacccgctctggccgttcaacacgcccatgcgcatgcccaaggtgtccctgcagagccccgatctggtacagcgccacgtcaatgcctggctgctgtcgcactggctcaagcacgtggtcgccgcccaggaaatcaagtcgatgaccgccggtgccttcttcctcgacggcgaactgcctatgtcgctggccgcgcgtttctgcctgtggtgcgacaaccaggcggtcgataccgaaacgctggtgggacaggccctcaaggacatcacccgccgcagcatcctcgacaccaccccgcagcccgagctgttcaagcatgccagccgccgcatgaaagagatcatgcaggcatggcagcaggaatactcggccagccacgcccagctgctgcagattgccgacaagaaggccgctgcctaccgcgccatggatgcacagctcagccgcatcgcgaaggagtacctgctcagcgagctggctgaccggcgcttcctgccgggctacggcttcccgaccgacatcgtcagcttcgacaaccgctgcatgcagaccttgaagcgggaggacggcgaccagcgcgaggacaaccgcgcccgttaccgctcgctggcttcccgcgaccgcatcaccggcctgcgcgaatatgcgccgggcgccgagctggtcatggatgggctggtctacaagtcctccggcatcaccctgaactggcacgctcccgcgtctgccgaaaacgtcaaggagcttcagctgttcaagaaggcctggcgctgtgggcaatgcggtgccagtgactcggccatcaatcccggactggagatcaactgccaggaatgcggcgcgccgatcgagcgcgacaacatccgtgaatacctggtgcctgcaggctttgccgtggacttcttcgacgagccgcacaacgacatcagccgcctgcagtatgtgccggtcaatgcgccctggctgaacgtgccggccagctgggtctgcctggccaacccggcactcggccagttccgcgccagccagcaggcgcagctgttcaactacacctcgggcgccaaccagaagggctttgccatctgcctggagtgcggcaaggccgagcccatgctgagctatcccgatgcatccgcccctgccaatgaacagtatctgccggctactttccgccagaaggcacagcaccgccgcctgcgcggtggcaaaagcaatgaacaaggcgacgggacaaacatctgccccggcagccacaacagctggaagatcaaacagaacgtccaccttggccatgacagcctgaccgatgcgctggaactggtgctgcgcaaccctaccagcggcgaactgctcaacgacgatatcaccgcctactcgattgccgtggcgctgcgcgaggcgattgccgccgatctgggcatacaaaccgaagagctgggctgcgcaagccatccgatcaaggtcgatggccagccaacccgcgccatccaggtgttcgacctgcgcagcggtggctacaccacccaggccgcggagcggctgaatgaagccagcctgtggcgaaaggtcatcgctcgtctggacagctgcaactgctcgcatgcctgccagaactgcctactcagtttcgatacccgcttcgaggccgagcgcctcaatcgtcacgtcgcgctggagtggatcaatcagacttggcttgccggcctggcgctgcccgccgagctcgctgtctttggtccgaaaagccaggcagaaatcgccactctacaggaagcggtcgaaagagcgattactagggacgacaacgcgaagaccgtagccatttacttcactgcacccgccgaagagtgggatcttgctgtcgcacgccgcctgaggcatcaactgcatagctgggaaagcgtcggacacctagtgcaattacatttactggaaagtaccgtttccagcctgccaagagaccaaaaggaatggttggcaaagctagccttcaacggagtacagatatgcctacacaattccataccggatctcggggcgctggcactcaatgtctcactgcaaggcccacaaggctgcattgcctgggctagcgacaatacgaacctggccgcacctggccacacatgggatctagcggaggccggtgcacggatcatccgaggcaccccctccgacctcaaggcagagcgcatcttgaatgctgccgatctcatgccggccccaccccctggcttgatcaagatcgagatcggcaatcagctggatggctcgctcgacaactttgctcgtcggttctgggagcacctaggtactgaggccaatggcctgattaatgatgccctcacaggcaaggatccaattacagaactggtttacagcgaccgttacgtatgcagcccgctagttgtgaatctgctggtcagcgtgatccacgagctcggacggctgagtgatgcagatttcgctatccgaatcctaggccgacaatatcagcgggaagacaatcgctcgccttggcagtaccggcatgactggcactcagctcgcgagcgcgatgaggccctccgccaggctctggcgtactgcggccgcgagggagaggtgctaagcctgcctaccttgccgcactaccgccggctacagcttaagctgcgctccggtaatcaactgaccatccagtttgatcaggggctttcgtattgggaagccgagcgcagcgaaaagtcttaccagctcaggttcgactttgcatcacgcgagcttggagaagaaatcatggagcgcatcaggtgtaaagtttcggcggctggggaggaaaacactcagatattcctctcttcctcttga

SEQ ID NO: 29783 - DNA, 3111 bp, Pseudomonas aeruginosa
ctgtgcgaggcagctggccagagaaaggtagctcatgagaagacccgcagcctggtaattgatgggcgtcgtcagtggcgtctgcaaaccactataaaaagtgaaggcaaacgtttcatcggcctggtcgcggtgaatggcggcctgcccatgcgccttgtcgagtcggcacagggcgggttatcccgcctgctacgcatggtcactgagcaggcactggaataccgcctgcaggatgagcgtctgcgccaggccatcgaggcccaggccgagcttttgcccgcctgctaccagcaggcgccggtctacgaactgctcgacagcttggtcaaggcggtgctgcacatccgcaaggcctatgccctgcagagcgcccaagacccaatcgcccggctgcaggaagagtgccctcactgggaagagctcttccccatcgccctcgattcccaggccgccgccagcctgatcaagggtctggtccgggatacagtcagcatcacgccccagtcgcggcggcctcctttccagatccagcgcggcctgcgcttcagttccgatggctccatacccgtctacgagctgtccttcgtgatgcaggctcaggccaggcgcgatcaggttgccgaggcgctggggatggccgtggatgcgctgccgccacacttccagctcctgctgcgcatcggcgagcgggaatacctggtcggcgaagccctgcttagagacgaggaataccagctgatcgccaggccgctgccggccatccacagcctgcacaatgccgcgcagctgatcgtcagccgctggggcgccaccctgcacattgccaacctaccgggcggcgaagccttgaaccatgacgagccgctgatcttcgagaatacctacccctttgcccgcctgctcgcccagggcgatgcgctggtcaagggcgagtcggcactggcggccatgccggcaagaaccatcgtgtatgccgaagaaggcgaggctcgcgagctgcatgactgcctggccgacgggcaaatgctgatggaacttcccgccggtaccacccggctcacgtacaaacaacagcccttcgttgtcaccatcagcgccagcgctacccgccacccggaagcctactggcatggcaacagtctggaggcgctctccgtgccggggctgctgttccgtggcacgccgcgcctacgcattgagcagggaacgggcttttccagctatgcgcccgcccatgagctgtttgtccgcacgcagggcaaggagctgccgctcgcccaagcccgggcgccggggctgtgccggctgatctggcgcaaggatggccagcgcctgctgaacacccgcgccgtgcttctcccggacgaagcctccatcacctacgcgccgggcgccactaccctcgagggcagcattcgccttcaccactggcctgatgtgcccgtgcgctgcgagagcgaacagatcgcgctggagcgccgccatgatggaacaggcctgaccctgcggctgaagagcaccggcagccggccggccaccacggttccgctgtgcctgcagtggcccgacggcgagcagaagctcactctgcccttccccggctatggcgtcacgctgctgcgcaacgacactcctctcaagctgaatcaggccctgaccatcgaagaactgatcggctgccgcgcggtactgatgtcggctcagggcgccgaaaactggcggattcgcctgacctccagcggcaccgactcacgctccaccctgtcgcaggaaattcgctacaccgggatccgcgaaatccgtctgttcgagctgattccggcgatccagcagatgatgtcctgccacccggggctcgatcatgtcgtgcagctagagttgattcatgcccaccagacccacgctcgcctacaggtgggccgctactcgacgcgcatccgcctgcacagccagcgcgagatggcgtcactgaacgatagcggctccgacgttctgcttgagcagccgcatgccgagggtctgatattgggcctgccactggcagaaccggaacatgacccggtcagcctgccgctgcatttttccgaacaggtgttcaccggcagctggctggtcagcctgccagacgatgccgtcggcccttggttgctgtacacctctgccgagtcaccgctacacagccgtgcgaccatcgtgccaccgaccgcgagccaactgtcgaagcccctgaccccgctgcgcgaggcgctctgcgaaggcgatggcgaagagcgcatgcgccagctcagggccgcgctgcgcgccatggccgcagacccgcaggctgatgactggcaaacgctggagctgctgctggatcggctgcaccacctgccgctggccagcctggatatctgccaggcactaatccgcgagccgcaggcgctgaccatggccaccctgctgctggatgatttctccagccgcctggccgagcgcctgccctgcgagctgcccttcgagtggctgctgatcgccccggagcactggttcggcaccttcgcgacactgcgccagcaactggccgccgacaatccgcgcatgctgtcggtaatccgcaacgacatccagagcaagagccagttcctgtcccgctggcagcccgcgctgcgcttcatcttcgatcagggcctgcaccactccttcgatctgcaaagcccggatgtggggttcttcctgaaaaacccggcgatgctcaccgcctcctggcagtcgtacctgtttgatggcgagaactcggccatgcagcagatgttccggcgcaaccccgccgaaacccatcaatatcccggcagcggcaatacggatatcggagccttcctgaaaacgccccacgggcaaatgctcctccgctgctgcaagctcccggccaatgacttcaagctggccacggtcatgctgcccttcatggccgccttcgatacctacgccggccgcgggcagcaatggcaagccgacccgccacgcctgttcagcctcagaaacgctcgccagttcgataccgtctggttcgactcggtctatcaacttggcctggccatggcgcaagccgcctcgatgcagaagtga

SEQ ID NO: 29784 - DNA, 6216 bp, Pseudomonas aeruginosa
atgctctatcagaagaactatttctccgctctcaccggcaacctgagcacccgcagcgagcgcgccgcccagggcctgctcagtctaggcaatccgcagctgcggcagttcctgcatgatcagctgaccgccgcccccggcactccgggcgcctggctggccgacccggtcttcgaaccgaccttcggctggcaggaaagctctgaaaccatgagttcgctggccggcggtgacctactacaccgacgccttgccgaagccatggcggccccgcccaaggagccccatgatcttgcagaggaatatgccttccccagcaatcgccatcctttcacccaccagttggcggcctgggagattctcaaccgtcccgagccgcaatcgctggtggtgaccagcggcaccggctcgggcaagaccgaatgcttcctggtgccggtcctcaaccagctggccaaggccatcgacgcgggcgaagacccggaaggcgttcgcgccctgttcatctatccgctgaacgcgctgatcaactcgcagcagaaccgcctggatgcctggacagacggcttcggcgggcagattcgccactgcctgtacaccggcgcgctggagaatgagcgcaagacgtccgaccagcagtacaagggtcaggtgatcgaccgcaagagcctgcgcgccagcccgccgcaactgctggtgaccaacgcgaccatgctggagtacatgctcatccgcaaggatgatgagccgatcctgcagaagtcggccggcaagctgcgctggatcattctggacgaggcgcacactcacatcggctcccaggccgcggagatggcgctgctgctgcgccgggtgatgctggccttccaggtcaaaccgcaggatgtgcgcttcgtggcgacctcggccaccttcggctcggatacccagaccatcgagagcctgcgcaccttcctcgccgatatcggcggagtggatccgcagcaggtgcatgtcgtgcagggtcatcgggatatcccggcgctgctgaacgccacgcccgatgccgagcaggacacccctgaagccatcggcgccatcgaggcggaccaggagcagtcgacgctgcgctaccggcgtctggaggccagccccaccgctcggcggctgcgcgccctgttcatgcctgatggccaggtgaaaccacaaagcctgcaagggctgatccgtgagtccggtctaccctcggcgcaggtgctcgcctggctggatctgctgtccggcaccaagagtgccgagggcctgtccttcctgccgctgcgcgcacacctgttccataacgtgattccggcaatccgcgcctgcgtggaccgccactgcagccacaaggccggcaccgcgctggcacatgccgactggccgttcggcatggtctatctggaggagcggactcactgccgctgcggcgcgccgctgatgccactggtgtcctgcgaggagtgcaacgagagcttcctgcaggcggccaccaaaagcagtagcagtgctctggtcgatccgacacagcaacaggacgacgagttcgctctcgaagatgaaaccacggaggccgatgatcagaccaaggataaggatactgtgtcatccatccagatcctgatcaccaatcgcgccgtcaagaatggcagtgcagacttcctcgatcgcgccactcaccgactgacgcccaatcgtccggcggatggtggcatcgagctgcagctcttccgcactgccaagaacgaatgcccctgctgtggcgccaatatccagggccgcagcctgctgcgccccacgcgcatcggtacgcccttcaccctcagcacggtgatcggcaccctgctggagttctgcccgccggatccgatgccgaccggcaagccgttccagggccgcaagctgatctccttcaccgacagccgccagggcaccgcacggattgccatcaagctgcagcaggactccgagcgcaaccggattcgcgggctgatctatcagcgcctgctgcaggcacaacccgtcaatgggctgtccgcagaggacttgcaggacctgcaagaccttcaaacagcaacgcaactgagtcgtatcgagcagaaacacctgcagtctttgctcgacaggcaggctgaagctacaaagggcgcggaaataagctggacagatatggccaaccatctggccggcacgcctgagctacagatgggcatgctcgactactacaacaacctcgcgccgaacaccttcggcaagcaggacagtgtcgccctggccagcatgctgctggcgcgcgagttctatcgccgcccgaagcgcgccaacagcttggaaaccctgggcctggtacaggtctgctatcccaagctggccaacgtcaccggcaaacccatggcctggcccgcgcacctggatgccgagtcttggcgtacctacctgaaagtgctgctggacttcttcgtccgcgaaaacaccatcctgaacatcaacgaacgctggcagtcactgatcggcgcacgcattcgccccaaatgggtagttgcgccggtcttgggggaaaagcctgaaaagctgcagagccgctttgtccgctggccggcggtcaataccgtcaatggcatccagtcgcgggccatcctgctgctctgcaaggcgttcaactggtcgaccgcggcccatcaggaccagatcgactcgatcctgagcgaggcctggcgggtactgacccagcaggcaaagctgctgatttcgtcaggcgacggctatcagctcgacctcaaggacctgagcttccggctgcccgaaacggtctaccagtgcccggtatcgcggcgcttcatcgacaccccgttcgagcagctcagtccctatacgccacgtaccgaccgcgagatggtcgtcaaggtgacgccctacactctgccgcgtccgcccgaggcgctcctgcatgtgccgggtgatgagggcctgctggcgatccgcgactggctgaacagcgagccgcagatccagcagctgcgcaaggacgcgctctggtcggacgtcatggaccgggtcatcgaggggggccactacttccgtgccgccgagcactcggcgcagcagccgaagagcaagctggacagctacgaaggcctgttcaagaccggcaggctgaacctgctgagctgctcgaccaccatggaaatgggcgtggacatcggcggcatcagcgtggtggcgatgaacaacgtgcccccgcacccggccaactacctgcagcgtgccggccgtgccgggcgccgccgcgagggacgctcgctggccctggccgtctgcaagaacaccccgcacgaccagagcgtgttcaacaacccgctctggccgttcaacacgcccatgcgcatgcccaaggtgtccctgcagagccccgatctggtacagcgccacgtcaatgcctggctgctgtcgcactggctcaagcacgtggtcgccgcccaggaaatcaagtcgatgaccgccggtgccttcttcctcgacggcgaactgcctatgtcgctggccgcgcgtttctgcctgtggtgcgacaaccaggcggtcgataccgaaacgctggtgggacaggccctcaaggacatcacccgccgcagcatcctcgacaccaccccgcagcccgagctgttcaagcatgccagccgccgcatgaaagagatcatgcaggcatggcagcaggaatactcggccagccacgcccagctgctgcagattgccgacaagaaggccgctgcctaccgcgccatggatgcacagctcagccgcatcgcgaaggagtacctgctcagcgagctggctgaccggcgcttcctgccgggctacggcttcccgaccgacatcgtcagcttcgacaaccgctgcatgcagaccttgaagcgggaggacggcgaccagcgcgaggacaaccgcgcccgttaccgctcgctggcttcccgcgaccgcatcaccggcctgcgcgaatatgcgccgggcgccgagctggtcatggatgggctggtctacaagtcctccggcatcaccctgaactggcacgctcccgcgtctgccgaaaacgtcaaggagcttcagctgttcaagaaggcctggcgctgtgggcaatgcggtgccagtgactcggccatcaatcccggactggagatcaactgccaggaatgcggcgcgccgatcgagcgcgacaacatccgtgaatacctggtgcctgcaggctttgccgtggacttcttcgacgagccgcacaacgacatcagccgcctgcagtatgtgccggtcaatgcgccctggctgaacgtgccggccagctgggtctgcctggccaacccggcactcggccagttccgcgccagccagcaggcgcagctgttcaactacacctcgggcgccaaccagaagggctttgccatctgcctggagtgcggcaaggccgagcccatgctgagctatcccgatgcatccgcccctgccaatgaacagtatctgccggctattttccgccagaaggcacagcaccgccgcctgcgcggtggcaaaagcaatgaacaaggcgacgggacaaacatctgccccggcagccacaacagctggaagatcaaacagaacgtccaccttggccatgacagcctgaccgatgcgctggaactggtgctgcgcaaccctaccagcggcgaactgctcaacgacgatatcaccgcctactcgattgccgtggcgctgcgcgaggcgattgccgccgatctgggcatacaaaccgaagagctgggctgcgcaagccatccgatcaaggtcgatggccagccaacccgcgccatccaggtgttcgacctgcgcagcggtggctacaccacccaggccgcggagcggctgaatgaagccagcctgtggcgaaaggtcatcgctcgtctggacagctgcaactgctcgcatgcctgccagaactgcctactcagtttcgatacccgcttcgaggccgagcgcctcaatcgtcacgtcgcgctggagtggatcaatcagacttggcttgccggcctggcgctgcccgccgagctcgctgtctttggtccgaaaagccaggcagaaatcgccactctacaggaagcggtcgaaagagcgattactagggacgacaacgcgaagaccgtagccatttacttcactgcacccgccgaagagtgggatcttgctgtcgcacgccgcctgaggcatcaactgcatagctgggaaagcgtcggacacctagtgcaattacatttactggaaagtaccgtttccagcctgccaagagaccaaaaggaatggttggcaaagctagccttcaacggagtacagatatgcctacacaattccataccggatctcggggcgctggcactcaatgtctcactgcaaggcccacaaggctgcattgcctgggctagcgacaatacgaacctggccgcacctggccacacatgggatctagcggaggccggtgcacggatcatccgaggcaccccctccgacctcaaggcagagcgcatcttgaatgctgccgatctcatgccggccccaccccctggcttgatcaagatcgagatcggcaatcagctggatggctcgctcgacaactttgctcgtcggttctgggagcacctaggtactgaggccaatggcctgattaatgatgccctcacaggcaaggatccaattacagaactggtttacagcgaccgttacgtatgcagcccgctagttgtgaatctgctggtcagcgtgatccacgagctcggacggctgagtgatgcagatttcgctatccgaatcctaggccgacaatatcagcgggaagacaatcgctcgccttggcagtaccggcatgactggcactcagctcgcgagcgcgatgaggccctccgccaggctctggcgtactgcggccgcgagggagaggtgctaagcctgcctaccttgccgcactaccgccggctacagcttaagctgcgctccggtaatcaactgaccatccagtttgatcaggggctttcgtattgggaagccgagcgcagcgaaaagtcttaccagctcaggttcgactttgcatcacgcgagcttggagaagaaatcatggagcgcatcaggtgtaaagtttcggcggctggggaggaaaacactcagatattcctctcttcctcttga

SEQ ID NO: 29785 - DNA, 3111 bp, Pseudomonas aeruginosa; identical to SEQ ID NO: 29769

SEQ ID NO: 29786 - DNA, 6216 bp, Pseudomonas aeruginosa; identical to SEQ ID NO: 29784

SEQ ID NO: 29787 - DNA, 3111 bp, Pseudomonas aeruginosa; identical to SEQ ID NO: 29769

SEQ ID NO: 29788 - DNA, 6216 bp, Pseudomonas aeruginosa; identical to SEQ ID NO: 29774

SEQ ID NO: 29789 - DNA, 3111 bp, Pseudomonas aeruginosa; identical to SEQ ID NO: 29769

SEQ ID NO: 29790 - DNA, 6216 bp, Pseudomonas aeruginosa; identical to SEQ ID NO: 29784

SEQ ID NO: 29791 - DNA, 3111 bp, Pseudomonas aeruginosa; identical to SEQ ID NO: 29769

SEQ ID NO: 29792 - DNA, 6216 bp, Pseudomonas aeruginosa; identical to SEQ ID NO: 29784

SEQ ID NO: 29793 - DNA, 3111 bp, Pseudomonas aeruginosa; identical to SEQ ID NO: 29769

SEQ ID NO: 29794 - DNA, 6336 bp, Pseudomonas aeruginosa; identical to SEQ ID NO: 29770

SEQ ID NO: 29795 - DNA, 3330 bp, Pseudomonas aeruginosa; identical to SEQ ID NO: 29771

SEQ ID NO: 29796 - DNA, 6336 bp, Pseudomonas aeruginosa
atggataagtatttctctgggctagtcgagcaggcgctttcccgtgccactgagtccaccttgagtatcttgagcattaccgatccggacttgcgtgagcacctggaaagtctgatgcgcgcggagtgcgggaaagagggtgcattcctggcgccacccgtgtttgagcagaccttcagctgggaagagtcggcgttcaccatggagcaactggcgagcaaggagcacttgctgagcaaggagatcgtggcctcgctcgatggcaaggcgaatgggcgttaccgctttggcgcgagttggaaacccttcacccaccagttggccagctggcgctcattgctagagaagaagcattcggtggtcgtcaccagtggtaccggctcgggtaagaccgaatgctttatggtgccggtgctggaggatctttatcgcgagtaccgtgacgcagctcgtcagccgctggtcggggttcgggcgctgttcctgtatccacttaacgccctgatcaactcgcagcgcgaacgtttgaatgcctggactcagagctttggaagcggcattcgctattgcctgtacaacggcaatacaccggagttgcaggcgaatgtgcgcagcgagcagagcctaaagcctaacgaaattctgtcgcgcgagctgatgcgtacgcaaccggcgcctattctggtcaccaacggcaccatgctcgaatacataatggtgcgccaggtcgatgcgcccatcgtaagaatctccagagagcagaaatcgctgcgctggattgttctggacgaggctcacacttacgtgggttcccaggcggctgaattggcattgcagctgcgacgggtgatgacagccttcggcgttacgcctaaggatgtccgctttgtggcgacctctgcgactattgccggtgaggacgctgcaggacagttgaagcagtttctctcggatctgtcgggggggccggttacgcagattgatgtctgggggggtaaccgggtcattcctcctcttgccccctgtcaacaaacgctggttgctctggatacgctcgagtccatgccgcctgtaattgcggacgatccagaggttcatccggatcgatacgaggccctggtccattctccgcaagcccgagcactgagaaatctgctggtgaccacccccaagccgttgaagctaaccgagatggtcagccagatgcgtcaggaaggtgggtggtcactgtcacaggacgaaatactacgttggttggatgtgtgttcaggcactcgtctttcagccagtgagccggcgtttctgaagctgcgggcgcacttcttccagcgcacaactcacgggttatgggcctgctttgacaagtgctgctcagcaaagtccggaacggcgctgcaacaaaactggccctttggttatgtctacgccaatcagaggcaaacctgcagctgtggcagcccggtattcgagttggcgttctgcaatgactgcaatgagccgcatctgttggcgcgggataagaacggaaagctgatccagtgggaaagctctggtggcgatgaattttccctgcagactgaaacacctgttgaggaagatgcgggggctggtggctcaggggtactttcagtcaagacaccgctggtgctttgctcgttcgaaaatgccggcagcgcatacatccccgttgaggtcgataagttcgctggttcattcgcagctgtttcagctgaacgggtacggtttggggttagagatcttgatgccaagtgcagccacaacagctgtggatttagtgggctgcacggagcttctcctttccgccgcgcaatgctgggcggacccttctatgtagccaatgccgtgccgacagtccttgaatactgtcaagactatcaagaggaagatcagacgccggagcacggtccgcagtctctgcctggcagaggccgtcggctaattacctttacggacagccgccagggcacggcgcgcatggctgtacgtatgcaacaggaggcggagcgcagcaggttgcgcggacttgtcgtggagattttgagctggcaccagcggagccaggccagctctcaggtagattccagccgcatcgatccgtcggttttgcaacaattaatcgccaaggcgaaagaggaagtagagctataccgcagcgttggtatcaaggaggaagtcagggccgcggaggaaaaagttacacggtttacagccatgctagcttcagcaactggagcgaaagttaggccgacgctagtttctctagcttggtcggagctctccaatgagctcaagcagaaggcagacctgaaaggctcgatgctgctttacaacaagtatcagaagcccgagatcttccgggaccatgatggcccctacaagctggcggaaatgttgctgttccgcgagtttatgcgccgcccgaaacggcagaacagtctggaaacccaagggctggtgaaggtcgcatacgttggcatggataaggtccaagaagtgccggcgtactgggggcagaaaggtctgacgctcgatgattggcgtgacttcctaaaggtggcgctggactttcatgttcgggagaacagctatattcaggtcgatgagggctggttgagttggatcggtagccgtttttctgccaagagtctgcgtaatcccgagtcgaaagaagcggatgagatccgggtcaagcgctggcctcagatccgcaatggcaaccattcccagcgcctgatcaaactattgttgcttggcgctggtttgaacccggctaacacggccgacgttgatctggtcaatgcttggctaagagctgcctggttgcagttggccagaccgggctcagcgctgaaggctgacgaaaaccggtactacctacccagagagcacatgctgttctcgttggttgaccgggcctatgtctgtccagttaccaacaagctgttggataccaccttcaaaggctttacgccttacctacccgctcacctggatttctctcagttgactgaagagcagcgcgagagctatcaggcagagccgattgagctacctgacctgtgggagtttgaccgttctcaggacgactatgcgccgggacttgcgcgagttagaaacctggtggcgaatgatcctcttgtaagcgatctacgagcacggaacctgtggacggatatcaatgatcgggtagtggaaggtggcttctattaccgcacagcggagcactcggcccagcagtcttctgaacgcctcggctcctatgaagagatgttcaagaaggggcagctcaacgttctgaactgctccaccaccatggagatgggcgtagatattggcggtatttctgctgtggtcatgaacaatgtaccaccgcacccggccaactacctgcagcgtgccggtcgcgcggggcgaagcaaggaatccagggcgattacctacacgctttgtaagaacaacccgcatgatcagcaggttttcgccaatccgagttggccgttcgagaccaggatccccgcgccagtggtggcattgaactccgagcgactcgtacaacggcacatcaactcgctactgttggcggactttctctgcaatgtggttgggctcactcagactgagaaaaccagtctgaatacgcagtggttctacgacgatgagcacggtctctcacaatgtgaccgattcattgagcggctgggacaagttgtctccgatctggacgacgcgctcaaagacttggtgaaaggcacagctctggtcggtgtggacccggctcagctgcgccgtcgttcaatcgattcgatcaagccgctgcagagtcgttggctgaagagctatcgcttcttactttctgaggagaagcacgcgaaagccaacagcccctatctgaagcgtctccagattgaaaaggctcgccactgcaatgagtatctgttgcgggatcttgctgcgcgtaccttcctgcctggttatggcttccctaccgacgtggtgaacttcgataacttcacgattgaggattacatccgcgagcaggacgcagggaaaaagttgaagcacgatcgcgaggacaacgtatcccgctacaaggggctgccgtcacgcaatctgtcgattgccattcgcgagtacgctcctggtgcagaaatcgttctggatggccgggtgttcaggtctgccggcgtttccctccactggcataacctcaatgctgatagcaaagaagcgcagaaaatggacattgcgtggcgttgcgatgtctgtggcgctctggactatgaggaggggttgataaagaccgatgagctgacttgcagcaatgtcgactgccagtcactgatcaagccccaaaacattcgcaaggtcctgcagccctctggttttgtcaccgatgcttatgagtcggcctccaatgacatccagcatcagaaattcatcccagttgaaaccgcctgggttttcgtcaacgccaacaagactccattgccaaacccggcggttggggcaatggcttatggtgcggatggaaaggtcttccatcacagctcgggcgagcacggaacaggttatgccttgtgcatgagttgtggtcgagctgagtccatgcaaccggatagcgggttcccgcgagacctgtcgccgtctggcgagcactatccgccacgcccgaccaaagaggacaaagatcagaacaacaagcgccttccctgccagggcagcgggagcattcttcctagtgtgagccttggcgctgtagctactactgatgtgtttgaactcaccttgcaccatcccgtgcgcggggagttcattgcagactcagcgcaggaaagtgcaattgccatgacgctagcagtggctttgcgggctgcgctggccgagatactgggcgtatctgcttccgaattgggttatgcaactcggccaagcaaactgccaagtggacagtccattcgcgtccttcagcttttcgacgtaatcagcggtggtgcgggctttgccactagcgcgccgctgcatgtcgaggagctgctgcgggggatggtgaagaagctcgattgcaagcattgtgaaactggctgtagtgagtgcctgctggactcccaaacacggcatgatcacgacaagctggatcgcaaggcagcgctcgactggctgggcccagacttcattcatcacgtgggtttgaccgccgaaaacaaactctcattcgccgatggccagtatgcgcctggcagcattgagagcgttctgcgccggctgatcaacgagggtgcaaagagaattactctagtggcctctggtgatgtggcagagtgggatcttcttgctccacagtttcgtaaggcgattcaggcctatgttctggccgacgagctgactgttgagctgctcgtcccggcagatatcactgatggggttcttgtgcaggatctccagcgcctgtcggaccttggagtaaacgtcgggaatgcgatcactgagccaggtgagcatctcgttgcccaggtgtttaaagagagcgaagttgtcacgctggcctcgcgcagcctcgtggcaactgttccaggccgtagctggcatcaaagtgatgagctagtcgtactctcgaagagtcagccggagtttggctggcaggtgatggacctttccagtgcagcgagcgactccttcggcaaggtagcgatcgtcgacatatcaatccacgaggaactcaatgggtcgctgctgcaattcggtgagcgtttctgggagctgcttggcgctcgagatcagcaagttgctgacgtgattgcgactgcgaagatcaacaggctgacctactcagatcgttacattcagaaccccgcggtagttacgatcctgggtgcggttctgaaagatctgaagagccgcatttctgcggatgcggttgtgcaggtgaagacgctattcaaatcaggtcggctgcaaggtcgtaaagccttcgacgactgggccaatcaggacgatttcgagttcttttcacgcaattggctgtcggcaatggttgggcatcaagttgaactgattgtggagtcgtcgaatcgcgaaatccctcatcaccgtaggttggagcttgagtttgaagacggcaggacgctgaaggtccggttcgaccaaggagtggcctattggcaggttcgctttagctcgcatagcgacatgtggtttgactttgatctggctgcccaggatcaactcatgcacatggccaggatagttgaaaccgcacggatacaaaactctgagcagaagtgggcgacggacgtgttggtcgagctaaagagctaa

SEQ ID NO: 29797 - DNA, 3336 bp, Pseudomonas aeruginosa
atgtcgtactccgtaattaagtactcgtcctggctgggacgctttctccagcgtcgtgggctttcagcgcctgatcagcgcggactctatgcgtaccactgcagtctcgaagagtacggagagctgcagcatttgctccgtgagtttgggggctttgatgcggcgttaaaggacccggcagcctgtgcttgtttggtactttttggttcggagtggtatcgccgtgagtaccgcagtgagtatgcctggacctgggacccgatctggaaaactctgggatttaatctgtcgccgggagagctaagcaaggtcatccctaaagggttggaggggtattggaaacgtccccttcatttctacgaagcgggtcatcgggattttctagggtcgctgtttggtgaggggggcttgccctttcaggtattgcgcgagggaggcagccgcttccagtggctgtttgaccgcttgctaaggcagtacgaccagtggcacctgctgggcttcaacaccctacagcaggtggagcagcaactggaaaaggccagtcttcctcaggtgtttgcctcacgtacgtcgatcgaactgattgcgcgtatggtcgatgagcttgtggctctggtccggaattatgggctggcgcaggcggatgagcccgtcgtccgcctggatgctctgaaccccaagtggcgtgaattgttccctctgcctctggataacgagactggcagcgaactcctcaatggtcttttaaagactgcgaccattgagggcaaaaagcgacgccgggatgcgactggatggtcttgtcgacacttttggcatgaggcgcagccggatgtgctcaaggttcaggtctcgatgccggaggaggtggtgcttcgtctgacgacgcagccatctaccacccgttttgagctggccattgtcgaagatggacaggcgattgctgcgcttggacccggctacgcgctggtcgacaacggtgttgcccatatccggctgcgccttcgtgaggtgatcggaaagcggcaggattgcagtgcccaactgagcctggtggctatggcaggtggcatgctgatcgccacccagccgatagagggcagtgcagtggcccttggcgaagtaccgttgggtttcgagccagtgaatgatcgctggcagctgtgcggtcaggcttcattcaatacggctggtgaagagctgctgctggtgctgcccgaaggtgggaagttgaacatggctgcagagggcgaggaagccatcttcagcgatatggcaccggctttttcgctgcatacggtaaaggttcagggcaaggcgcagttccaggttgagagtgatgaactctaccggatacgcacgggacatgcggttggtatgggcttggggctggaactggctggtacccagatcgactggccgaccaagcccgctctgacctttgtcggtctgcctcgtgtgcagtggccgaccgctgctggggaactgcaacagcagggcggtgacctgtacgttgccggcaaacagccgggaagcggcttgttgcaggaggtactcggtacccaatatgtgtcggtgcgcaaccgcagtggcaacgccctgttacgtcgcagggtgggtatcttgccgacggatttccgtgttgagctgcgcagtggtgagaagccggggcaggggagcattttggtgcattcccggcagcgctgcctgctccagattgttgacgacagtctgcaggtacagcaggtaaagcgtgaggatcacaccgagcttaggctctcggcaaagggctttcctccagtcagggtccgcctttcagttacccccagcttgatggctgacccagtggagattgacctgccgtttcccaactcgggttttctggcctttgatggcacaggcaaacatctgaaacgcgatctcagtgtcgacgacctgttgggggcgcgtctgtatctgtttggccgggctggcgcaccaacccgttttagccttgagctgaccctcaggggtagtgcggccaggaatgcttgttacagctggacctacacggtggccgaaaagccgctggagctcagtctgttcaatatccgtgaacagattgttgacctgctttcgcttcagtcgggcattgatcaggtcgtcgagttgcgggtgttcggtaacggtcaggataccagttaccgcatccgtaggtattcgacggagatgcaactggatcgcgaccgtcagatgctgtgtgctgccaatctgcacgatggcgccgacgccattcccgaaccggtgttgatgctgttgcatgatcctatgcgtagctccatcgcgctccgttcccgcaccagcgaaggtgtgcccaccggcgacttcgagttaccgatagctgttgaaagggatggtccctggctggtgttgcccaaatcgggctcatctgtatcgttccggccgctatttatcgctggtggatggaagccgttggcgccgagcgatggaatccagagtctgcaaaaggcagtgttgaccttcgatcatgcttcacctgttagctccttcacgcctgtgttggatgccatggcggttaaccctatgcatagcggctggcagttcttgcgggccttgtatgaagggtacggctatctgcccctggcgaccttcgaggtctggaaggctctggtagggcacacccgcgcgttggcgatggcacttttcaagtttgaaatggaggcgacattccttggccggctggagactgagtttccgattttctgggagtttcttcccattacagaaatccatcttgcggccaagcgcttcgctgcattccttaaggtgaaagggggcgctgaggaagccattgatgctctgatcggacgaatgttttcgcgattgggggaaacctattcagcctacgggcagagtgtgcagcgcttcctttctggcaagcctgttggcccagagatcaaggtgccgctagcgactttcaagagtgtcctgcatggctggtaccttgagttgattcgcgagcgcagtgaggcaaagtggccggagttcggcggcaagcggctggagcgttggcacagcagccaaggctgctcggtgattgccttcaggtcggaaatggattaccgcaatgcggtgctctatctaccggtattcgccgctgcggtcgcctgtggcaaggctcggttcacagatgcgtttgcggatggcgtcgaggcgattttcttcttgcgccaggtccgcgatttcgattcgaagtggttcaactcgatctatcaatattgcttgttgaacagcgtcatggatatgcagaaggcagagtcggttaatggataa

SEQ ID NO: 29798 - DNA, 6216 bp, Pseudomonas aeruginosa; identical to SEQ ID NO: 29782

SEQ ID NO: 29799 - DNA, 3111 bp, Pseudomonas aeruginosa; identical to SEQ ID NO: 29783

SEQ ID NO: 29800 - DNA, 6336 bp, Pseudomonas aeruginosa
atggataagtatttctctgggctagtcgagcaggcgctttcccgtgccactgagtccaccttgagtatcttgagcattaccgatccggacttgcgtgagcacctggaaagtctgatgcgcgcggagtgcgggaaagagggtgcattcctggcgccacccgtgtttgagcagaccttcagctgggaagagtcggcgttcaccatggagcaactggcgagcaaggagcacttgctgagcaaggagatcgtggcctcgctcgatggcaaggcgaatgggcgttaccgctttggcgcgagttggaaacccttcacccaccagttggccagctggcgctcattgctagagaagaagcattcggtggtcgtcaccagtggtaccggctcgggtaagaccgaatgctttatggtgccggtgctggaggatctttatcgcgagtaccgtgacgcagctcgtcagccgctggtcggggttcgggcgctgttcctgtatccacttaacgccctgatcaactcgcagcgcgaacgtttgaatgcctggactcagagctttggaagcggcattcgctattgcctgtacaacggcaatacaccggagttgcaggcgaatgtgcgcagcgagcagagcctaaagcctaacgaaattctgtcgcgcgagctgatgcgtacgcaaccggcgcctattctggtcaccaacggcaccatgctcgaatacataatggtgcgccaggtcgatgcgcccatcgtaagaatctccagagagcagaaatcgctgcgctggattgttctggacgaggctcacacttacgtgggttcccaggcggctgaattggcattgcagctgcgacgggtgatgacagccttcggcgttacgcctaaggatgtccgctttgtggcgacctctgcgactattgccggtgaggacgctgcaggacagttgaagcagtttctctcggatctgtcgggggggccggttacgcagattgatgtctgggggggtaaccgggtcattcctcctcttgccccctgtcaacaaacgctggttgctctggatacgctcgagtccatgccgcctgtaattgcggacgatccagaggttcatccggatcgatacgaggccctggtccattctccgcaagcccgagcactgagaaatctgctggtgaccacccccaagccgttgaagctaaccgagatggtcagccagatgcgtcaggaaggtgggtggtcactgtcacaggacgaaatactacgttggttggatgtgtgttcaggcactcgtctttcagccagtgagccggcgtttctgaagctgcgggcgcacttcttccagcgcactactcacgggttatgggcctgctttgacaagtgctgctcagcaaagtccggaacggcgctgcaacaaaactggccctttggttatgtctacgccaatcagaggcaaacctgcagctgtggcagcccggtattcgagttggcgttctgcaatgactgcaatgagccgcatctgttggcgcgggataagaacggaaagctgatccagtgggaaagctctggtggcgatgaattttccctgcagactgaaacacctgttgaggaagatgcgggggctggtggctcaggggtactttcagtcaagacaccgctggtgctttgctcgttcgaaaatgccggcagcgcatacatccccgttgaggtcgataagttcgctggttcattcgcagctgtttcagctgaacgggtacggtttggggttagagatcttgatgccaagtgcagccacaacagctgtggatttagtgggctgcacggagcttctcctttccgccgcgcaatgctgggcggacccttctatgtagccaatgccgtgccgacagtccttgaatactgtcaagactatcaagaggaagatcagacgccggagcacggtccgcagtctctgcctggcagaggccgtcggctaattacctttacggacagccgccagggcacggcgcgcatggctgtacgtatgcaacaggaggcggagcgcagcaggttgcgtggacttgtcgtggagattttgagctggcaccagcggagccaggccagctctcaggtagattccagccgcatcgatccgtcggttttgcaacaattaatcgccaaggcgaaagaggaagtagagctataccgcagcgttggtatcaaggaggaagtcagggccgcggaggaaaaagttacacggtttacagccatgctagcttcagcaactggagcgaaagttaggccgacgctagtttctctagcttggtcggagctctccaatgagctcaagcagaaggcagacctgaaaggctcgatgctgctttacaacaagtatcagaagcccgagatcttccgggaccatgatggcccctacaagctggcggaaatgttgctgttccgcgagtttatgcgccgcccgaaacggcagaacagtctggaaacccaagggctggtgaaggtcgcatacgttggcatggataaggtccaagaagtgccggcgtactgggggcagaaaggtctgacgctcgatgattggcgtgacttcctaaaggtggcgctggactttcatgttcgggagaacagctatattcaggtcgatgagggctggttgagttggatcggtagccgtttttctgccaagagtctgcgtaatcccgagtcgaaagaagcggatgagatccgggtcaagcgctggcctcagatccgcaatggcaaccattcccagcgcctgatcaaactattgttgcttggcgctggtttgaacccggctaacacggccgacgttgatctggtcaatgcttggctaagagctgcctggttgcagttggccagaccgggctcagcgctgaaggctgacgaaaaccggtactacctacccagagagcacatgctgttctcgttggttgaccgggcctatgtctgtccagttaccaacaagctgttggataccaccttcaaaggctttacgccttacctacccgctcacctggatttctctcagttgactgaagagcagcgcgagagctatcaggcagagccgattgagctacctgacctgtgggagtttgaccgttctcaggacgactatgcgccgggacttgcgcgagttagaaacctggtggcgaatgatcctcttgtaagcgatctacgagcacggaacctgtggacggatatcaatgatcgggtagtggaaggtggcttctattaccgcacagcggagcactcggcccagcagtcttctgaacgcctcggctcctatgaagagatgttcaagaaggggcagctcaacgttctgaactgctccaccaccatggagatgggcgtagatattggcggtatttctgctgtggtcatgaacaatgtaccaccgcacccggccaactacctgcagcgtgccggtcgcgcggggcgaagcaaggaatccagggcgattacctacacgctttgtaagaacaacccgcatgatcagcaggttttcgccaatccgagttggccgttcgagaccaggatccccgcgccagtggtggcattgaactccgagcgactcgtacaacggcacatcaactcgctactgttggcggactttctctgcaatgtggttgggctcactcagactgagaaaaccagtctgaatacgcagtggttctacgacgatgagcacggtctctcacaatgtgaccgattcattgagcggctgggacaagttgtctccgatctggacgacgcgctcaaagacttggtgaaaggcacagctctggtcggtgtggacccggctcagctgcgccgtcgttcaatcgatttgatcaagccgctgcagagtcgttggctgaagagctatcgcttcttactttctgaggagaagcacgcgaaagccaacagcccctatctgaagcgtctccagattgaaaaggctcgccactgcaatgagtatctgttgcgggatcttgctgcgcgtaccttcctgcctggttatggcttccctaccgacgtggtgaacttcgataacttcacgattgaggattacatccgcgagcaggacgcagggaaaaagttgaagcacgatcgcgaggacaacgtatcccgctacaaggggctgccgtcacgcaatctgtcgattgccattcgcgagtacgctcctggtgcagaaatcgttctggatggccgggtgttcaggtctgccggcgtttccctccactggcataacctcaatgctgatagcaaagaagcgcagaaaatggacattgcgtggcgttgcgatgtctgtggcgctctggactatgaggaggggttgataaagaccgatgagctgacttgcagcaatgtcgactgccagtcactgatcaagccccaaaacattcgcaaggtcctgcagccctctggttttgtcaccgatgcttatgagtcggcctccaatgacatccagcatcagaaattcatcccagttgaaaccgcctgggttttcgtcaacgccaacaagactccattgccaaacccggcggttggggcaatggcttatggtgcggatggaaaggtcttccatcacagctcgggcgagcacggaacaggttatgccttgtgcatgagttgtggtcgagctgagtccatgcaaccggatagcgggttcccgcgagacctgtcgccgtctggcgagcactatccgccacgcccgaccaaagaggacaaagatcagaacaacaagcgccttccctgccagggcagcgggagcattcttcctagtgtgagccttggcgctgtagctactactgatgtgtttgaactcaccttgcaccatcccgtgcgcggggagttcattgcagactcagcgcagggaagtgcaattgccatgacgctagcagtggctttgcgggctgcgctggccgagatactgggcgtatctgcttccgaattgggttatgcaactcggccaagcaaactgccaagtggacagtccattcgcgtccttcagcttttcgacgtaatcagcggtggtgcgggctttgccactagcgcgccgctgcatgtcgaggagctgctgcgggggatggtgaagaagctcgattgcaagcattgtgaaactggctgtagtgagtgcctgctggactcccaaacacggcatgatcacgacaagctggatcgcaaggcagcgctcgactggctgggcccagacttcattcatcacgtgggtttgaccgccgaaaacaaactctcattcgccgatggccagtatgcgcctggcagcattgagagcgttctgcgccggctgatcaacgagggtgcaaagagaattactctagtggcctctggtgatgtggcagagtgggatcttcttgctccacagtttcgtaaggcgattcaggcctatgttctggccgacgagctgactgttgagctgctcgtcccggcagatatcactgatggggttcttgtgcaggatctccagcgcctgtcggaccttggagtaaacgtcgggaatgcgatcactgagccaggtgagcatctcgttgcccaggtgtttaaagagagcgaagttgtcacgctggcctcgcgcagcctcgtggcaactgttccaggccgtagctggcatcaaagtgatgagctagtcgtactctcgaagagtcagccggagtttggctggcaggtgatggatctttccagtgcagcgagcgactccttcggcaaggtagcgatcgtcgacatatcaatccacgaggaactcaatgggtcgctgctgcaattcggtgagcgtttctgggagctgcttggcgctcgagatcagcaagttgctgacgtgattgcgactgcgaagatcaacaggctgacctactcagatcgttacattcagaaccccgcggtagttacgatcctgggtgcggttctgaaagatctgaagagccgcatttctgcggatgcggttgtgcaggtgaagacgctattcaaatcaggtcggctgcaaggtcgtaaagccttcgacgactgggccaatcaggacgatttcgagttcttttcacgcaattggctgtcggcaatggttgggcatcaagttgaactgattgtggagtcgtcgaatcgcgaaatccctcatcaccgtaggttggagcttgagtttgaagacggcaggacgctgaaggtccggttcgaccaaggagtggcctattggcaggttcgctttagctcgcatagcgacatgtggtttgactttgatctggctgcccaggatcaactcatgcacatggccaggatagttgaaaccgcacggatacaaaactctgagcagaagtgggcgacggacgtgttggtcgagctaaagagctaa

SEQ ID NO: 29801 - DNA, 3336 bp, Pseudomonas aeruginosa
atgtcgtactccgtaattaagtgctcgtcctggctgggacgctttctccagcgtcgtgggctttcagcgcctgatcagcgcggactctatgcgtaccactgcagtctcgaagagtacggagagctgcagcatttgctccgtgagtttgggggctttgatgcggcgttaaaggacccggcagcctgtgcttgtttggtactttttggttcggagtggtatcgccgtgagtaccgcagtgagtatgcctggacctgggacccgatctggaaaactctgggattcaatctgtcgccgggtgagctaagcaaggtcatccctaaagggttggaggggtattggaaacgtccccttcatttctacgaagcgggtcaccgggattttctagggtcgctgtttggcgagggaggcttgccctttcaggtattgcgcgagggaggcagtcgctttcagtggctgtttgaccgtttgctaaggcagtacgaccagtggcacctgctgggcttcaacaccctacagcaggtggagcagcaactggaaaaggccagccttcctcaggtatttgcctcgcgtacgtcgatcgaactgattgtgcgtatggtcgatgagcttgtggctctggtccggaattatgggctggcgcaggcggacgagcccgtcgtccacctggataccatgaaccccaagtggcgtgaattgttccctctgcctctggataacgagaccggcagcgaactcctcaatggtcttttaaagacagcgaccattgagggcaaaaagcgacgccgggatgcgactggatggtcttgtcgacacttttggcatgaggcgcagccagatgtgctcaaggttcaggtctcgatgccggaggaggtagagcttcgtctgacgacgcagccatctactacccgttttgagctggccattgtcgaagatggacaggcgattgctgcgcttggacccggctacgcgctggtcgacaacggtgttgcccatatccggctgcgccttcgtgaggtgatcggaaagcgacaggattgcagtgcccaactgagcctggtggctatggcaggtggcatgctgatcgccacccagccgatagagggcagtgcagtggcccttggcgaagtaccgttgggtttcgagccagtgaatgatcgctggcagctgtgcggtcaggcttcattcaatacggctggtgaagagctgctgctggtgctgcccgaaggtgggaagttgaacatggctgcagagggcgaggaagccatcttcagcgatatggcaccggctttttcgctgcatacggtaaaggttcagggcaaggcgcagttccaggttgagagtgatgaactctaccggatacgcacgggacatgcggttggtatgggcttggggctggaactggctggtacccagatcgactggccgaccaagcccgctctgacctttgtcggtctgcctcgtgtgcagtggccgaccgctgctggagaactgcaacagcatggcggtgacctgtacgttgccggcaaacagccgggaagcggcttgttgcaggaggtactcggtacccaatatgtgtcggtgcgcaaccgcagtggcaacgccctgttacgtcgcagggtgggtatcttgccgacggatttccgtgttgagctgcgcagtggtgagaagctggggcaggggagcattttggtgcattcccggcagcgttgcctgcttcagattgttgacgacagtctgcaggtacagcaggtaaagcatgaggatcacaccgagcttaggctctcggcaaagggctttcctccagtcagggtccgcctttcagttacccccagcttgatggctgacccagtggagattgacctgccgtttcccaactcgggttttctggcctttgatggcacaggcaaacatctgaaacgcgatctcagtgtcgacgacctgttgggggcgcgtctgtatctgtttggccgggctggcgcaccaacccgttttagccttgagctgaccctcaggggtagtgcggccaggaatgcttgttacagctggacctacacggtggccgaaaagccgctggagctcagtctgttcaatatccgtgaacagattgttgacctgctttcgcttcagtcgggcattgatcaggtcgtcgagttgcgggtgttcggtaacggtcaggataccagttaccgcatccgtaggtattcgacggagatgcaactggatcgcgaccgtcagatgctgtgtgctgccaatctgcacgatggcgccgacgccattcccgaaccggtgttgatgctgttgcatgatcctatgcgtagctccatcgcgctccgttcccgcaccagcgaaggtgtgcccaccggcgacttcgagttaccgatagctgttgaaagggatggtccctggctggtgttgcccaaatcgggctcatctgtatcgttccggccgctatttatcgctggtggatggaagccgttggcgccgagcgatggaatccagagtctgcaaaaggcagtgttgaccttcgatcatgcttcacctgttagctccttcacgcctgtgttggatgccatggcggttaaccctatgcatagcggctggcagttcttgcgggccttgtatgaagggtacggctatctgcccctggcgaccttcgaggtctggaaggctctggtagggcacacccgcgcgttggcgatggcacttttcaagtttgaaatggaggcgacattccttggccggctggagactgagtttccgattttctgggagtttcttcccattacagaaatccatcttgcggccaagcgcttcgctgcattccttaaggtgaaaggggtcgctgaggaagccattgatgctctgatcggacgaatgttttcgcgattgggggaaacctattcagcctacgggcagagtgtgcagcgcttcctttctggcaagcctgttggcccagagatcaaggtgccgctagcgactttcaagagtgtcctgcatggctggtaccttgagttgattcgcgagcgcagtgaggcaaagtggccggagttcggcggcaagcggctggagcgttggcacagcagccaaggctgctcggtgattgccttcaggtcggaaatggattaccgcaatgcggtgctctatctaccggtattcgccgctgcggtcgcctgtggcaaggctcggttcacagatgcgtttgcggatggcgtcgaggcgattttcttcttgcgccaggtccgcgatttcgattcgaagtggttcaactcgatctatcaatattgcttgttgaacagcgtcatggatatgcagaaggcagagtcggttaatggataa

SEQ ID NO: 29802 - DNA, 6336 bp, Pseudomonas aeruginosa; identical to SEQ ID NO: 29770

SEQ ID NO: 29803 - DNA, 3330 bp, Pseudomonas aeruginosa; identical to SEQ ID NO: 29771

SEQ ID NO: 29804 - DNA, 6216 bp, Pseudomonas aeruginosa; identical to SEQ ID NO: 29784

SEQ ID NO: 29805 - DNA, 3111 bp, Pseudomonas aeruginosa; identical to SEQ ID NO: 29769

SEQ ID NO: 29806 - DNA, 6336 bp, Pseudomonas aeruginosa; identical to SEQ ID NO: 29776

SEQ ID NO: 29807 - DNA, 3336 bp, Pseudomonas aeruginosa; identical to SEQ ID NO: 29777

SEQ ID NO: 29808 - DNA, 6216 bp, Pseudomonas aeruginosa
atgctctatcagaagaactatttctccgctctcaccggcaacctgagcacccgcagcgagcgcgccgcccagggcctgctcagtctaggcaatccgcagctgcggcagttcctgcatgatcagctgaccgccgcccccggcactccgggcgcctggctggccgacccggtcttcgaaccgaccttcggctggcaggaaagctctgaaaccatgagttcgctggccggcggtgacctactacaccgacgccttgccgaagccatggcggccccgcccaaggagccccatgatcttgcagaggaatatgccttccccagcaatcgccatcctttcacccaccagttggcggcctgggagattctcaaccgtcccgagccgcaatcgctggtggtgaccagcggcaccggctcgggcaagaccgaatgcttcctggtgccggtcctcaaccagctggccaaggccatcgacgcgggcgaagacccggaaggcgttcgcgccctgttcatctatccgctgaacgcgctgatcaactcgcagcagaaccgcctggatgcctggacagacggcttcggcgggcagattcgccactgcctgtacaccggcgcgctggagaatgagcgcaagacgtccgaccagcagtacaagggtcaggtgatcgaccgcaagagcctgcgcgccagcccgccgcaactgctggtgaccaacgcgaccatgctggagtacatgctcatccgcaaggatgatgagccgatcctgcagaagtcggccggcaagctgcgctggatcattctggacgaggcgcacactcacatcggctcccaggccgcggagatggcgctgctgctgcgccgggtgatgctggccttccaggtcaaaccgcaggatgtgcgcttcgtggcgacctcggccaccttcggctcggatacccagaccatcgagagcctgcgcaccttcctcgccgatatcggcggagtggatccgcagcaggtgcatgtcgtgcagggtcatcgggatatcccggcgctgctgaacgccacgcccgatgccgagcaggacacccctgaagccatcggcgccatcgaggcggaccaggagcagtcgacgctgcgctaccggcgtctggaggccagccccaccgctcggcggctgcgcgccctgttcatgcctgatggccaggtgaaaccacaaagcctgcaagggctgatccgtgagtccggtctaccctcggcgcaggtgctcgcctggctggatctgctgtccggcaccaagagtgccgagggcctgtccttcctgccgctgcgcgcacacctgttccataacgtgattccggcaatccgcgcctgcgtggaccgccactgcagccacaaggccggcaccgcgctggcacatgccgactggccgttcggcatggtctatctggaggagcggactcactgccgctgcggcgcgccgctgatgccactggtgtcctgcgaggagtgcaacgagagcttcctgcaggcggccaccaaaagcagtagcagtgctctggtcgatccgacacagcaacaggacgacgagttcgctctcgaagatgaaaccacggaggccgatgatcagaccaaggataaggatactgtgtcatccatccagatcctgatcaccaatcgcgccgtcaagaatggcagtgcagacttcctcgatcgcgccactcaccgactgacgcccaatcgtccggcggatggtggcatcgagctgcagctcttccgcactgccaagaacgaatgcccctgctgtggcgccaatatccagggccgcagcctgctgcgccccacgcgcatcggtacgcccttcaccctcagcacggtgatcggcaccctgctggagttctgcccgccggatccgatgccgaccggcaagccgttccagggccgcaagctgatctccttcaccgacagccgccagggcaccgcacggattgccatcaagctgcagcaggactccgagcgcaaccggattcgcgggctgatctatcagcgcctgctgcaggcacaacccgtcaatgggctgtccgcagaggacttgcaggacctgcaagaccttcaaacagcaacgcaactgagtcgtatcgagcagaaacacctgcagtctttgctcgacaggcaggctgaagctacaaagggcgcggaaataagctggacagatatggccaaccatctggccggcacgcctgagctacagatgggcatgctcgactactacaacaacctcgcgccgaacaccttcggcaagcaggacagtgtcgccctggccagcatgctgctggcgcgcgagttctatcgccgcccgaagcgcgccaacagcttggaaaccctgggcctggtacaggtctgctatcccaagctggccaacgtcaccggcaaacccatggcctggcccgcgcacctggatgccgagtcttggcgtacctacctgaaagtgctgctggacttcttcgtccgcgaaaacaccatcctgaacatcaacgaacgctggcagtcactgatcggcgcacgcattcgccccaaatgggtagttgcgccggtcttgggggaaaagcctgaaaagctgcagagccgctttgtccgctggccggcggtcaataccgtcaatggcatccagtcgcgggccatcctgctgctctgcaaggcgttcaactggtcgaccgcggcccatcaggaccagatcgactcgatcctgagcgaggcctggcgggtactgacccagcaggcaaagctgctgatttcgtcaggcgacggctatcagctcgacctcaaggacctgagcttccggctgcccgaaacggtctaccagtgcccggtatcgcggcgcttcatcgacaccccgttcgagcagctcagtccctatacgccacgtaccgaccgcgagatggtcgtcaaggtgacgccctacactctgccgcgtccgcccgaggcgctcctgcatgtgccgggtgatgagggcctgctggcgatccgcgactggctgaacagcgagccgcagatccagcagctgcgcaaggacgcgctctggtcggacgtcatggaccgggtcatcgaggggggccactacttccgtgccgccgagcactcggcgcagcagccgaagagcaagctggacagctacgaaggcctgttcaagaccggcaggctgaacctgctgagctgctcgaccaccatggaaatgggcgtggacatcggcggcatcagcgtggtggcgatgaacaacgtgcccccgcacccggccaactacctgcagcgtgccggccgtgccgggcgccgccgcgagggacgctcgctggccctggccgtctgcaagaacaccccgcacgaccagagcgtgttcaacaacccgctctggccgttcaacacgcccatgcgcatgcccaaggtgtccctgcagagccccgatctggtacagcgccacgtcaatgcctggctgctgtcgcactggctcaagcacatggtcgccgcccaggaaatcaagtcgatgaccgccggtgccttcttcctcgacggcgaactgcctatgtcgctggccgcgcgtttctgcctgtggtgcgacaaccaggcggtcgataccgaaacgctggtgggacaggccctcaaggacatcacccgccgcagcatcctcgacaccaccccgcagcccgagctgttcaagcatgccagccgccgcatgaaagagatcatgcaggcatggcagcaggaatactcggccagccacgcccagctgctgcagattgccgacaagaaggccgctgcctaccgcgccatggatgcacagctcagccgcatcgcgaaggagtacctgctcagcgagctggctgaccggcgcttcctgccgggctacggcttcccgaccgacatcgtcagcttcgacaaccgctgcatgcagaccttgaagcgggaggacggcgaccagcgcgaggacaaccgcgcccgttaccgctcgctggcttcccgcgaccgcatcaccggcctgcgcgaatatgcgccgggcgccgagctggtcatggatgggctggtctacaagtcctccggcatcaccctgaactggcacgctcccgcgtctgccgaaaacgtcaaggagcttcagctgttcaagaaggcctggcgctgtgggcaatgcggtgccagtgactcggccatcaatcccggactggagatcaactgtcaggaatgcggcgcgccgatcgagcgcgacaacatccgtgaatacctggtgcctgcaggctttgccgtggacttcttcgacgagccgcacaacgacatcagccgcctgcagtatgtgccggtcaatgcgccctggctgaacgtgccggccagctgggtctgcctggccaacccggcactcggccagttccgcgccagccagcaggcgcagctgttcaactacacctcgggcgccaaccagaagggctttgccatctgcctggagtgcggcaaggccgagcccatgctgagctatcccgatgcatccgcccctgccaatgaacagtatctgccggctattttccgccagaaggcacagcaccgccgcctgcgcggtggcaaaagcaatgaacaaggcgacgggacaaacatctgccccggcagccacaacagctggaagatcaaacagaacgtccaccttggccatgacagcctgaccgatgcgctggaactggtgctgcgcaaccctaccagcggcgaactgctcaacgacgatatcaccgcctactcgattgccgtggcgctgcgcgaggcgattgccgccgatctgggcatacaaaccgaagagctgggctgcgcaagccatccgatcaaggtcgatggccagccaacccgcgccatccaggtgttcgacctgcgcagcggtggctacaccacccaggccgcggagcggctgaatgaagccagcctgtggcgaaaggtcatcgctcgtctggacagctgcaactgctcgcatgcctgccagaactgcctactcagtttcgatacccgcttcgaggccgagcgcctcaatcgtcacgtcgcgctggagtggatcaatcagacttggcttgccggcctggcgctgcccgccgagctcgctgtctttggtccgaaaagccaggcagaaatcgccactctacaggaagcggtcgaaagagcgattactagggacgacaacgcgaagaccgtagccatttacttcactgcacccgccgaagagtgggatcttgctgtcgcacgccgcctgaggcatcaactgcatagctgggaaagcgtcggacacctagtgcaattacatttactggaaagtaccgtttccagcctgccaagagaccaaaaggaatggttggcaaagctagccttcaacggagtacagatatgcctacacaattccataccggatctcggggcgctggcactcaatgtctcactgcaaggcccacaaggctgcattgcctgggctagcgacaatacgaacctggccgcacctggccacacatgggatctagcggaggccggtgcacggatcatccgaggcaccccctccgacctcaaggcagagcgcatcttgaatgctgccgatctcatgccggccccaccccctggcttgatcaagatcgagatcggcaatcagctggatggctcgctcgacaactttgctcgtcggttctgggagcacctaggtactgaggccaatggcctgattaatgatgccctcacaggcaaggatccaattacagaactggtttacagcgaccgttacgtatgcagcccgctagttgtgaatctgctggtcagcgtgatccacgagctcggacggctgagtgatgcagatttcgctatccgaatcctaggccgacaatatcagcgggaagacaatcgctcgccttggcagtaccggcatgactggcactcagctcgcgagcgcgatgaggccctccgccaggctctggcgtactgcggccgcgagggagaggtgctaagcctgcctaccttgccgcactaccgccggctacagcttaagctgcgctccggtaatcaactgaccatccagtttgatcaggggctttcgtattgggaagccgagcgcagcgaaaagtcttaccagctcaggttcgactttgcatcacgcgagcttggagaagaaatcatggagcgcatcaggtgtaaagtttcggcggctggggaggaaaacactcagatattcctctcttcctcttga

SEQ ID NO: 29809 - DNA, 3111 bp, Pseudomonas aeruginosa; identical to SEQ ID NO: 29769

SEQ ID NO: 29810 - DNA, 6216 bp, Pseudomonas aeruginosa; identical to SEQ ID NO: 29782

SEQ ID NO: 29811 - DNA, 3111 bp, Pseudomonas aeruginosa; identical to SEQ ID NO: 29783

SEQ ID NO: 29812 - DNA, 6198 bp, Pseudomonas aeruginosa
atgctctatcagaagaactatttctccgccctcaccgacaacctgagcacccgcagcgagcgtgccgcccagggcctgctcagcctcggcaatccgcagctgcgccagtttctgcatgaccagctaaccgccgcccctggcactccgggcgcctggctggccgatccggtcttcgagccgaccttcggctggcaggaaggtgctgaaaccatgggttcactggccggcggcaacgtgctgcactggcgccttgccgatacgatggcacacccgcccaaaaaggaagacggagaaggccttatagatccttttccaaaagaccgtagattgtttacgcatcagttagcagcgtgggagatcctcaaccgtgcggagccgcaatcgcttgtggtgaccagcggcaccggctcaggcaagaccgaatgcttcctggtgccggtcctcaaccagttggccaaggccatcgacgcgggcgaagacccggaaggcgttcgcgccctgttcatctacccgctgaacgcgctgatcaactcgcaacagaaccgcctggatgcctggacccacggattcggcggacagattcgccattgtctatacaccggtgccctggagaacgaacgcaggaatagagaccagcagtacgatggccaggtgatcgaccgcaagagcctgcgcgccagcccgccgcaactgctggtgaccaacgcgaccatgctggagtacatgctcatccgtaaggatgatgagccgatcctgcagaagtcggccggcaagctgcgctggatcattcttgacgaggcgcacacccacatcggctcccaggccgcggagatagcgctgctgctgcgccgggtaatgctggccttccaggtcaagccgcaggatgtgcgcttcgtggcaacctcggccaccttcggctcggatacccagaccatagagagcctgcgcaccttcctcgccgatatcggcggagtggatccgcagcaggtgcatgtcgtgcagggtcatcgggatatcccggcgctgctgaacgccaccccggatgccgagcaggacacccctgaagccatcggcgccatcgaggcggaccaggagcagtcgacgctgcgctaccagcgtctggaagccagccccaccgctcggcggctgcgcgccctgttcatgcctgatggccaggtgaaaccacaaagcctgcaagggctgatccgtgagtccggtctaccctcggcgcaggtgctcgcctggctggatctgctgtccggcaccaagagtgccgaggggctgtccttcctgccgctgcgcgcgcacttgttccataacgtgattccagcgatccgtacctgcgtggaccgcaactgcagccacaaaaccggtaccgcgctggcacacgccgactggccgttcggcatggtctatctggaggagcggactcactgtcgctgcggcgcaccgctgatgccgctggtgtcctgcgaggagtgcaacgagagcttcctgcaggcggcgacgaccagccacgggatgctgatcgaccagtcgcagcaacagctcgacgagttcgccctcgatgaagagcctacagatactgacgagccagccgaagacagcgcgctactcagtcagactctgattaccaaccgcccggtcaaccacagctatccggagtttctcgatagagccagccagcgcctgatgttcgatggccccaagaatggctacatcgagctgcaggttttccgcagccaaaagaatgagtgcccatgctgtggggctaccttgcaaggccgcagcctgcttcgcccggcacgcatcggtacccccttcaccctgagcacggtaatcggtaccctgctggagttctgcccgccggatccgatgcctaccggcaagcctttccagggccgcaagctgatttccttcaccgacagtcgccagggcacggcgcgtattgccatcaagctgcagcaggactccgagcgcaatcggatccgcgggctgatatatcagcgcttgctgcaggcacaaccgatcgatggactgtccgcagaggacttgcaggatctgcaagacctacaaacagcaacgcaactgagtcgtatcgagcagaaacacctgcagtctttgctcgacaggcaggctgaagctacaaagggagcggaaataagctggacagatatggccaaccatctggccggcaccccggagctgcagatgggcatgctcgattactacaacaacctcgcgccgaataccttcggcaagcaggacagtgtcgccctggccagcatgctgctggcgagcgagttctatcgccgcccgaagcgcgccaacagcttggaaaccctgggcctggtacaggtctgctatcccaagctggccaacgtcaccggcaaacccatggcctggcccgcgcacctggatgccgagtcttggcgtacctacctgaaagtgctgctggacttcttcgtccgcgaaaacaccatcctgaacatcaacgagcgctggcagtcactgatcggcgcacgcattcgccccaaatgggtagttgcgccggtcttgggggaaaagcctgaaaagctgcagagccgctttgtccgctggccggcggtcaacaccgtcaatggcatccagtcgcgagccattctgctgctctgcaaggcattcaactggtcgaccgcgacccatcagaatcagatcgactcgatcctgagtgaggcttggagggtactgacccagcaggcaaagctgttgattacgtcaggcgacggctatcagctcgacctcaaggacctgagtttccggctgcccgaaacggtctatctgtgcccggtatcgcggcgcttcatcgacaccccgttcgagcaactcagtccctatacgccacgtaccgaccgcgagatggtcgtcaaggtgacgccctacaccctgccgcggccgcccgaggcgctcctgcatgtgccgggtgatgagggcctgctggcgatccgcgactggctgaacagcgagccgcagatccagcagctgcgcaaggacgcgctctggtcggacgtcatggaccgggtcatcgagggtggtcactacttccgcgctgccgagcattcggcgcagcagtcgcagcagaagctaaagggctacgagaagctctttgaaaaaggcaagctgaacctgctgagctgctcgaccaccatggaaatgggcgtggatatcggcggcatcagcgtggtagcgatgaacaacgtccccccgcacccggccaactacctgcagcgagccggccgcgccgggcgccgccgcgaggggcgctcgctggccctggccgtctgcaagaacaccccgcacgaccagagcgtgttcaacaacccgctctggccgttcaacacgcccatgcgcatgcccaaggtgtccctgcagagccccgatctggttcagcgccacgtcaatgcctggctgctgtcgcactggctcaagcacgtggttgctgcccaggaaatcaagtcgatgaccgctggcgccttcttcctcgacggcgaactgcctatgtcactggccgcccgtttttgcctgtggtgcgacaaccagagggtcgataccgaggcgttggttgaacagtcgctcaaggacatcacccgacgcagcatcctcgatactgccccgcagcccgagctgttcaagcacaccagccgccgcatgaaagacatcatgcaggcatggcagcaggaatactcggccagcgaagcccaactgcagcagattaccgacaagaaggccgccgcctaccgcgctatggaggcacagctcagccgtatcgagaaggagtacctgctcagcgaactggctgacaggcgcttcctgccgggctacggcttcccgaccgacatcgtcagcttcgataaccgctgcatgcagaccttgaagcgggaggacggcgaccagcgcgaggacaaccgcgcccgctaccgctcgctggcttcccgcgaccgtatcaccggcctgcgcgaatatgcgccgggtgccgagctggtcatggacgggctggtttacaaatcctctggcatcacgctgaactggcacgcgcctgcgtctgccgaaaacgtcaaggagcttcagctgttcaagaaggcctggcgctgtgggcaatgcggtgccagtgactcggccatcaatcccggactggagatcaactgccaggaatgcggcgcgccgatcgagcgcgacaaaatccgtgaatacctggtgcctgcaggctttgccgtggacttcttcgacgagccgcacaatgacatcagccgcctgcagtatgtaccgatcaaagcgccatggctgaacgtgcctgccaactggatctgtctggtcaatccggcgctcggccagttccgcgccagccagcaggcacacctgttcaactacacctcgggcgccaatcagcagggctttgccatctgcctggagtgcggcaaagctgaacccatgctcagctatcccgatgcatccgcccctgccaatgaacagtatctgccggctattttccgccagaaggcgcagcaccgccgcctgcgtggcggcaggagcgacgacggggacaacatctgccccggcagccacaacagctggaagatcaagcagaacgtccacctcggccatgacagcctaaccgatgcgctggagctggtgctgcgcaaccctaccagcggcgaactgctcaacgacgacatcactgcttactcgattgccgtggcactgcgcgaagcgattgccgccgatctgggcatacagaccgaagagctgggctgcgacaaccacccgatcaaggtcgatggccagccaacccgagccatccgggtgttcgacctgcgcagcggtggctacaccacccaggccgcggagcggctgaatgaagccagcctgtggcgaaaggtcatcgcccgtctggacagctgcaactgctcgcatgcctgccagaactgcttactcagtttcgatacccgcttcgaagccgagcgcctcaatcgtcacgtcgcgctggagtggatcaatcagacttggcttgccggcctggcgctgcccgccgagctcgctgtctttggtccgaaaagccaggcagaaatcgccactctacaggaagcggtcgaaagagcgattactagggacgacaacgcgaagaccgtagccatttacttcactgcacccgccgaagagtgggatcttgctgtcgcacgccgcctgaggcatcaactgcatagctgggaaagcgtcggacacctagtgcaattacatttactggaaagtaccgtttccagcctgccaagagaccaaaaggaatggttggcaaagctagccttcaacggagtacagatatgcctacacaattccataccggatctcggggcgctggcactcaatgtctcactgcaaggcccacaaggctgcattgcctgggctagcgacaatacgaacctggccgcacctggccacacatgggatctagcggaggccggtgcacggatcatccgaggcaccccctccgacctcaaggcagagcgcatcttgaatgctgccgatctcatgccggccccaccccctggcttgatcaagatcgagatcggcaatcagctggatggctcgctcgacaactttgctcgtcggttctgggagcacctaggtactgaggccaatggcctgattaatgatgccctcacaggcaaggatccaattacagagctggtttacagcgaccgttacgtatgcagcccgctagttgtgaatctgctggtcagcgtgatccacgagctcggacggctgagtgatgcagatttcgctatccgaatcctaggccgacaatatcagcgggaagacaatcgctcgccttggcagtgccggcatgactggcactcagctcgcgagcgcgatgaggccctccgccaggctctggcgtactgcggccgcgagggagaggtgctaagcctgcctaccttgccgcactaccgccggctacagcttaagctgcgctccggtaatcaactgaccatccagtttgatcaggggctttcgtattgggaagccgagcgcagcgaaaagtcttaccagctcaggttcgactttacatcacgcgagcttggagaagaaatcatggagcgcatcaggtgtaaagtttcggcggctggggaggaaaacactcagatattcctctcttcctcttga

SEQ ID NO: 29813 - DNA, 3111 bp, Pseudomonas aeruginosa
ctgtgcgaggcagccggccagcaggggttaccccaggataagacccgcagactggtcatcgacggacgccacctatggcgtctgcagaccgccatcaagaatgaaggcaagcgcttcatcggcctggtcgcagtgaatggcggcctgcccatgcgcctggtcgagtcggcacagggcgggctgtccggcctgctgcgcatggtcaccgagcaggcgctgcgctacgagctgcaggatgagcagctgcgtcaggctatcgaggcccaagccgagctcttgcccgcctgctaccagcaggcgccggtctacgagctgctcgacaatctggtcaaggcggtgctgcacatccgcaagacctatgtcctgcagggcgcccaagacccaatcgcccggctgcaggaagagtgccctcactgggaagatctcttccccatcgccctcgattctcaggccgccgccagcctgatcaaaggcctggtccgggatacagtcagcatcacgccccagtcgcggcggcctcctttccagatccagcgcggtctgcgcttcagctccgatggctcaatgcccatctacgagctgacattcgcgatgcaggctcaggcccgacgcgatcaggtggccgaagcactggggatggccatggaggcgctgccgccacacttccagctgctgctgcgcatcggcgagcgggaatacctggtcggcgaagctctgcttagagacgaggaataccagctgatcgccaggccgctgccggccatccacagcctccacaatgccgcgcagctgatcgtcagccgctggggcgccaccctgcacattgccaacctaccgggcggcgaagccttgagccatgacgagccgctgatcttcgagaatacctatccctttgcccgcctgctcgcgcagggcgatgcgctggtcaagggcgagtcggcactggcggccatgccggcgagaaccatcgtgtatgccgaagaaggcgaggctcgcgagctgcatgactgcctggccgacgggcaaatgctgatggaacttcccgccggtaccacccggctcacgtacaaacaacagcccttcgttgtcaccatcagcgccagcgctacccgccacccggaagcctactggcatggcaacagtctggaggcgctctccgtgccggggctgctgttccgtggcacgccgcgcctacgcattgagcagggaacgggcttttccagctatgcgcccgcccatgagctgtttatccgcactcaaggcagggagctgccgctcgcccaagcccgggcgccggggctgtgccggctgatctggcgcaaggatggccagcgcctgctgaacacccgcgccgtgcttctcccggacgaagcctccatcacctacgcgccgggcgccagcaccctcgagggcagcattcgcctgcatcactggcctgatgtgccggtgcgctgcgagagcgaacaggtcgcgctggagcgccgccatgatgggacaggcctgctcctgcggctgaagagcaacggcagccggccggccaccacggttccgctgtgtctgcagtggcccgacggcgagcagaggctcactctgcccttccccggctatggcgtcacgctgctgcgcaacgacactcctctcaagctgaatcaggccctgaccatcgaagagctgatcggatgccgtgcggtattgatgtcgacacagggcgccgagaactggcagattcgcctgacgtccagcggcgccgatgcgcgctccaccctctctcaggaaattcgctacaccgggattcgtgaaatccgtctgttcgagctgatcccggcgatacagcagatgttgtcctgccacccggggctcgatcatgtcgtgcagctagagttgattcatgcccaccagacccacgctcgcctacaggtgggccgctactcgacgcgcatccgcctgcacagccagcgcgagatggcgtcactgaacgatagcggctccgacgttctgcttgaggagccgcatgccgagggtctgatattgggcctgccactggcagaaccggaacatgacccggtcagcctgccgctgcatttctccgagcaggtgttcactggcaactggctggtcagcctgccgaccgatgcggtcggtccctggctgctgtacacccccgatgaatccacactgcacagccgtccgaccgtcgttccgccgaccgcaagccaactgtcgaagcccctaaccccgctgcgcgaggcgctctgcgaaggcgatggcgaagagcgcatgcgcctgctcagggccgcgctgcgcgccatggccgcagacccgcaggctgatgactggcagacgctggagctgctgctagaccggctgcaccacctgccactggccagcctggatatctgccaggcactgatccgtgagccgcaggcggtgaccatggccaccctgctgctggacgatttctccagccggctggcagagcgcctgccctgcgagctgcccttcgagtggctgctgatcgcgccaaagcactggttcgacactttcgcgacactgcgccagcagctggcagccgacaatccgcgcatgctgtcggtgatccgcaacgacatccagagcaagagccagttcctgtcacgctggcagccggcgctgcgctttatcttcgatcagggcttgcaccactcgttcgatctacaaagcccagatgtggcgttcttcctgagaaatccggcgatgctcaccgactcttggttgtcccaactgctggatggcgagcactcggccatgcagcagatgttccgacgcaatcccgctgaaacccatcaatatcctggcagtggcaatacggatatcggagccttcctgaaaacaccccacgggcaaatgctcctccgccactgcaagctccccgccaacgacttcaagttggccacggtcatgctgcccttcatggccgccttcgatacctacgccggccgcgggcagcaatggcaagccgacccggcacgcctgttcagcctcagaaacgctcgccagttcgatactgtctggttcgactccgcctatcaactcggcctggccatggcgcaagccgcctcgatgcagaagtga

SEQ ID NO: 29814 - DNA, 6216 bp, Pseudomonas aeruginosa; identical to SEQ ID NO: 29784

SEQ ID NO: 29815 - DNA, 3111 bp, Pseudomonas aeruginosa; identical to SEQ ID NO: 29769

SEQ ID NO: 29816 - DNA, 6216 bp, Pseudomonas aeruginosa; identical to SEQ ID NO: 29774

SEQ ID NO: 29817 - DNA, 3111 bp, Pseudomonas aeruginosa; identical to SEQ ID NO: 29769

SEQ ID NO: 29818 - DNA, 6216 bp, Pseudomonas aeruginosa; identical to SEQ ID NO: 29774

SEQ ID NO: 29819 - DNA, 3111 bp, Pseudomonas aeruginosa; identical to SEQ ID NO: 29769

SEQ ID NO: 29820 - DNA, 6216 bp, Pseudomonas aeruginosa; identical to SEQ ID NO: 29774

SEQ ID NO: 29821 - DNA, 3111 bp, Pseudomonas aeruginosa; identical to SEQ ID NO: 29769

SEQ ID NO: 29822 - DNA, 6216 bp, Pseudomonas aeruginosa; identical to SEQ ID NO: 29808

SEQ ID NO: 29823 - DNA, 3111 bp, Pseudomonas aeruginosa; identical to SEQ ID NO: 29769

SEQ ID NO: 29824 - DNA, 6336 bp, Pseudomonas aeruginosa
atggataagtatttctctgggctagtcgagcaggcgctttcccgtgccactgagtccaccttgagtatcttgagcattaccgatccggacttgcgtgagcacctggaaagtctgatgcgcgcggagtgcgggaaagagggtgcattcctggcgccacccgtgtttgagcagaccttcagctgggaagagtcagcgttcaccatggagcaactggcgagcaaggagcacttgctgagcaaggagatcgtggcctcgctcgatggcaaggcgaatgggcgttaccgctttggcgcgagttggaaacccttcacccaccagttggccagctggcgctcattgctagagaagaagcattcggtggtcgtcaccagtggtaccggctcgggtaagaccgaatgctttatggtgccggtgctggaggatctttatcgcgagtaccgtgacgcagctcgtcagccgctggtcggggttcgggcgctgttcctgtatccacttaacgccctgatcaactcgcagcgcgaacgtttgaatgcctggactcagagctttggaagcggcattcgctattgcctgtacaacggcaatacaccggagttgcaggcgaatgtgcgcagcgagcagagcctaaagcctaacgaaattctgtcgcgcgagctgatgcgtacgcaaccggcgcctattctggtcaccaacggcaccatgctcgaatacataatggtgcgccaggtcgatgcgcccatcgtaagaatctccagagagcagaaatcgctgcgctggattgttctggacgaggctcacacttacgtgggttcccaggcggctgaattggcattgcagctgcgacgggtgatgacagccttcggcgttacgcctaaggatgtccgctttgtggcgacctctgcgactattgccggtgaggacgctgcaggacagttgaagcagtttctctcggatctgtcgggggggccggttacgcagattgatgtctgggggggtaaccgggtcattcctcctcttgccccctgtcaacaaacgctggttgctctggatacgctcgagtccatgccgcctgtaattgcggacgatccagaggttcatccggatcgatacgaggccctggtccattctccgcaagcccgagcactgagaaatctgctggtgaccacccccaagccgttgaagctaaccgagatggtcagccagatgcgtcaggaaggtgggtggtcactgtcacaggacgaaatactacgttggttggatgtgtgttcaggcactcgtctttcagccagtgagccggcgtttctgaagctgcgggcgcacttcttccagcgcacaactcacgggttatgggcctgctttgacaagtgctgctcagcaaagtccggaacggcgctgcaacaaaactggccctttggttatgtctacgccaatcagaggcaaacctgcagctgtggcagcccggtattcgagttggcgttctgcaatgactgcaatgagccgcatctgttggcgcgggataagaacggaaagctgatccagtgggaaagctctggtggcgatgaattttccctgcagactgaaacacctgttgaggaagatgcgggggctggtggctcaggggtactttcagtcaagacaccgctggtgctttgctcgttcgaaaatgccggcagcgcatacatccccgttgaggtcgataagttcgctggttcattcgcagctgtttcagctgaacgggtacggtttggggttagagatcttgatgccaagtgcagccacaacagctgtggatttagtgggctgcacggagcttctcctttccgccgcgcaatgctgggcggacccttctatgtagccaatgccgtgccgacagtccttgaatactgtcaagactatcaagaggaagatcagacgccggagcacggtccgcagtctctgcctggcagaggccgtcggctaattacctttacggacagccgccagggcacggcgcgcatggctgtacgtatgcaacaggaggcggagcgcagcaggttgcgcggacttgtcgtggagattttgagctggcaccagcggagccaggccagctctcaggtagattccagccgcatcgatccgtcggttttgcaacaattaatcgccaaggcgaaagaggaagtagagctataccgcagcgttggtatcaaggaggaagtcagggccgcggaggaaaaagttacacggtttacagccatgctagcttcagcaactggagcgaaagttaggccgacgctagtttctctagcttggtcggagctctccaatgagctcaagcagaaggcagacctgaaaggctcgatgctgctttacaacaagtatcagaagcccgagatcttccgggaccatgatggcccctacaagctggcggaaatgttgctgttccgcgagtttatgcgccgcccgaaacggcagaacagtctggaaacccaagggctggtgaaggtcgcatacgttggcatggataaggtccaagaagtgccggcgtactgggggcagaaaggtctgacgctcgatgattggcgtgacttcctaaaggtggcgctggactttcatgttcgggagaacagctatattcaggtcgatgagggctggttgagttggatcggtagccgtttttctgccaagagtctgcgtaatcccgagtcgaaagaagcggatgagatccgggtcaagcgctggcctcagatccgcaatggcaaccattcccagcgcctgatcaaactattgttgcttggcgctggtttgaacccggctaacacggccgacgttgatctggtcaatgcttggctaagagctgcctggttgcagttggccagaccgggctcagcgctgaaggctgacgaaaaccggtactacctacccagagagcacatgctgttctcgttggttgaccgggcctatgtctgtccagttaccaacaagctgttggataccaccttcaaaggctttacgccttacctacccgctcacctggatttctctcagttgactgaagagcagcgcgagagctatcaggcagagccgattgagctacctgacctgtgggagtttgaccgttctcaggacgactatgcgccgggacttgcgcgagttagaaacctggtggcgaatgatcctcttgtaagcgatctacgagcacggaacctgtggacggatatcaatgatcgggtagtggaaggtggcttctattaccgcacagcggagcactcggcccagcagtcttctgaacgcctcggctcctatgaagagatgttcaagaaggggcagctcaacgttctgaactgctccaccaccatggagatgggcgtagatattggcggtatttctgctgtggtcatgaacaatgtaccaccgcacccggccaactacctgcagcgtgccggtcgcgcggggcgaagcaaggaatccagggcgattacctacacgctttgtaagaacaacccgcatgatcagcaggttttcgccaatccgagttggccgttcgagaccaggatccccgcgccagtggtggcattgaactccgagcgactcgtacaacggcacatcaactcgctactgttggcggactttctctgcaatgtggttgggctcactcagactgagaaaaccagtctgaatacgcagtggttctacgacgatgagcacggtctctcacaatgtgaccgattcattgagcggctgggacaagttgtctccgatctggacgacgcgctcaaagacttggtgaaaggcacagctctggtcggtgtggacccggctcagctgcgccgtcgttcaatcgattcgatcaagccgctgcagagtcgttggctgaagagctatcgcttcttactttctgaggagaagcacgcgaaagccaacagcccctatctgaagcgtctccagattgaaaaggctcgccactgcaatgagtatctgttgcgggatcttgctgcgcgtaccttcctgcctggttatggcttccctaccgacgtggtgaacttcgataacttcacgattgaggattacatccgcgagcaggacgcagggaaaaagttgaagcacgatcgcgaggacaacgtatcccgctacaaggggctgccgtcacgcaatctgtcgattgccattcgcgagtacgctcctggtgcagaaatcgttctggatggccgggtgttcaggtctgccggcgtttccctccactggcataacctcaatgctgatagcaaagaagcgcagaaaatggacattgcgtggcgttgcgatgtctgtggcgctctggactatgaggaggggttgataaagaccgatgagctgacttgcagcaatgtcgactgccagtcactgatcaagccccaaaacattcgcaaggtcctgcagccctctggttttgtcaccgatgcttatgagtcggcctccaatgacatccagcatcagaaattcatcccagttgaaaccgcctgggttttcgtcaacgccaacaagactccattgccaaacccggcggttggggcaatggcttatggtgcggatggaaaggtcttccatcacagctcgggcgagcacggaacaggttatgccttgtgcatgagttgtggtcgagctgagtccatgcaaccggatagcgggttcccgcgagacctgtcgccgtctggcgagcactatccgccacgcccgaccaaagaggacaaagatcagaacaacaagcgccttccctgccagggcagcgggagcattcttcctagtgtgagccttggcgctgtagctactactgatgtgtttgaactcaccttgcaccatcccgtgcgcggggagttcattgcagactcagcgcagggaagtgcaattgccatgacgctagcagtggctttgcgggctgcgctggccgagatactgggcgtatctgcttccgaattgggttatgcaactcggccaagcaaactgccaagtggacagtccattcgcgtccttcagcttttcgacgtaatcagcggtggtgcgggctttgccactagcgcgccgctgcatgtcgaggagctgctgcgggggatggtgaagaagctcgattgcaagcattgtgaaactggctgtagtgagtgcctgctggactcccaaacacggcatgatcacgacaagctggatcgcaaggcagcgctcgactggctgggcccagacttcattcatcacgtgggtttgaccgccgaaaacaaactctcattcgccgatggccagtatgcgcctggcagcattgagagcgttctgcgccggctgatcaacgagggtgcaaagagaattactctagtggcctctggtgatgtggcagagtgggatcttcttgctccacagtttcgtaaggcgattcaggcctatgttctggccgacgagctgactgttgagctgctcgtcccggcagatatcactgatggggttcttgtgcaggatctccagcgcctgtcggaccttggagtaaacgtcgggaatgcgatcactgagccaggtgagcatctcgttgcccaggtgtttaaagagagcgaagttgtcacgctggcctcgcgcagcctcgtggcaactgttccaggccgtagctggcatcaaagtgatgagctagtcgtactctcgaagagtcagccggagtttggctggcaggtgatggacctttccagtgcagcgagcgactccttcggcaaggtagcgatcgtcgacatatcaatccacgaggaactcaatgggtcgctgctgcaattcggtgagcgtttctgggagctgcttggcgctcgagatcagcaagttgctgacgtgattgcgactgcgaagatcaacaggctgacctactcagatcgttacattcagaaccccgcggtagttacgatcctgggtgcggttctgaaagatctgaagagccgcatttctgcggatgcggttgtgcaggtgaagacgctattcaaatcaggtcggctgcaaggtcgtaaagccttcgacgactgggccaatcaggacgatttcgagttcttttcacgcaattggctgtcggcaatggttgggcatcaagttgaactgattgtggagtcgtcgaatcgcgaaatccctcatcaccgtaggttggagcttgagtttgaagacggcaggacgctgaaggtccggttcgaccaaggagtggcctattggcaggttcgctttagctcgcatagcgacatgtggtttgactttgatctggctgcccaggatcaactcatgcacatggccaggatagttgaaaccgcacggatacaaaactctgagcagaagtgggcgacggacgtgttggtcgagctaaagagctaa

SEQ ID NO: 29825 - DNA, 3336 bp, Pseudomonas aeruginosa
atgtcgtactccgtaattaagtactcgtcctggctgggacgctttctccagcgtcgtgggctttcagcgcctgatcagcgcggactctatgcgtaccactgcagtctcgaagagtacggagagctgcagcatttgctccgtgagtttcggggctttgatgcggcgttaaaggacccggcagcctgtgcttgtttggtactttttggttcggagtggtatcgccgtgagtaccgcagtgagtatgcctggacctgggacccgatctggaaaactctgggatttaatctgtcgccgggagagctaagcaaggtcatccctaaagggttggaggggtattggaaacgtccccttcatttctacgaagcgggtcatcgggattttctagggtcgctgtttggtgaggggggcttgccctttcaggtattgcgcgagggaggcagccgcttccagtggctgtttgaccgcttgctaaggcagtacgaccagtggcacctgctgggcttcaacaccctacagcaggtggagcagcaactggaaaaggccagtcttcctcaggtgtttgcctcacgtacgtcgatcgaactgattgcgcgtatggtcgatgagcttgtggctctggtccggaattatgggctggcgcaggcggatgagcccgtcgtccgcctggatgctctgaaccccaagtggcgtgaattgttccctctgcctctggataacgagactggcagcgaactcctcaatggtcttttaaagactgcgaccattgagggcaaaaagcgacgccgggatgcgactggatggtcttgtcgacacttttggcatgaggcgcagccggatgtgctcaaggttcaggtctcgatgccggaggaggtggtgcttcgtctgacgacgcagccatctaccacccgttttgagctggccattgtcgaagatggacaggcgattgctgcgcttggacccggctacgcgctggtcgacaacggtgttgcccatatccggctgcgccttcgtgaggtgatcggaaagcggcaggattgcagtgcccaactgagcctggtggctatggcaggtggcatgctgatcgccacccagccgatagagggcagtgcagtggcccttggcgaagtaccgttgggtttcgagccagtgaatgatcgctggcagctgtgcggtcaggcttcattcaatacggctggtgaagagctgctgctggtgctgcccgaaggtgggaagttgaacatggctgcagagggcgaggaagccatcttcagcgatatggcaccggctttttcgctgcatacggtaaaggttcagggcaaggcgcagttccaggttgagagtgatgaactctaccggatacgcacgggacatgcggttggtatgggcttggggctggaactggctggtacccagatcgactggccgaccaagcccgctctgacctttgtcggtctgcctcgtgtgcagtggccgaccgctgctggggaactgcaacagcagggcggtgacctgtacgttgccggcaaacagccgggaagcggcttgttgcaggaggtactcggtacccaatatgtgtcggtgcgcaaccgcagtggcaacgccctgttacgtcgcagggtgggtatcttgccgacggatttccgtgttgagctgcgcagtggtgagaagccggggcaggggagcattttggtgcattcccggcagcgctgcctgctccagattgttgacgacagtctgcaggtacagcaggtaaagcgtgaggatcacaccgagcttaggctctcggcaaagggctttcctccagtcagggtccgcctttcagttacccccagcttgatggctgacccagtggagattgacctgccgtttcccaactcgggttttctggcctttgatggcacaggcaaacatctgaaacgcgatctcagtgtcgacgacctgttgggggcgcgtctgtatctgtttggccgggctggcgcaccaacccgttttagccttgagctgaccctcaggggtagtgcggccaggaatgcttgttacagctggacctacacggtggccgaaaagccgctggagctcagtctgttcaatatccgtgaacagattgttgacctgctttcgcttcagtcgggcattgatcaggtcgtcgagttgcgggtgttcggtaacggtcaggataccagttaccgcatccgtaggtattcgacggagatgcaactggatcgcgaccgtcagatgctgtgtgctgccaatctgcacgatggcgccgacgccattcccgaaccggtgttgatgctgttgcatgatcctatgcgtagctccatcgcgctccgttcccgcaccagcgaaggtgtgcccaccggcgacttcgagttaccgatagctgttgaaagggatggtccctggctggtgttgcccaaatcgggctcatctgtatcgttccggccgctatttatcgctggtggatggaagccgttggcgccgagcgatggaatccagagtctgcaaaaggcagtgttgaccttcgatcatgcttcacctgttagctccttcacgcctgtgttggatgccatggcggttaaccctatgcatagcggctggcagttcttgcgggccttgtatgaagggtacggctatctgcccctggcgaccttcgaggtctggaaggctctggtagggcacacccgcgcgttggcgatggcacttttcaagtttgaaatggaggcgacattccttggccggctggagactgagtttccgattttctgggagtttcttcccattacagaaatccatcttgcggccaagcgcttcgctgcattccttaaggtgaaaggggtcgctgaggaagccattgatgctctgatcggacgaatgttttcgcgattgggggaaacctattcagcctacgggcagagtgtgcagcgcttcctttctggcaagcctgttggcccagagatcaaggtgccgctagcgactttcaagagtgtcctgcatggctggtaccttgagttgattcgcgagcgcagtgaggcaaagtggccggagttcggcggcaagcggctggagcgttggcacagcagccaaggctgctcggtgattgccttcaggtcggaaatggattaccgcaatgcggtgctctatctaccggtattcgccgctgcggtcgcctgtggcaaggctcggttcacagatgcgtttgcggatggcgtcgaggcgattttcttcttgcgccaggtccgcgatttcgattcgaagtggttcaactcgatctatcaatattgcttgttgaacagcgtcatggatatgcagaaggcagagtcggttaatggataa

SEQ ID NO: 29826 - DNA, 6336 bp, Pseudomonas aeruginosa
atggataagtatttctctgggctagtcgagcaggcgctttcccgtgccactgagtccaccttgagtatcttgagcattaccgatccggacttgcgtgagcacctggaaagtctgatgcgcgcggagtgcgggaaagagggtgcattcctggcgccacccgtgtttgagcagaccttcagctgggaagagtcggcgttcaccatggagcaactggcgagcaaggagcacttgctgagcaaggagatcgtggcctcgctcgatggcaaggcgaatgggcgttaccgctttggcgcgagttggaaacccttcacccaccagttggccagctggcgctcattgctagagaagaagcattcggtggtcgtcaccagtggtaccggctcgggtaagaccgaatgctttatggtgccggtgctggaggatctttatcgcgagtaccgtgacgcagctcgtcagccgctggtcggggttcgggcgctgttcctgtatccacttaacgccctgatcaactcgcagcgcgaacgtttgaatgcctggactcagagctttggaagcggcattcgctattgcctgtacaacggcaatacaccggagttgcaggcgaatgtgcgcagcgagcagagcctaaagcctaacgaaattctgtcgcgcgagctgatgcgtacgcaaccggcgcctattctggtcaccaacggcaccatgctcgaatacataatggtgcgccaggtcgatgcgcccatcgtaagaatctccagagagcagaaatcgctgcgctggattgttctggacgaggctcacacttacgtgggttcccaggcggctgaattggcattgcagctgcgacgggtgatgacagccttcggcgttacgcctaaggatgtccgctttgtggcgacctctgcgactattgccggtgaggacgctgcaggacagttgaagcagtttctctcggatctgtcgggggggccggttacgcagattgatgtctgggggggtaaccgggtcattcctcctcttgccccctgtcaacaaacgctggttgctctggatacgctcgagtccatgccgcctgtaattgcggacgatccagaggttcatccggatcgatacgaggccctggtccattctccgcaagcccgagcactgagaaatctgctggtgaccacccccaagccgttgaagctaaccgagatggtcagccagatgcgtcaggaaggtgggtggtcactgtcacaggacgaaatactacgttggttggatgtgtgttcaggcactcgtctttcagccagtgagccggcgtttctgaagctgcgggcgcacttcttccagcgcacaactcacgggttatgggcctgctttgacaagtgctgctcagcaaagtccggaacggcgctgcaacaaaactggccctttggttatgtctacgccaatcagaggcaaacctgcagctgtggcagcccggtattcgagttggcgttctgcaatgactgcaatgagccgcatctgttggcgcgggataagaacggaaagctgatccagtgggaaagctctggtggcgatgaattttccctgcagactgaaacacctgttgaggaagatgcgggggctggtggctcaggggtactttcagtcaagacaccgctggtgctttgctcgttcgaaaatgccggcagcgcatacatccccgttgaggtcgataagttcgctggttcattcgcagctgtttcagctgaacgggtacggtttggggttagagatcttgatgccaagtgcagccacaacagctgtggatttagtgggctgcacggagcttctcctttccgccgcgcaatgctgggcggacccttctatgtagccaatgccgtgccgacagtccttgaatactgtcaagactatcaagaggaagatcagacgccggagcacggtccgcagtctctgcctggcagaggccgtcggctaattacctttacggacagccgccagggcacggcgcgcatggctgtacgtatgcaacaggaggcggagcgcagcaggttgcgcggacttgtcgtggagattttgagctggcaccagcggagccaggccagctctcaggtagattccagccgcatcgatccgtcggttttgcaacaattaatcgccaaggcgaaagaggaagtagagctataccgcagcgttggtatcaaggaggaagtcagggccgcggaggaaaaagttacacggtttacagccatgctagcttcagcaactggagcgaaagttaggccgacgctagtttctctagcttggtcggagctctccaatgagctcaagcagaaggcagacctgaaaggctcgatgctgctttacaacaagtatcagaagcccgagatcttccgggaccatgatggcccctacaagctggcggaaatgttgctgttccgcgagtttatgcgccgcccgaaacggcagaacagtctggaaacccaagggctggtgaaggtcgcatacgttggcatggataaggtccaagaagtgccggcgtactgggggcagaaaggtctgacgctcgatgattggcgtgacttcctaaaggtggcgctggactttcatgttcgggagaacagctatattcaggtcgatgagggctggttgagttggatcggtagccgtttttctgccaagagtctgcgtaatcccgagtcgaaagaagcggatgagatccgggtcaagcgctggcctcagatccgcaatggcaaccattcccagcgcctgatcaaactattgttgcttggcgctggtttgaacccggctaacacggccgacgttgatctggtcaatgcttggctaagagctgcctggttgcagttggccagaccgggctcagcgctgaaggctgacgaaaaccggtactacctacccagagagcacatgctgttctcgttggttgaccgggcctatgtctgtccagttaccaacaagctgttggataccaccttcaaaggctttacgccttacctacccgctcacctggatttctctcagttgactgaagagcagcgcgagagctatcaggcagagccgattgagctacctgacctgtgggagtttgaccgttctcaggacgactatgcgccgggacttgcgcgagttagaaacctggtggcgaatgatcctcttgtaagcgatctacgagcacggaacctgtggacggatatcaatgatcgggtagtggaaggtggcttctattaccgcacagcggagcactcggcccagcagtcttctgaacgcctcggctcctatgaagagatgttcaagaaggggcagctcaacgttctgaactgctccaccaccatggagatgggcgtagatattggcggtatttctgctgtggtcatgaacaatgtaccaccgcacccggccaactacctgcagcgtgccggtcgcgcggggcgaagcaaggaatccagggcgattacctacacgctttgtaagaacaacccgcatgatcagcaggttttcgccaatccgagttggccgttcgagaccaggatccccgcgccagtggtggcattgaactccgagcgactcgtacaacggcacatcaactcgctactgttggcggactttctctgcaatgtggttgggctcactcagactgagaaaaccagtctgaatacgcagtggttctacgacgatgagcacggtctctcacaatgtgaccgattcattgagcggctgggacaagttgtctccgatctggacgacgcgctcaaagacttggtgaaaggcacagctctggtcggtgtggacccggctcagctgcgccgtcgttcaatcgattcgatcaagccgctgcagagtcgttggctgaagagctatcgcttcttactttctgaggagaagcacgcgaaagccaacagcccctatctgaagcgtctccagattgaaaaggctcgccactgcaatgagtatctgttgcgggatcttgctgcgcgtaccttcctgcctggttatggcttccctaccgacgtggtgaacttcgataacttcacgattgaggattacatccgcgagcaggacgcagggaaaaagttgaagcacgatcgcgaggacaacgtatcccgctacaaggggctgccgtcacgcaatctgtcgattgccattcgcgagtacgctcctggtgcagaaatcgttctggatggccgggtgttcaggtctgccggcgtttccctccactggcataacctcaatgctgatagcaaagaagcgcagaaaatggacattgcgtggcgttgcgatgtctgtggcgctctggactatgaggaggggttgataaagaccgatgagctgacttgcagcaatgtcgactgccagtcactgatcaagccccaaaacattcgcaaggtcctgcagccctctggttttgtcaccgatgcttatgagtcggcctccaatgacatccagcatcagaaattcatcccagttgaaaccgcctgggttttcgtcaacgccaacaagactccattgccaaacccggcggttggggcaatggcttatggtgcggatggaaaggtcttccatcacagctcgggcgagcacggaacaggttatgccttgtgcatgagttgtggtcgagctgagtccatgcaaccggatagcgggttcccgcgagacctgtcgccgtctggcgagcactatccgccacgcccgaccaaagaggacaaagatcagaacaacaagcgccttccctgccagggcagcgggagcattcttcctagtgtgagccttggcgctgtagctactactgatgtgtttgaactcaccttgcaccatcccgtgcgcggggagttcattgcagactcagcgcagggaagtgcaattgccatgacgctagcagtggctttgcgggctgcgctggccgagatactgggcgtatctgcttccgaattgggttatgcaactcggccaagcaaactgccaagtggacagtccattcgcgtccttcagcttttcgacgtaatcagcggtggtgcgggctttgccactagcgcgccgctgcatgtcgaggagctgctgcgggggatggtgaagaagctcgattgcaagcattgtgaaactggctgtagtgagtgcctgctggactcccaaacacggcatgatcacgacaagctggatcgcaaggcagcgctcgactggctgggcccagacttcattcatcacgtgggtttgaccgccgaaaacaaactctcattcgccgatggccagtatgcgcctggcagcattgagagcgttctgcgccggctgatcaacgagggtgcaaagagaattactctagtggcctctggtgatgtggcagagtgggatcttcttgctccacagtttcgtaaggcgattcaggcctatgttctggccgacgagctgactgttgagctgctcgtcccggcagatatcactgatggggttcttgtgcaggatctccagcgcctgtcggaccttggagtaaacgtcgggaatgcgatcactgagccaggtgagcatctcgttgcccaggtgtttaaagagagcgaagttgtcacgctggcctcgcgcagcctcgtggcaactgttccaggccgtagctggcatcaaagtgatgagctagtcgtactctcgaagagtcagccggagtttggctggcaggtgatggacctttccagtgcagcgagcgactccttcggcaaggtagcgatcgtcgacatatcaatccacgaggaactcaatgggtcgctgctgcaattcggtgagcgtttctgggagctgcttggcgctcgagatcagcaagttgctgacgtgattgcgactgcgaagatcaacaggctgacctactcagatcgttacattcagaaccccgcggtagttacgatcctgggtgcggttctgaaagatctgaagagccgcatttctgcggatgcggttgtgcaggtgaagacgctattcaaatcaggtcggctgcaaggtcgtaaagccttcgacgactgggccaatcaggacgatttcgagttcttttcacgcaattggctgtcggcaatggttgggcatcaagttgaactgattgtggagtcgtcgaatcgcgaaatccctcatcaccgtaggttggagcttgagtttgaagacggcaggacgctgaaggtccggttcgaccaaggagtggcctattggcaggttcgctttagctcgcatagcgacatgtggtttgactttgatctggctgcccaggatcaactcatgcacatggccaggatagttgaaaccgcacggatacaaaactctgagcagaagtgggcgacggacgtgttggtcgagctaaagagctaa

SEQ ID NO: 29827 - DNA, 3336 bp, Pseudomonas aeruginosa
atgtcgtactccgtaattaagtactcgtcctggctgggacgctttctccagcgtcgtgggctttcagcgcctgatcagcgcggactctatgcgtaccactgcagtctcgaagagtacggagagctgcagcatttgctccgtgagtttgggggctttgatgcggcgttaaaggacccggcagcctgtgcttgtttggtactttttggttcggagtggtatcgccgtgagtaccgcagtgagtatgcctggacctgggacccgatctggaaaactctgggatttaatctgtcgccgggagagctaagcaaggtcatccctaaagggttggaggggtattggaaacgtccccttcatttctacgaagcgggtcatcgggattttctagggtcgctgtttggtgaggggggcttgccctttcaggtattgcgcgagggaggcagccgcttccagtggctgtttgaccgcttgctaaggcagtacgaccagtggcacctgctgggcttcaacaccctacagcaggtggagcagcaactggaaaaggccagtcttcctcaggtgtttgcctcacgtacgtcgatcgaactgattgcgcgtatggtcgatgagcttgtggctctggtccggaattatgggctggcgcaggcggatgagcccgtcgtccgcctggatgctctgaaccccaagtggcgtgaattgttccctctgcctctggataacgagactggcagcgaactcctcaatggtcttttaaagactgcgaccattgagggcaaaaagcgacgccgggatgcgactggatggtcttgtcgacacttttggcatgaggcgcagccggatgtgctcaaggttcaggtctcgatgccggaggaggtggtgcttcgtctgacgacgcagccatctaccacccgttttgagctggccattgtcgaagatggacaggcgattgctgcgcttggacccggctacgcgctggtcgacaacggtgttgcccatatccggctgcgccttcgtgaggtgatcggaaagcggcaggattgcagtgcccaactgagcctggtggctatggcaggtggcatgctgatcgccacccagccgatagagggcagtgcagtggcccttggcgaagtaccgttgggtttcgagccagtgaatgatcgctggcagctatgcggtcaggcttcattcaatacggctggtgaagagctgctgctggtgctgcccgaaggtgggaagttgaacatggctgcagagggcgaggaagccatcttcagcgatatggcaccggctttttcgctgcatacggtaaaggttcagggcaaggcgcagttccaggttgagagtgatgaactctgccggatacgcacgggacatgcggttggtatgggcttggggctggaactggctggtacccagatcgactggccgaccaagcccgctctgacctttgtcggtctgcctcgtgtgcagtggccgaccgctgctggggaactgcaacagcagggcggtgacctgtacgttgccggcaaacagccgggaagcggcttgttgcaggaggtactcggtacccaatatgtgtcggtgcgcaaccgcagtggcaacgccctgttacgtcgcagggtgggtatcttgccgacggatttccgtgttgagctgcgcagtggtgagaagccggggcaggggagcattttggtgcattcccggcagcgctgcctgctccagattgttgacgacagtctgcaggtacagcaggtaaagcgtgaggatcacaccgagcttaggctctcggcaaagggctttcctccagtcagggtccgcctttcagttacccccagcttgatggctgacccagtggagattgacctgccgtttcccaactcgggttttctggcctttgatggcacaggcaaacatctgaaacgcgatctcagtgtcgacgacctgttgggggcgcgtctgtatctgtttggccgggctggcgcaccaacccgttttagccttgagctgaccctcaggggtagtgcggccaggaatgcttgttacagctggacctacacggtggccgaaaagccgctggagctcagtctgttcaatatccgtgaacagattgttgacctgctttcgcttcagtcgggcattgatcaggtcgtcgagttgcgggtgttcggtaacggtcaggataccagttaccgcatccgtaggtattcgacggagatgcaactggatcgcgaccgtcagatgctgtgtgctgccaatctgcacgatggcgccgacgccattcccgaaccggtgttgatgctgttgcatgatcctatgcgtagctccatcgcgctccgttcccgcaccagcgaaggtgtgcccaccggcgacttcgagttaccgatagctgttgaaagggatggtccctggctggtgttgcccaaatcgggctcatctgtatcgttccggccgctatttatcgctggtggatggaagccgttggcgccgagcgatggaatccagagtctgcaaaaggcagtgttgaccttcgatcatgcttcacctgttagctccttcacgcctgtgttggatgccatggcggttaaccctatgcatagcggctggcagttcttgcgggccttgtatgaagggtacggctatctgcccctggcgaccttcgaggtctggaaggctctggtagggcacacccgcgcgttggcgatggcacttttcaagtttgaaatggaggcgacattccttggccggctggagactgagtttccgattttctgggagtttcttcccattacagaaatccatcttgcggccaagcgcttcgctgcattccttaaggtgaaaggggtcgctgaggaagccattgatgctctgatcggacgaatgttttcgcgattgggggaaacctattcagcctacgggcagagtgtgcagcgcttcctttctggcaagcctgttggcccagagatcaaggtgccgctagcgactttcaagagtgtcctgcatggctggtaccttgagttgattcgcgagcgcagtgaggcaaagtggccggagttcggcggcaagcggctggagcgttggcacagcagccaaggctgctcggtgattgccttcaggtcggaaatggattaccgcaatgcggtgctctatctaccggtattcgccgctgcggtcgcctgtggcaaggctcggttcacagatgcgtttgcggatggcgtcgaggcgattttcttcttgcgccaggtccgcgatttcgattcgaagtggttcaactcgatctatcaatattgcttgttgaacagcgtcatggatatgcagaaggcagagtcggttaatggataa

SEQ ID NO: 29828 - DNA, 6336 bp, Pseudomonas aeruginosa
atggataagtatttctctgggctagtcgagcaggcgctttcccgtgccactgagtccaccttgagtatcttgagcattaccgatccggacttgcgtgagcacctggaaagtctgatgcgcgcggagtgcgggaaagagggtgcattcctggcgccacccgtgtttgagcagaccttcagctgggaagagtcggcgttcaccatggagcaactggcgagcaaggagcacttgctgagcaaggagatcgtggcctcgctcgatggcaaggcgaatgggcgttaccgctttggcgcgagttggaaacccttcacccaccagttggccagctggcgctcattgctagagaagaagcattcggtggtcgtcaccagtggtaccggctcgggtaagaccgaatgctttatggtgccggtgctggaggatctttatcgcgagtaccgtgacgcagctcgtcagccgctggtcggggttcgggcgctgttcctgtatccacttaacgccctgatcaactcgcagcgcgaacgtttgaatgcctggactcagagctttggaagcggcattcgctattgcctgtacaacggcaatacaccggagttgcaggcgaatgtgcgcagcgagcagagcctaaagcctaacgaaattctgtcgcgcgagctgatgcgtacgcaaccggcgcctattctggtcaccaacggcaccatgctcgaatacataatggtgcgccaggtcgatgcgcccatcgtaagaatctccagagagcagaaatcgctgcgctggattgttctggacgaggctcacacttacgtgggttcccaggcggctgaattggcattgcagctgcgacgggtgatgacagccttcggcgttacgcctaaggatgtccgctttgtggcgacctctgcgactattgccggtgaggacgctgcaggacagttgaagcagtttctctcggatctgtcgggggggccggttacgcagattgatgtctggggggggaaccgggtcattcctcctcttgccccctgtcaacaaacgctggttgctctggatacgctcgagtccatgccgcctgtaattgcggacgatccagaggttcatccggatcgatacgaggccctggtccattctccgcaagcccgagcactgagaaatctgctggtgaccacccccaagccgttgaagctaaccgagatggtcagccagatgcgtcaggaaggtgggtggtcactgtcacaggacgaaatactacgttggttggatgtgtgttcaggcactcgtctttcagccagtgagccggcgtttctgaagctgcgggcgcacttcttccagcgcacaactcacgggttatgggcctgctttgacaagtgctgctcagcaaagtccggaacggcgctgcaacaaaactggccctttggttatgtctacgccaatcagaggcaaacctgcagctgtggcagcccggtattcgagttggcgttctgcaatgactgcaatgagccgcatctgttggcgcgggataagaacggaaagctgatccagtgggaaagctctggtggcgatgaattttccctgcagactgaaacacctgttgaggaagatgcgggggctggtggctcaggggtactttcagtcaagacaccgctggtgctttgctcgttcgaaaatgccggcagcgcatacatccccgttgaggtcgataagttcgctggttcattcgcagctgtttcagctgaacgggtacggtttggggttagagatcttgatgccaagtgcagccacaacagctgtggatttagtgggctgcacggagcttctcctttccgccgcgcaatgctgggcggacccttctatgtagccaatgccgtgccgacagtccttgaatactgtcaagactatcaagaggaagatcagacgccggagcacggtccgcagtctctgcctggcagaggccgtcggctaattacctttacggacagccgccagggcacggcgcgcatggctgtacgtatgcaacaggaggcggagcgcagcaggttgcgcggacttgtcgtggagattttgagctggcaccagcggagccaggccagctctcaggtagattccagccgcatcgatccgtcggttttgcaacaattaatcgccaaggcgaaagaggaagtagagctataccgcagcgttggtatcaaggaggaagtcagggccgcggaggaaaaagttacacggtttacagccatgctagcttcagcaactggagcgaaagttaggccgacgctagtttctctagcttggtcggagctctccaatgagctcaagcagaaggcagacctgaaaggctcgatgctgctttacaacaagtatcagaagcccgagatcttccgggaccatgatggcccctacaagctggcggaaatgttgctgttccgcgagtttatgcgccgcccgaaacggcagaacagtctggaaacccaagggctggtgaaggtcgcatacgttggcatggataaggtccaagaagtgccggcgtactgggggcagaaaggtctgacgctcgatgattggcgtgacttcctaaaggtggcgctggactttcatgttcgggagaacagctatattcaggtcgatgagggctggttgagttggatcggtagccgtttttctgccaagagtctgcgtaatcccgagtcgaaagaagcggatgagatccgggtcaagcgctggcctcagatccgcaatggcaaccattcccagcgcctgatcaaactattgttgcttggcgctggtttgaacccggctaacacggccgacgttgatctggtcaatgcttggctaagagctgcctggttgcagttggccagaccgggctcagcgctgaaggctgacgaaaaccggtactacctacccagagagcacatgctgttctcgttggttgaccgggcctatgtctgtccagttaccaacaagctgttggataccaccttcaaaggctttacgccttacctacccgctcacctggatttctctcagttgactgaagagcagcgcgagagctatcaggcagagccgattgagctacctgacctgtgggagtttgaccgttctcaggacgactatgcgccgggacttgcgcgagttagaaacctggtggcgaatgatcctcttgtaagcgatctacgagcacggaacctgtggacggatatcaatgatcgggtagtggaaggtggcttctattaccgcacagcggagcactcggcccagcagtcttctgaacgcctcggctcctatgaagagatgttcaagaaggggcagctcaacgttctgaactgctccaccaccatggagatgggcgtagatattggcggtatttctgctgtggtcatgaacaatgtaccaccgcacccggccaactacctgcagcgtgccggtcgcgcggggcgaagcaaggaatccagggcgattacctacacgctttgtaagaacaacccgcatgatcagcaggttttcgccaatccgagttggccgttcgagaccaggatccccgcgccagtggtggcattgaactccgagcgactcgtacaacggcacatcaactcgctactgttggcggactttctctgcaatgtggttgggctcactcagactgagaaaaccagtctgaatacgcagtggttctacgacgatgagcacggtctctcacaatgtgaccgattcattgagcggctgggacaagttgtctccgatctggacgacgcgctcaaagacttggtgaaaggcacagctctggtcggtgtggacccggctcagctgcgccgtcgttcaatcgattcgatcaagccgctgcagagtcgttggctgaagagctatcgcttcttactttctgaggagaagcacgcgaaagccaacagcccctatctgaagcgtctccagattgaaaaggctcgccactgcaatgagtatctgttgcgggatcttgctgcgcgtaccttcctgcctggttatggcttccctaccgacgtggtgaacttcgataacttcacgattgaggattacatccgcgagcaggacgcagggaaaaagttgaagcacgatcgcgaggacaacgtatcccgctacaaggggctgccgtcacgcaatctgtcgattgccattcgcgagtacgctcctggtgcagaaatcgttctggatggccgggtgttcaggtctgccggcgtttccctccactggcataacctcaatgctgatagcaaagaagcgcagaaaatggacattgcgtggcgttgcgatgtctgtggcgctctggactatgaggaggggttgataaagaccgatgagctgacttgcagcaatgtcgactgccagtcactgatcaagccccaaaacattcgcaaggtcctgcagccctctggttttgtcaccgatgcttatgagtcggcctccaatgacatccagcatcagaaattcatcccagttgaaaccgcctgggttttcgtcaacgccaacaagactccattgccaaacccggcggttggggcaatggcttatggtgcggatggaaaggtcttccatcacagctcgggcgagcacggaacaggttatgccttgtgcatgagttgtggtcgagctgagtccatgcaaccggatagcgggttcccgcgagacctgtcgccgtctggcgagcactatccgccacgcccgaccaaagaggacaaagatcagaacaacaagcgccttccctgccagggcagcgggagcattcttcctagtgtgagccttggcgctgtagctactactgatgtgtttgaactcaccttgcaccatcccgtgcgcggggagttcattgcagactcagcgcagggaagtgcaattgccatgacgctagcagtggctttgcgggctgcgctggccgagatactgggcgtatctgcttccgaattgggttatgcaactcggccaagcaaactgccaagtggacagtccattcgcgtccttcagcttttcgacgtaatcagcggtggtgcgggctttgccactagcgcgccgctgcatgtcgaggagctgctgcgggggatggtgaagaagctcgattgcaagcattgtgaaactggctgtagtgagtgcctgctggactcccaaacacggcatgatcacgacaagctggatcgcaaggcagcgctcgactggctgggcccagacttcattcatcacgtgggtttgaccgccgaaaacaaactctcattcgccgatggccagtatgcgcctggcagcattgagagcgttctgcgccggctgatcaacgagggtgcaaagagaattactctagtggcctctggtgatgtggcagagtgggatcttcttgctccacagtttcgtaaggcgattcaggcctatgttctggccgacgagctgactgttgagctgctcgtcccggcagatatcactgatggggttcttgtgcaggatctccagcgcctgtcggaccttggagtaaacgtcgggaatgcgatcactgagccaggtgagcatctcgttgcccaggtgtttaaagagagcgaagttgtcacgctggcctcgcgcagcctcgtggcaactgttccaggccgtagctggcatcaaagtgatgagctagtcgtactctcgaagagtcagccggagtttggctggcaggtgatggacctttccagtgcagcgagcgactccttcggcaaggtagcgatcgtcgacatatcaatccacgaggaactcaatgggtcgctgctgcaattcggtgagcgtttctgggagctgcttggcgctcgagatcagcaagttgctgacgtgattgcgactgcgaagatcaacaggctgacctactcagatcgttacattcagaaccccgcggtagttacgatcctgggtgcggttctgaaagatctgaagagccgcatttctgcggatgcggttgtgcaggtgaagacgctattcaaatcaggtcggctgcaaggtcgtaaagccttcgacgactgggccaatcaggacgatttcgagttcttttcacgcaattggctgtcggcaatggttgggcatcaagttgaactgattgtggagtcgtcgaatcgcgaaatccctcatcaccgtaggttggagcttgagtttgaagacggcaggacgctgaaggtccggttcgaccaaggagtggcctattggcaggttcgctttagctcgcatagcgacatgtggtttgactttgatctggctgcccaggatcaactcatgcacatggccaggatagttgaaaccgcacggatacaaaactctgagcagaagtgggcgacggacgtgttggtcgagctaaagagctaa

SEQ ID NO: 29829 - DNA, 3336 bp, Pseudomonas aeruginosa
atgtcgtactccgtaattaagtactcgtcctggctgggacgctttctccagcgtcgtgggctttcagcgcctgatcagcgcggactctatgcgtaccactgcagtctcgaagagtacggagagctgcagcatttgctccgtgagtttgggggctttgatgcggcgttaaaggacccggcagcctgtgcttgtttggtactttttggttcggagtggtatcgccgtgagtaccgcagtgagtatgcctggacctgggacccgatctggaaaactctgggatttaatctgtcgccgggagagctaagcaaggtcatccctaaagggttggaggggtattggaaacgtccccttcatttctacgaagcgggtcatcgggattttctagggtcgctgtttggtgaggggggcttgccctttcaggtattgcgcgagggaggcagccgcttccagtggctgtttgaccgcttgctaaggcagtacgaccagtggcacctgctgggcttcaacaccctacagcaggtggagcagcaactggaaaaggccagtcttcctcaggtgtttgcctcacgtacgtcgatcgaactgattgcgcgtatggtcgatgagcttgtggctctggtccggaattatgggctggcgcaggcggatgagcccgtcgtccgcctggatgctctgaaccccaagtggcgtgaattgttccctctgcctctggataacgagactggcagcgaactcctcaatggtcttttaaagactgcgaccattgagggcaaaaagcgacgccgggatgcgactggatggtcttgtcgacacttttggcatgaggcgcagccggatgtgctcaaggttcaggtctcgatgccggaggaggtggtgcttcgtctgacgacgcagccatctaccacccgttttgagctggccattgtcgaagatggacaggcgattgctgcgcttggacccggctacgcgctggtcgacaacggtgttgcccatatccggctgcgccttcgtgaggtgatcggaaagcggcaggattgcagtgcccaactgagcctggtggctatggcaggtggcatgctgatcgccacccagccgatagagggcagtgcagtggcccttggcgaagtaccgttgggtttcgagccagtgaatgatcgctggcagctgtgcggtcaggcttcattcaatacggctggtgaagagctgctgctggtgctgcccgaaggtgggaagttgaacatggctgcagagggcgaggaagccatcttcagcgatatggcaccggctttttcgctgcatacggtaaaggttcagggcaaggcgcagttccaggttgagagtgatgaactctaccggatacgcacgggacatgcggttggtatgggcttggggctggaactggctggtacccagatcgactggccgaccaagcccgctctgacctttgtcggtctgcctcgtgtgcagtggccgaccgctgctggggaactgcaacagcagggcggtgacctgtacgttgccggcaaacagccgggaagcggcttgttgcaggaggtactcggtacccaatatgtgtcggtgcgcaaccgcagtggcaacgccctgttacgtcgcagggtgggtatcttgccgacggatttccgtgttgagctgcgcagtggtgagaagccggggcaggggagcattttggtgcattcccggcagcgctgcctgctccagattgttgacgacagtctgcaggtacagcaggtaaagcgtgaggatcacaccgagcttaggctctcggcaaagggctttcctccagtcagggtccgcctttcagttacccccagcttgatggctgacccagtggagattgacctgccgtttcccaactcgggttttctggcctttgatggcacaggcaaacatctgaaacgcgatctcagtgtcgacgacctgttgggggcgcgtctgtatctgtttggccgggctggcgcaccaacccgttttagccttgagctgaccctcaggggtagtgcggccaggaatgcttgttacagctggacctacacggtggccgaaaagccgctggagctcagtctgttcaatatccgtgaacagattgttgacctgctttcgcttcagtcgggcattgatcaggtcgtcgagttgcgggtgttcggtaacggtcaggataccagttaccgcatccgtaggtattcgacggagatgcaactggatcgcgaccgtcagatgctgtgtgctgccaatctgcacgatggcgccgacgccattcccgaaccggtgttgatgctgttgcatgatcctatgcgtagctccatcgcgctccgttcccgcaccagcgaaggtgtgcccaccggcgacttcgagttaccgatagctgttgaaagggatggtccctggctggtgttgcccaaatcgggctcatctgtatcgttccggccgctatttatcgctggtggatggaagccgttggcgccgagcgatggaatccagagtctgcaaaaggcagtgttgaccttcgatcatgcttcacctgttagctccttcacgcctgtgttggatgccatggcggttaaccctatgcatagcggctggcagttcttgcgggccttgtatgaagggtacggctatctgcccctggcgaccttcgaggtctggaaggctctggtagggcacacccgcgcgttggcgatggcacttttcaagtttgaaatggaggcgacattccttggccggctggagactgagtttccgattttctgggagtttcttcccattacagaaatccatcttgcggccaagcgcttcgctgcattccttaaggtgaaaggggtcgctgaggaagccattgatgctctgatcggacgaatgttttcgcgattgggggaaacctattcagcctacgggcagagtgtgcagcgcttcctttctggcaagcctgttggcccagagatcaaggtgccgctagcgactttcaagagtgtcctgcatggctggtaccttgagttgattcgcgagcgcagtgaggcaaagtggccggagttcggcggcaagcggctggagcgttggcacagcagccaaggctgctcggtgattgccttcaggtcggaaatggattaccgcaatgcggtgctctatctaccggtattcgccgctgcggtcgcctgtggcaaggctcggttcacagatgcgtttgcggatggcgtcgaggcgattttcttcttgcgccaggtccgcgatttcgattcgaagtggttcaactcgatctatcaatattgcttgttgaacagcgtcatggatatgcagaaggcagagtcggttaatggataa

SEQ ID NO: 29830 - DNA, 6216 bp, Pseudomonas aeruginosa; identical to SEQ ID NO: 29774

SEQ ID NO: 29831 - DNA, 3111 bp, Pseudomonas aeruginosa; identical to SEQ ID NO: 29769

SEQ ID NO: 29832 - DNA, 6336 bp, Pseudomonas aeruginosa; identical to SEQ ID NO: 29776

SEQ ID NO: 29833 - DNA, 3336 bp, Pseudomonas aeruginosa; identical to SEQ ID NO: 29777

SEQ ID NO: 29834 - DNA, 6216 bp, Pseudomonas aeruginosa; identical to SEQ ID NO: 29784

SEQ ID NO: 29835 - DNA, 3111 bp, Pseudomonas aeruginosa; identical to SEQ ID NO: 29769

SEQ ID NO: 29836 - DNA, 6336 bp, Pseudomonas aeruginosa
atggataagtatttctctgggctagtcgagcaggcgctttcccgtgccactgagtccaccttgagtatcttgagcattaccgatccggacttgcgtgagcacctggaaagtctgatgcgcgcggagtgcgggaaagagggtgcattcctggcgccacccgtgtttgagcagaccttcagctgggaagagtcggcgttcaccatggagcaactggcgagcaaggagcacttgctgagcaaggagatcgtggcctcgctcgatggcaaggcgaatgggcgttaccgctttggcgcgagttggaaacccttcacccaccagttggccagctggcgctcattgctagagaagaagcattcggtggtcgtcaccagtggtaccggctcgggtaagaccgaatgctttatggtgccggtgctggaggatctttatcgcgagtaccgtgacgcagctcgtcagccgctggtcggggttcgggcgctgttcctgtatccacttaacgccctgatcaactcgcagcgcgaacgtttgaatgcctggactcagagctttggaagcggcattcgctattgcctgtacaacggcaatacaccggagttgcaggcgaatgtgcgcagcgagcagagcctaaagcctaacgaaattctgtcgcgcgagctgatgcgtacgcaaccggcgcctattctggtcaccaacggcaccatgctcgaatacataatggtgcgccaggtcgatgcgcccatcgtaagaatctccagagagcagaaatcgctgcgctggattgttctggacgaggctcacacttacgtgggttcccaggcggctgaattggcattgcagctgcgacgggtgatgacagccttcggcgttacgcctaaggatgtccgctttgtggcgacctctgcgactattgccggtgaggacgctgcaggacagttgaagcagtttctctcggatctgtcgggggggccggttacgcagattgatgtctgggggggtaaccgggtcattcctcctcttgccccctgtcaacaaacgctggttgctctggatacgctcgagtccatgccgcctgtaattgcggacgatccagaggttcatccggatcgatacgaggccctggtccattctccgcaagcccgagcactgagaaatctgctggtgaccacccccaagccgttgaagctaaccgagatggtcagccagatgcgtcaggaaggtgggtggtcactgtcacaggacgaaatactacgttggttggatgtgtgttcaggcactcgtctttcagccagtgagccggcgtttctgaagctgcgggcgcacttcttccagcgcactactcacgggttatgggcctgctttgacaagtgctgctcagcaaagtccggaacggcgctgcaacaaaactggccctttggttatgtctacgccaatcagaggcaaacctgcagctgtggcagcccggtattcgagttggcgttctgcaatgactgcaatgagccgcatctgttggcgcgggataagaacggaaagctgatccagtgggaaagctctggtggcgatgaattttccctgcagactgaaacacctgttgaggaagatgcgggggctggtggctcaggggtactttcagtcaagacaccgctggtgctttgctcgttcgaaaatgccggcagcgcatacatccccgttgaggtcgataagttcgctggttcattcgcagctgtttcagctgaacgggtacggtttggggttagagatcttaatgccaagtgcagccacaacagctgtggatttagtgggctgcacggagcttctcctttccgccgcgcaatgctgggcggacccttctatgtagccaatgccgtgccgacagtccttgaatactgtcaagactatcaagaggaagatcagacgccggagcacggtccgcagtctctgcctggcagaggccgtcggctaattacctttacggacagccgccagggcacggcgcgcatggctgtacgtatgcaacaggaggcggagcgcagcaggttgcgcggacttgtcgtggagattttgagctggcaccagcggagccaggccagctctcaggtagattccagccgcatcgatccgtcggttttgcaacaattaatcgccaaggcgaaagaggaagtagagctataccgcagcgttggtatcaaggaggaagtcagggccgcggaggaaaaagttacacggtttacagccatgctagcttcagcaactggagcgaaagttaggccgacgctagtttctctagcttggtcggagctctccaatgagctcaagcagaaggcagacctgaaaggctcgatgctgctttacaacaagtatcagaagcccgagatatttcgggaccatgatggcccctacaagctggcggaaatgttgctgttccgcgagtttatgcgccgcccgaaacggcagaacagtctggaaacccaagggctggtgaaggtcgcatacgttggcatggataaggtccaagaagtgccggcgtactgggggcagaaaggtctgacgctcgatgattggcgtgacttcctaaaggtggcgctggactttcatgttcgggagaacagctatattcaggtcgatgagggctggttgagttggatcggtagccgtttttctgccaagagtctgcgtaatcccgagtcgaaagaagcggatgagatccgggtcaagcgttggcctcagatccgcaatggcaaccattcccagcgcctgatcaaactattgttgcttggcgctggtttgaacccggctaacacggccgacgttgatctggtcaatgcttggctaagagctgcctggttgcagttggccagaccgggctcagcgctgaaggctgacgaaaaccggtactacctacccagagagcacatgctgttctcgttggttgaccgggcctatgtctgtccagttaccaacaagctgttggataccaccttcaaaggctttacgccttacctacccgctcacctggatttctctcagttgactgaagagcagcgcgagagctatcaggcagagccgattgagctacctgacctgtgggagtttgaccgttctcaggacgactatgcgccgggacttgcgcgagttagaaacctggtggcgaatgatcctcttgtaagcgatctacgagcacggaacctgtggacggatatcaatgatcgggtagtggaaggtggcttctattaccgcacagcggagcactcggcccagcagtcttctgaacgcctcggctcctatgaagagatgttcaagaaggggcagctcaacgttctgaactgctccaccaccatggagatgggcgtagatattggcggtatttctgctgtggtcatgaacaatgtaccaccgcacccggccaactacctgcagcgtgccggtcgcgcggggcgaagcaaggaatccagggcgattacctacacgctttgtaagaacaacccgcatgatcagcaggttttcgccaatccgagttggccgttcgagaccaggatccccgcgccagtggtggcattgaactccgagcgactcgtacaacggcacatcaactcgctactgttggcggactttctctgcaatgtggttgggctcactcagactgagaaaaccagtctgaatacgcagtggttctacgacgatgagcacggtctctcacaatgtgaccgattcattgagcggctgggacaagttgtctccgatctggacgacgcgctcaaagacttggtgaaaggcacagctctggtcggtgtggacccggctcagctgcgccgtcgttcaatcgattcgatcaagccgctgcagagtcgttggctgaagagctatcgcttcttactttctgaggagaagcacgcgaaagccaacagcccctatctgaagcgtctccagattgaaaaggctcgccactgcaatgagtatctgttgcgggatcttgctgcgcgtaccttcctgcctggttatggcttccctaccgacgtggtgaacttcgataacttcacgattgaggattacatccgcgagcaggacgcagggaaaaagttgaagcacgatcgcgaggacaacgtatcccgctacaaggggctgccgtcacgcaatctgtcgattgccattcgcgagtacgctcctggtgcagaaatcgttctggatggccgggtgttcaggtctgccggcgtttccctccactggcataacctcaatgctgatagcaaagaagcgcagaaaatggacattgcgtggcgttgcgatgtctgtggcgctctggactatgaggaggggttgataaagaccgatgagctgacttgcagcaatgtcgactgccagtcactgatcaagccccaaaacattcgcaaggtcctgcagccctctggttttgtcaccgatgcttatgagtcggcctccaatgacatccagcatcagaaattcatcccagttgaaaccgcctgggttttcgtcaacgccaacaagactccattgccaaacccggcggttggggcaatggcttatggtgcggatggaaaggtcttccatcacagctcgggcgagcacggaacaggttatgccttgtgcatgagttgtggtcgagctgagtccatgcaaccggatagcgggttcccgcgagacctgtcgccgtctggcgagcactatccgccacgcccgaccaaagaggacaaagatcagaacaacaagcgccttccctgccagggcagcgggagcattcttcctagtgtgagccttggcgctgtagctactactgatgtgtttgaactcaccttgcaccatcccgtgcgcggggagttcattgcagactcagcgcagggaagtgcaattgccatgacgctagcagtggctttgcgggctgcgctggccgagatactgggcgtatctgcttccgaattgggttatgcaactcggccaagcaaactgccaagtggacagtccattcgcgtccttcagcttttcgacgtaatcagcggtggtgcgggctttgccactagcgcgccgctgcatgtcgaggagctgctgcgggggatggtgaagaagctcgattgcaagcattgtgaaactggctgtagtgagtgcctgctggactcccaaacacggcatgatcacgacaagctggatcgcaaggcagcgctcgactggctgggcccagacttcattcatcacgtgggtttgaccgccgaaaacaaactctcattcgccgatggccagtatgcgcctggcagcattgagagcgttctgcgccggctgatcaacgagggtgcaaagagaattactctagtggcctctggtgatgtggcagagtgggatcttcttgctccacagtttcgtaaggcgattcaggcctatgttctggccgacgagctgactgttgagctgctcgtcccggcagatatcactgatggggttcttgtgcaggatctccagcgcctgtcggaccttggagtaaacgtcgggaatgcgatcactgagccaggtgagcatctcgttgcccaggtgtttaaagagagcgaagttgtcacgctggcctcgcgcagcctcgtggcaactgttccaggccgtagctggcatcaaagtgatgagctagtcgtactctcgaagagtcagccggagtttggctggcaggtgatggacctttccagtgcagcgagcgactccttcggcaaggtagcgatcgtcgacatatcaatccacgaggaactcaatgggtcgctgctgcaattcggtgagcgtttctgggagctgcttggcgctcgagatcagcaagttgctgacgtgattgcgactgcgaagatcaacaggctgacctactcagatcgttacattcagaaccccgcggtagttacgatcctgggtgcggttctgaaagatctgaagagccgcatttctgcggatgcggttgtgcaggtgaagacgctattcaaatcaggtcggctgcaaggtcgtaaagccttcgacgactgggccaatcaggacgatttcgagttcttttcacgcaattggctgtcggcaatggttgggcatcaagttgaactgattgtggagtcgtcgaatcgcgaaatccctcatcaccgtaggttggagcttgagtttgaagacggcaggacgctgaaggtccggttcgaccaaggagtggcctattggcaggttcgctttagctcgcatagcgacatgtggtttgactttgatctggctgcccaggatcaactcatgcacatggccaggatagttgaaaccgcacggatacaaaactctgagcagaagtgggcgacggacgtgttggtcgagctaaagagctaa

SEQ ID NO: 29837 - DNA, 3336 bp, Pseudomonas aeruginosa; identical to SEQ ID NO: 29777

SEQ ID NO: 29838 - DNA, 6216 bp, Pseudomonas aeruginosa; identical to SEQ ID NO: 29774

SEQ ID NO: 29839 - DNA, 3111 bp, Pseudomonas aeruginosa; identical to SEQ ID NO: 29769

SEQ ID NO: 29840 - DNA, 6216 bp, Pseudomonas aeruginosa; identical to SEQ ID NO: 29764

SEQ ID NO: 29841 - DNA, 3111 bp, Pseudomonas aeruginosa; identical to SEQ ID NO: 29769

SEQ ID NO: 29842 - DNA, 6192 bp, Pseudomonas aeruginosa
atgctctatcagaagaactatttctccgccctcaccgacaacctgagcacccgcagcgagcgggccgcccagggcctgctcagcctcggcaacccgcagctgcgccagtttctacatgaccagctgaccgccgcccccggcacgccgggcgcctggctggccgatccggttttcgaaccgaccttcggctggcaggaaagcgctgaaaccatgagttccctggccggcggcaacatgctgcaccagcgtctggctagggccatggaatccccgcccaaggaccttgcccaggaatacaccttccccggaaaccgccatcccttcacccaccagctggcggcctgggatatcctcaaccgtgcggtgccgcaatcgctggtggtgaccagcggcaccggctcgggcaagaccgaatgcttcctggtgccggttctcaaccagttggccaaggaaatcgacaccggcgaagacccggaaggcgttcgcgccctgttcatctacccgctgaacgcgctgatcaactcgcagcagaaccgattggatgcctggaccgacggcttcggcgggcagattcgccactgcctgtacacaggcgcactggagaatgagcgcaaggcttccgaccagcagtacaagggtcaggtgatcgaccgcaagagcctgcgcgccagcccgccgcaactgctggtgaccaacgcgacaatgctggagtacatgctcatccgtaaggatgatgagccgatcctgcagaagtcggccggcaagctgcgctggatcattcttgacgaggcgcacacccacatcggctcccaggccgcggagatggcgctgctgctgcgccgggtaatgctggccttccaggtcaagccgcaggatgtacgcttcgtggcgacctcggccaccttcggctcggatacccagaccatcgagagcctgcgcacattcctcgccgatatcggcggagtggatccgcagcaggtgcatgtcgttcagggccatcgggatatcccggccctgctgaacgccaccccagatgccgagcaggacacccccgaagctatcggtgccatcgaggcggaccaggagcagtcggcgctgcgctaccagcgcctggaggccagcccgaccgctcggcggctgcgcgccctgttcatgccagatggccaggtgaagccgcaaagcctgcaagggctgacccgcgagtccggcctcaccccagcgcaggcgctcgcttggctggatctgctgtccggcaccaagaatgccgaagggctgtccttcctgccgctgcgtgcgcacctgttccataacgtgattccagcaatccgcgcctgcgtggaccgccaatgcagccacaaggctggcaccgcgctggagcatgccgactggccgtttggcatggtttacctggaagagcgaactcactgccgctgcggcgcgccgctgatgccgctggtgtcctgcgaggagtgcaacgagagcttcctgcaggcggtgactaccaaccacgggagacttatcgatcagtcgcaacaacaggtcgatgagttctctcttgacgaggagcctacggataccgatgaccaagctgatgacattgcattactcagccgtgtcctgattaccaatcgtcctaccaactacagctatcccgagtttctggatcgtgacagccaaaggttgaagcacgacggccctaaggatggctacctagagctacaagtttttcgcagccaaaagaacgaatgcccctgctgtggcgccaacatccaaggccgcagcctgctgcgcccggcgcgcatcggcacccccttcaccctgagtacggtgatcggcgccctgctggagttctgcccaccggatccgatgccaaccggcaagccgttccagggccgcaagctgatctccttcaccgacagccgccagggcacggcacgcattgcagtcaagctgcagcaggattccgagcgcaaccggattcgcggcctgatctatcaacgcctgctgcaggcacaccccgtcaacagcctttccgaggaggagctgcgcgaactgcaggaactgcaggagctggatgccgcccagaagctgggccgattcgagcagaaatacctggggcagttgctggagaaacaggccaattcggcaaaaggcgcggaaatcagctggaccgacatgaccaactatctggccggtaccccagagctgcagatgggcatgcttgattactacaacaacctcgcgccgaacaccttcggcaagcaggatagtgtcgccttggccaacatgctgctggcccgcgagttctatcgccgtccgaaacgcgccaacagcctggaaaccttgggcattgtgcaggtgtgctaccccaagctggccagcatcaccagcaagcccacggcctggcctgcgcacctggatatcgagtcctggcgcacctacctgaaggtactgctggacttcttcgtccgcgaaaacaccatcctgaacatcgacaagcgctggcagtcgctgatcggttcgcgcatcagtcccaaatgggccgtggcgccggtcctggggaaaaaacctgaaaagctgcaaagtcgctttgcccgctggcctacggtcaacacagtcaatggcatccagtcgcgtgccatcctgctgctctgcaaggcattcaactggtcgaccgcggcccaccaagaccacatcgactcgatcctgagcgaagcatggcgcgtgctgcagggaaaactgctgacctcattcggcgatagctaccaactcgatctcaaggaactgagtttccggctacccgaaacggtctatctgtgcccggtatcgcggcgcttcatcgacaccccgttcgagcaactcagcccctacaccccacgcaccgaccgcgacatggtcgtccgggtaacgccgtaccgcctgccacgactgccggaaaagcttctgcatgtaccgggcgatgccggcctactggcgatccgcgactggcttaacaacgatccgcaaatccagcaaatgcgcaaggacgcgctctggtcggacgtcatggacctggtcatcgagggcggcaattacttccgcgctgccgagcactcggcgcagcagccgaaaaacaagctggacagctacgaaggcctgttcaagcttggcaagctgaacctgctgagctgctcgaccaccatggaaatgggcgtggatatcggcggcatcagcgtggtagcgatgaacaacgttcccccgcacccggccaactacttgcagcgtgccggccgcgccggacgccgccgcgaggggcgttcgctggccctggccgtctgcaagaacaccccgcacgaccagagcgtgttcaacaacccgctctggccgttcaatacgcccatgcgcatgcccaaggtgtccttgcagagtcccgatctggtgcagcgccacgtcaatgcctggctgctctcgcactggctcaagcacgtggtctccgccaaggaaatcaagtcgatgaccgccggcaccttcttcctcgaaggcgaaatgcccatgtcgctggccgcacgcttctgcctgtggtgcgacacccagacggtcgataccgaggcgctagtggcaaaggcgctcaaggacatcacccgccgcagcatcctcgataccgccccgcagcccaagctgctcaagcacgccagcagccgcatagccgagatcatgcaggcatggcggcaggagcattcggccagccacgcccaactgcagcagattgccgacaagaaggccgccgcctaccgcgctatggaggcacagctcagccgtatcgagaaggagtacctgctcagcgagctggctgaccggcgctttctgccgggctacggcttcccgaccgacatcgtcagcttcgacaaccactgcatgcacaccctgaagcgggaagtaaacgaccagcgcgaggacaaccgcgcgcgctaccgctcgctggcttcccgtgaccgcatcaccggcctgcgcgaatatgcaccgggtgccgagctggtcatggacgggctagtctataagtcctccggtatcaccctgaactggcatgcgccggcgtctgccgaaaacatcaaggaactgcagctgttcaagaaggcctggcattgctccaagtgcggcgccagcaacaccgccattaatcccgggcaggagattaactgccaggcatgcggcgcgcagatcgagcgcgaaaacgttcgcgaatacttggtacccgccggctttgccgtggacttcttcgacgagccgcacaacgacatcagtcgcctgcagtacgtgccggtcaaccccccgttgctgaacgtgccagccagctgggtctgcctagctaacccggcgctcggccagttccgtgctagccagagagcgcacctgttccactacacctctggggccaatcagatgggcttcgccatctgtttggagtgcggcaaggctgagcctatgctcagccaccccgacggttctgcgccagaaaatgaaaaatatctgccggcagccttccgccagaaggcgcagcaccgccgcctgcgtggcggcaagagtgacgacggcgacaacatctgccccggcagccacaacagctggaagatcaagcagaacgttcaccttggccatgacagcctgaccgatgcgctggagctggtgctgcgcaatccctccagcggtgagctgctggacgacgccatcaccgcctattcgattgccgtggcgctgcgcgaggcgatcgccgccgagctgggcgtgcagaccgaagagctaggctgcgacagtcaccgcatcaaggtcgatggccagccaacccaggctatccgggtgttcgacctgcgcagcggcggctacaccacccaggccgcagagcggctgaatgacgcaagcctttggcggcgggttatcacccgcctggacagctgcaactgcgcgcatgcctgccagaactgcctactcagtttcgatacccgcttcgaggccgagcgcctcaatcgtcatgtcgcgctggggtggatcaatcagacttggcttgccggcctggcgctgcccgccgagctcgctgtctttggtccgaaaagccaggcagaaatcgccactctacaggaagcggtcgaaagagcgattactagggacgacaacgcgaagaccgtagccatttacttcactgcacccgccgaagagtgggatcttgctgtcgcacgccgcctgaggcatcaactgcatagttgggaaagcgtcggacacctagtgcaattacatttactggaaagtaccgtttccagcctgccaagagaccaaaaggaatggttggcaaagctagccttcaacggagtacagatatgcctacacaattccataccggatctcggggcgctggcactcaatgtctcactgcaaggcccacaaggctgcattgcctgggctagcgacaatacgaacctggccgcacctggccacacatgggatctagcggaggccggtgcacggatcatccgaggcaccccctccgacctcaaggcagagcgcatcttgaatgctgccgatctcatgccggccccaccccctggcttgatcaagatcgagatcggcaatcagctggatggctcgctcgacaactttgctcgtcggttctgggagcacctaggtactgaggccaatggcctgattaatgatgccctcacaggcaaggatccaattacagaactggtttacagcgaccgttacgtatgcagcccgctagttgtgaatctgctggtcaacgtgatccacgagctcggacggctgagtgatgcagatttcgctatccgaatcctaggccgacaatatcagcgggaagacaatcgctcgccttggcagtgccggcatgactggcactcagctcgcgagcgcgatgaggccctccgccaggctctggcgtactgcggccgcgagggagaggtgctaagcctgcctaccttgccgcactaccgccggctacagcttaagctgcgctccggtaatcaactgaccatccagtttgatcaggggctttcgtattgggaagccgagcgcagcgaaaagtcttaccagctcaggttcgactttgcatcacgcgagcttggagaagaaatcatggagcgcatcaggtgtaaagtttcggcggctggggaggaaaacactcagatattcctctcttcctcttga

SEQ ID NO: 29843 - DNA, 3111 bp, Pseudomonas aeruginosa
ctgtgcgaggcagccggccagagaaaggtatctcacgagaagacccgcagcctggtaattgacgggcgtcgtcagtggcgtctgcaaaccactataaaaagtgaaggcaaacgtttcattggtctggtcgcggtcaatggcggtctgccaatgcggctcgtcgagtcggctcaaggcgggctatcgggtctcctgcggatggtgagtgagcaggcgcttcgctacaacctccacgatgaacaagtgcaccaggccatagaggcccaggccgcacttttgccggcctgctaccagcaggcgccggtctacgaactgctcgaaaatctggtcaaggcggtgctgcacatccgcaagacctattccttacagggcgcccacgatccgatctccaaactgcgagaagagtgcccacaatgggaagagctctttcctatcgcactcgactctcaggccgcagccagcctgatcaagggtttggtcaaggggatagtcagtataacgccccagtctcggcgcccccctttccagatacaacgaggcctgcgcttcagttccgatggctctgcccccgtctacgagctgtctttcgcgatgcaggcacaggcagcgcgcgaacaggttgcagaggcattgggaacaaccggcgcagcgctgccgccacactttcagttactgctacgcatcggtgaaagggagtatttggtcggcgaagccctgcttaggggtgaggaatatcagcttatcgctaggccactaccgacaattcgcagtcttcacgaacccgcacagctgattgttagtcggtggggtgccaccctgcacatcgccaacctgcccggcggcgaagccttgagccctgacgagccgctaatcttcgagaacgcctatccctttgcccgcttgctcgcgcaaggcgatgcgctggtcaagggggagtcggcactggcgctcatgccagcaaaaaccatcgtattttctgaagagggtgaggctcgcgagctttacgactgccttgccgatgaacaagtgctgatagagcttccggcaggcgtaacccgacttacctatcgaaaacaaccgttcattgtcaccatcagcaccagcgcttcccaccaccccgaggcttactggcagggtgacagcctagaggtactctccgtaccgggactgctgttccgcggtaaaccacgcctgcgaatcgaacaggcaacgggcttcactagccatgcgccggcccatgaattgtttgttcgagcgcaaggaaaggaggtcagcctcgcccaagccaaagccccaggactgtgccggttgacctggcgtaaggatggtcagcgcttgatgaacaaccgcgccgtgcttctcccggaagatgcgtccatcgcatacgtcccgggtgccagtccatttgagggcagtgttcgtctccgtctctggcctgacattcccgtccactgcgagaacgaacagatcgaactgaagcgccatcacgatggggcagctctgatcctacaactgaagagcattggcagccggccggccaccacggttccgctctgtctgcagtggcccgacggggagcaaaggctcacgctaccgttccccggttatggcgttacgttgctacgcaacggcatccagctcaaatcgaatcaggccctgaccatcgaggacctggtcggctgccgtgctctgctgatgtcagcccagggagccgaaaattggctggtgcgtctgacgtctagcggcgatgcctcgcgatccaccctgtctcaggaaattcgctatacaggtattcgcgaaatccgcctgttcgagctgataccagcgatccagcagatgctgtcctgccacccaaggctcgatcatgtcgtgcagctagagctgatccactcccaccaaacacatgctcgcctacaggtgggtcgctactcgactcaacttcgcctacacagcgaccgcgagatggcgtccctaagcgatggcggtcgcgacctgctgctcgatcaggaagaggccgaggatctggttcatggcctaccgctggccgagccggaacatgaccccgtcagtctgccactacatttctccgagcaggtgttcaccggtaactggaaggtcagcctgccggacgatgccgtaggcccctggctcctatacacccgcgatgactctccactacacagccgtccgacaatcgtgccgtcgaccgcgaacgacctctcaaaacccctgagcccgctgagaaaggcgctctgcgaggcaaatggcgaagagcgcatgcacctgctaagggccacgctgcgcttgatggccgcagaccctaaggtcgaggactggcagattctggaactgctgctggaccggcttcaccatcttccgctagcaagtttggatatctgccaagcactgatccgtgagccgcaggcgcttgccatggccacgttgttgctagacgacttttccagccgtctggccgagcgcctgccctgtgagctgcccttcgagtggctgctgatcgccccggagcactggttcgacaccttcgcgacactgcgccagcagctagccgccgacgatccgcgcctgctgtcactgatccgcaacgacatccagagcaagagccagtttctgtcccgctggcagcccgcactgcacttcatcttcgatcagggcctgcaccgttctttcgatctacaaagccgagatgtggggctcttcctgaaaaacccagcggtactcaccaccgcctggcagtcgcacctgtttgatggcgagaactcagccatgcagcagatgttccggcgcaaccctgccgaaacccatcagtatcccggcagcggcaatacggatgttggagccttcctgaaaacgccccatgggcacatgcttctccgctgcagcaagctccctgccaacgacttcaagctagccacggtcatgctgcccttcatggccgccttcgatacttatgccggccgtggacggcaatggcaagccgacccggcacgcctgttcagcctcagaaatgctcgccagttcgatagtgtctggtttgactcggcctatcaactcggcctggccatggcgcaagccgcctcgatgcagaagtga

SEQ ID NO: 29844 - DNA, 6201 bp, Pseudomonas aeruginosa
atgctctatcaaaacaattatttctccgctctgaccaccaacttgagtacccgcagtgaacgtgctgctcagggcctgctcagtctcggcagcccccatttgcgtcagttcctgcatgatcagctgaccgcctctcccggcactccgggtgcctggcttgcagatccggttttcgaaccgaccttcggttgggaagaaagcaatgaaaccataggctctctgtccagcggcaatctattgcacccgcgtcttgccgaagccatggcctccccgcccaaggatcttgcccaggaatacaccttccccggcacccggcatccattcacccaccagttggcggcctggaaaacattaaatagcccggagccgcaatcactggtagttaccagcggcactggttcgggaaagaccgaatgtttcctggtaccggtcctcaaccatctggcgaaggagatcgatgcaggggaagacctggaaggggttcgtgccctgttcatctatccgctgaatgccctgatcaactcacagcaaaaccgtctagacgcctggaccgatggctttggcgggcagattcgccactgtctgtacaccggcgcgctggagaatgagcgaaaggcttccgatcagcagtacaagggccaggtgatcgaccgcaagagtatgcgcgagcggccgccacagctactcgtaaccaatgcgaccatgctggagtacatgctcattcgtaaagacgatgagcctatcctgcgaaagtcggccagaaaactgcgctggatcattctcgacgaggctcatacccatatcggttctcaagcagctgagatggctctgttgctgcgccgcgtcatgctggcgtttcaagtcaaacctcaggatgtccgcttcgttgcgacttcagctactttcggctcggatatgcaaactatcgagagcctgcgcaaattcctcgccgatatcggcggagtagctccggagcaggtgcatgtcgtgcagggccaccgggatattccagctttgctggatgctaagccagaggccgcgcaggacacgcccgaatccatcggggctatcgagggagagcaagagcaatctgcactgcgctaccagcgcctggaagccagtccgactgctcggaggctgcgctccctgttcattcctgacggacaagtgaaaccgcaaagcctacagggtctgacgaggacatccggtcttacggcagcacaaactctcgcctggctggacctgatgtccggcaccaagaatgccaatggtctctccttcctgccgttacgagcgcacttgttccataacgtgattccggcaatccgcgcctgcgtggatcggaactgcgcttacaaggctggcacagcgctggaccacgcggattggcccttcggcatggtgtatctggaggagcggacccattgccgctgtaatgcccccctcatgccgctggtctcctgcgaggagtgcaatgagagcttcttgcaggcaaaacctaccagcaacggaaaattgatcgatcagtcgcaacaacaggtcgacgaattctctttagatgaagactctgcggatgcagaagaccaagccgataacaacagtgaatcactgagccagattctgattaccaaccgccccgtgacgcacggccgccctgagtttcttgatcgcactagccagaaactgatgttcgatggccccaaggaaggctacatcgaactgcaggttttccagagccacaaaaatgagtgcccatgctgtggtgccactatccaaggtcgcagcctgctgcgcccggcccgcatcggcacgcccttcaccttaagcacggtgattagcaccttgctggagttctgcccgccagacccgatgccggccggcaagccattccaaggccgcaagctgatttccttcaccgacagccgccagggtacggcgcgcattgcggtcaagctgcagcaggactccgaacgcaaccggattcgaggtctgatataccaacacttgttgcgcgcaaaaccagtcaacctactctctcctgagcagcaagagcacctgaaacttcttgaggagcaagaagctagcaacagtcttgatgcaacaggaaaaatgctgcttggaatgctgcgacagcagcagaaaccagcaagatcaggtacagaaatcagctggaccgagatggttaaccatctggcgggcaccccggagctacagatgggcatgctggactattatcacagtcttgctcccaaactcttcagcaaacaagacagtatcgccttggccggcatgttacttgcgcgggaattctatcgccgtccgaagcgctccaacagcttggaaaccatggggctggtacaagtgtgttatcccaagctggccagcatcaccagcaaacccatggcctggcctgctcatcaaactgtcgagtcctggcgtacctatctgaaggtgctactggacttcttcatccgcgagaacaccatcctgaacatcgacaggcgatggcaatcactgatcggcgcgcgcatcagtcccaaatgggtggtagccccggtttttgatggaaaggctgaaaagctgcctggccgctacgctcgctggccggcggtcaataccgtaaatggtgtccagtcgcgagccatcctgatgctctgcaaagcattcaactggtcaaccgcggtacaccatgaccagatcgactcgattctgcgtgaagcctggcaggtccttacccagcaggcaaagctgctaattttgtccggtgacggctatcagctcaatcttaaggacctaagcttccgactccccaatgaagtctatctctgcccggtatcgcggcgcttcatcgacaccccgttcgagcagcttagtccctacacgccacgtaccgaccgtgagatagtcgtcaaggtgacgccttactccctgccgcatccgccggaggcactcctccatgtgccgggtgatgacggcctactggcgatccgcgattggctcaacaaccaacctcacatccagcagttacgcaaagatgccctctggtcggacgttatggatctggttaccgagggcggcaactacttccgagcggccgagcactcggcccagcaaccgaagaacaaactggacacctacgaaggcatgttcaaggcaggcaagctgaacctgctgagctgttcgaccaccatggaaatgggggtggatatcggcggcatcagcgtagtggccatgaacaacgtccccccgcacccggccaactacctccaacgcgcgggacgagctggtcgtcgtcgcgaaggacgttccctagcgctagccgtttgtaagaacaccccgcacgatcagagtgtgttcaataacccgctctggcccttcaccacgcccatgcgcatgcccaaggtttccctgcaaagccctgagctggtacagcgtcatatcaacgcctggctgctctcgcactggctgaaacacgttgtcgccgcccaggaaatcaagtcgatgacggcaggcgcattcttcctcgacggcgaaatgcctatgtcgctggccaagcgtttctgcctgtggtgcaacaatcaggcaagcgaagccgagccgctggtagtacaagccatcagggacattactagacgcagcattctcgactccacgccgcagtctgaactgctgaagcgcgccagcagcagtcttgccgagatcatgcaggcatggcggcaagagcatgaggtgagccattctcaactgttgcaaattgccgacaagaaagccgccgcgtcccgtgccatggaggcccaactcagccgtatcgagaaggagtatctgctcagcgagctagctgaccggcgattcctgcctggctatggcttcccaaccgatatcgtcagtttcgataaccgctgcatgcagaccttgaagctggaggaagtcgataagcgcgaggacaaccgtgcacgctatcgctcgctggcttcccgtgatcgcgtcaccggcctgcgcgagtatgcaccaggcgccgaactggtcatggacggactggtgtacaagtcctccggcattacactgaactggcatgcacccgcctccgccgaaggcatcaaggaactacaactcttcaagaaggcctggcgctgcgggcagtgcggcgccagcgacacggccatcaaccccggactggagatcaactgccaggactgcggcgctccgatcgagcgggacgagattcgcgaatacctggtaccagcaggctttgctgtggacttcttcgatgaaccgcataacgatatcagccacctgcagtacgtaccggtcaaagctccttggctgaatgtgcccgccagctgggtctgcctggccaacccggcactcggccagttccgttccagccagcaggcccacctgttccactacacctcgggtgccaatcagcagggcttcgccatctgcctagagtgcggcaaggctgagcccatgctcagccatcccgatacatccgcccctgccaatgagcagtatctaccggccattttccgccagaaggcacagcacagacgtctgcgcggcggcaagaacgacgacggggaaaacatctgccccggcggccagaacagctggaagatcaagcagggcatccacctcggccatgacagcctgaccgatgcgttggagttggtactgcgtaccccctccaacggcgaactgctgaacgatgacatcaccggctattcgattgccgtggcgctgcgggaagcaatagccgccgaactgggcgttcagaccgaagagcttggctgcgattgccacccgattagggtcgatggctctccaacccgagccatccggattttcgacctgcgcagtggcggctatacctctcaggcggcagaacggctgaatgactccagcctgtggcagcgggtcatcacgcgcctggacagctgcaactgttcgcatgcctgccagcgctgcctgctcagctttgatacccgctttgaggctgatcgtctcaatcgccacgctgcactggagtggatcaaccagacctggcttaccagcttagagttgcccgctgaactcgcagtctttggttcacaaagtcaggcggaaattaccagcctgcaggaagcggtcgaacgggcgattacccaggatgacagcgcgaagaccgttacggtctacctcgcggctcccgccgaagactgggatcttgccgtcgcccgccgcctgcggcatcaactgcagaactgggaagacgccggacaccaggtgcaattgaatctgctggaaagcaccttcgccgctctgcctgccgaccagagggaatggctcgcaaaactgtccttcaacgggattgagatctgcctacacaaggccatgccagatctcggagtgctggcgctgaacatcagcgtacatgggccgcgcagcggcttcgcctgggccagcgacaatgcaaacctggccgcacctggccgtacctgggatctggcggcagccggggtgcggatcattcggggcgtatctcccaccctgaaagctgagcgcgtactggataccagcgatttgatgccgcctgcaccccagggcttggttaaggtcgagatcggtaatcatctggatggttcgctcgacggctttgctcgtcggctctgggagcacctcaggcaggaggccagaagccttctggctgatgcagtcacaggccaggaccccatcaccgagctggtctacagcgaccgctatgtatgcagcccgctggtcgtgaatctgcttgtcaatgtgatccatgagatcggagcgcatagtgatgaaggctttgctattaggattcaggggcgtcagtaccagaaggatgacaaccgctcaccttggcagtgccggcacgattggcgcacatctcaagagcgcgatcacgcggtccgtcaggcgttggagtactgcggcctagaagccgatgtcctcagccttccggctttaccacactaccgccagttgcaactgcagttgcgctctggcaagcaactgactatccagtttgatcaggggttttcttactgggaggccgagcgtagtggaaagccttatctgctcaggttcgatttctcatcaccgcagcttggagaggaaatcatgacgcgcatccagtgcagagtcttggcggccagtgatgaaaacacccaagtattcatttcatcctcatga

SEQ ID NO: 29845 - DNA, 3087 bp, Pseudomonas aeruginosa
atgtcacatgagaagactcgcaagctggtcatcgaagggcgtcgccaatggcgcctgcaaaccgccatcaagaatgaaggcaaacgtttcattggcctggtcgtggtgaatggcggcctgccgatgcgcctggtcgagtcggcgcagggcgggctatccggcctgctgcgcatggtcaccctacaggcggtggactacaacctgcacgatgagcaactacgtcaggctatcgaagcccaggctgctcttttgcccgcatgctatcagcaagcaccggtctatgagctgctggacaacctgatcaaggcggtgctgcatatccgcaggacctatgctctgacgggtgctcaggatccgatcgctaagctgcaggaagaatgccctcagtgggaagagctctttcccatcgcgctcgacaatcaggcagcagccagcctcatcaaggggctggtcagaggcatcgttgacatcacgccccaggccaagcaactgccgtttcagatactgcgtggcctgcgtcttagctccgatggctccatgcccgtctacgagctgtcctttgcgatgcaggcacaggccaagcgcgatcgaatcgccgaggcgttagggatggtcgcagaccgactgccgccgcacttccaactgctgctgcgcatcggtgagcgggagcatctggtcggggaagcattgctcagggatgacgagtatcagcttatcgccagaccgctgccccccattcaaactgtgcacgaagctgcgcagctgatagtcagtcgttggggcgccaccttgcacatcgccaacctgcccggcggcgaagcgttaagccacgacgaacctttgatcttcgaaaattcttatccctttgctcgtctgatagcccaaggcgatgctctggtgaaggggctgtccgcactggcggtcatgccggcaagaaccatcgtattggctgaggaaggcgagactcgtgagcttcacgactgccttgctgatgggcagatgctgatggagcttccggccggcaaaacgaggctcgcatatcgcggacaagcgttcattgtcaccgtcagcgccattgctacgcaccgcccggaagcctattggcaaggcaatagcctagaggcgctctctgtgccgggcctgctattccgcggtacaccacgccttcgagttgatcaggggctggggcattccagttacgcgccgtcccatgaactttttgttcgcagccattccaaggagctcccactcggtgaggcacaagcaccaggactatgccgactgatctggcgcaaggatggccagcgcctgctgagcacccgcgccgtgctcctcccagagggcgcttctattacctatgttccagcggcaagcacccttgaaggagtcattcgtctcgataactggcccgacgtaccagttcgttgtgagaacgaagagatcgagctggacagccgtcatgatgggacaagcctggtcctcagactgaaaagcaccagcgctcggcctgcaacttcagttccgctctgcatgcagtggcccgacggcgaacataggctcacgctgccgttccccggttatggcgtcacgctgcagcgcaacaatcttcctctcaagtccaatcaggccttgaccatcgatgagctgatcggctgtcgtgccctgctaatgtcggcgcacggcgcagagcattggcaggttcgcctgacgtctgtcggacctgatgctcgccccaccctgtctcaggaaattcgctatacggggattcgggagatacggctgttcgagctgatcccgacaatccaacagatgctttcctgccacccagggctagatcatgctgtgcaactggagctgatgcatacccatcagacacgtgctcgccttcaagtcggccgctactcgacgcgcatccgcccgcacagccagaaacagatggtgtcattgagcaatggtggccgagatcttattcttgagcagccccaagctgagggactgatgctagccctaccgctggccgagcctgaccatgaaccggtcagcctgccgttgcatttctccgagcaggtattcacaggcaactggttggttagcctgcccacggatgcgactggcccctggttgctgtacacctcagacgaatcaccactacatagccgcccgacagttgttccgccgaccatgatcggtttgtcgaagccattgactcctctgcgtcaagcgctctgcgcggccgacggcgaggtgcgtatgagcatgctcagagccgctctgcgtacgatggtggctgacccgcacgataaggactggcaaacgctggaacttctgcttgagcgactgcaccacttgccaccggccagcctggatatttgccaggcactaatacgtgagccgcaggcgctcgccatgaccacactgctcctcgacggcttctccagtcgcatggctgaacgcctgccctccgagctgcccttcgagtggctgctcatcgctccagaccactggttcgacactttctcgatacttcgccagcagttagccgctggcgatgaccgactattgtcgatcatccgccacgacatccagagcaagagtcagtacctgtctcgctggcaacccgcactgcgcttcattttcgaacaaggcttccaccgctacttcgatctccaaagccaggatgtagggttcttcctgaaaaatccggcggtgctcaccggaatctggttggacaggctgtttgaagggggagagaaatctgccatgcagcggatgttccaacgcaaccctgctgaaacccatcaataccctgccgccgggaatacgaatatcggggcattcctgaaaactacgcatggccaattactactccgccgcagcaagcttcctgccaacgacttcaagttggccgtggtaatgctgcccttcatggctgccttcgacgcccatgccggccatggtcggcagtggcaagccgatccggcacgcctgctcagcctaagaaatgctcgcctgttcgataccgtctggtttgattcggcctatgaactcggcctggccatggcgcaagccgactcgatgctcaagtga

SEQ ID NO: 29846 - DNA, 6309 bp, Pseudomonas aeruginosa; identical to SEQ ID NO: 29762

SEQ ID NO: 29847 - DNA, 3300 bp, Pseudomonas aeruginosa; identical to SEQ ID NO: 29763

SEQ ID NO: 29848 - DNA, 6216 bp, Pseudomonas aeruginosa; identical to SEQ ID NO: 29774

SEQ ID NO: 29849 - DNA, 3111 bp, Pseudomonas aeruginosa; identical to SEQ ID NO: 29769

SEQ ID NO: 29850 - DNA, 6336 bp, Pseudomonas aeruginosa; identical to SEQ ID NO: 29770

SEQ ID NO: 29851 - DNA, 3330 bp, Pseudomonas aeruginosa; identical to SEQ ID NO: 29771

SEQ ID NO: 29852 - DNA, 6336 bp, Pseudomonas aeruginosa; identical to SEQ ID NO: 29826

SEQ ID NO: 29853 - DNA, 3336 bp, Pseudomonas aeruginosa
atgtcgtactccgtaattaagtactcgtcctggctgggacgctttctccagcgtcgtgggctttcagcgcctgatcagcgcggactctatgcgtaccactgcagtctcgaagagtacggagagctgcagcatttgctccgtgagtttgggggctttgatgcggcgttaaaggacccggcagcctgtgcttgtttggtactttttggttcggagtggtatcgccgtgagtaccgcagtgagtatgcctggacctgggacccgatctggaaaactctgggatttaatctgtcgccgggagagctaagcaaggtcatccctaaagggttggaggggtattggaaacgtccccttcatttctacgaagcgggtcatcgggattttctagggtcgctgtttggtgaggggggcttgccctttcaggtattgcgcgagggaggcagccgcttccagtggctgtttgaccgcttgctaaggcagtacgaccagtggcacctgctgggcttcaacaccctacagcaggtggagcagcaactggaaaaggccagtcttcctcaggtgtttgcctcacgtacgtcgatcgaactgattgcgcgtatggtcgatgagcttgtggctctggtccggaattatgggctggcgcaggcggatgagcccgtcgtccgcctggatgctctgaaccccaagtggcgtgaattgttccctctgcctctggataacgagactggcagcgaactcctcaatggtcttttaaagactgcgaccattgagggcaaaaagcgacgccgggatgcgactggatggtcttgtcgacacttttggcatgaggcgcagccggatgtgctcaaggttcaggtctcgatgccggaggaggtggtgcttcgtctgacgacgcagccatctaccacccgttttgagctggccattgtcgaagatggacaggcgattgctgcgcttggacccggctacgcgctggtcgacaacggtgttgcccatatccggctgcgccttcgtgaggtgatcggaaagcggcaggattgcagtgcccaactgagcctggtggctatggcaggtggcatgctgatcgccacccagccgatagagggcagtgcagtggcccttggcgaagtaccgttgggtttcgagccagtgaatgatcgctggcagctatgcggtcaggcttcattcaatacggctggtgaagagctgctgctggtgctgcccgaaggtgggaagttgaacatggctgcagagggcgaggaagccatcttcagcgatatggcaccggctttttcgctgcatacggtaaaggttcagggcaaggcgcagttccaggttgagagtgatgaactctaccggatacgcacgggacatgcggttggtatgggcttggggctggaactggctggtacccagatcgactggccgaccaagcccgctctgacctttgtcggtctgcctcgtgtgcagtggccgaccgctgctggggaactgcaacagcagggcggtgacctgtacgttgccggcaaacagccgggaagcggcttgttgcaggaggtactcggtacccaatatgtgtcggtgcgcaaccgcagtggcaacgccctgttacgtcgcagggtgggtatcttgccgacggatttccgtgttgagctgcgcagtggtgagaagccggggcaggggagcattttggtgcattcccggcagcgctgcctgctccagattgttgacgacagtctgcaggtacagcaggtaaagcgtgaggatcacaccgagcttaggctctcggcaaagggctttcctccagtcagggtccgcctttcagttacccccagcttgatggctgacccagtggagattgacctgccgtttcccaactcgggttttctggcctttgatggcacaggcaaacatctgaaacgcgatctcagtgtcgacgacctgttgggggcgcgtctgtatctgtttggccgggctggcgcaccaacccgttttagccttgagctgaccctcaggggtagtgcggccaggaatgcttgttacagctggacctacacggtggccgaaaagccgctggagctcagtctgttcaatatccgtgaacagattgttgacctgctttcgcttcagtcgggcattgatcaggtcgtcgagttgcgggtgttcggtaacggtcaggataccagttaccgcatccgtaggtattcgacggagatgcaactggatcgcgaccgtcagatgctgtgtgctgccaatctgcacgatggcgccgacgccattcccgaaccggtgttgatgctgttgcatgatcctatgcgtagctccatcgcgctccgttcccgcaccagcgaaggtgtgcccaccggcgacttcgagttaccgatagctgttgaaagggatggtccctggctggtgttgcccaaatcgggctcatctgtatcgttccggccgctatttatcgctggtggatggaagccgttggcgccgagcgatggaatccagagtctgcaaaaggcagtgttgaccttcgatcatgcttcacctgttagctccttcacgcctgtgttggatgccatggcggttaaccctatgcatagcggctggcagttcttgcgggccttgtatgaagggtacggctatctgcccctggcgaccttcgaggtctggaaggctctggtagggcacacccgcgcgttggcgatggcacttttcaagtttgaaatggaggcgacattccttggccggctggagactgagtttccgattttctgggagtttcttcccattacagaaatccatcttgcggccaagcgcttcgctgcattccttaaggtgaaaggggtcgctgaggaagccattgatgctctgatcggacgaatgttttcgcgattgggggaaacctattcagcctacgggcagagtgtgcagcgcttcctttctggcaagcctgttggcccagagatcaaggtgccgctagcgactttcaagagtgtcctgcatggctggtaccttgagttgattcgcgagcgcagtgaggcaaagtggccggagttcggcggcaagcggctggagcgttggcacagcagccaaggctgctcggtgattgccttcaggtcggaaatggattaccgcaatgcggtgctctatctaccggtattcgccgctgcggtcgcctgtggcaaggctcggttcacagatgcgtttgcggatggcgtcgaggcgattttcttcttgcgccaggtccgcgatttcgattcgaagtggttcaactcgatctatcaatattgcttgttgaacagcgtcatggatatgcagaaggcagagtcggttaatggataa

SEQ ID NO: 29854 - DNA, 6336 bp, Pseudomonas aeruginosa; identical to SEQ ID NO: 29776

SEQ ID NO: 29855 - DNA, 3336 bp, Pseudomonas aeruginosa; identical to SEQ ID NO: 29777

SEQ ID NO: 29856 - DNA, 6216 bp, Pseudomonas aeruginosa
atgctctatcagaagaactatttctccgctctcaccggcaacctgagcacccgcagcgagcgcgccgcccagggcctgctcagtctaggcaatccgcagctgcggcagttcctgcatgatcagctgaccgccgcccccggcactccgggcgcctggctggccgacccggtcttcgaaccgaccttcggctggcaggaaagctctgaaaccatgagttcgctggccggcggtgacctactacaccgacgccttgccgaagccatggcggccccgcccaaggagccccatgatcttgcagaggaatatgccttccccagcaatcgccatcctttcacccaccagttggcggcctgggagattctcaaccgtcccgagccgcaatcgctggtggtgaccagcggcaccggctcgggcaagaccgaatgcttcctggtgccggtcctcaaccagctggccaaggccatcgacgcgggcgaagacccggaaggcgttcgcgccctgttcatctatccgctgaacgcgctgatcaactcgcagcagaaccgcctggatgcctggacagacggcttcggcgggcagattcgccactgcctgtacaccggcgcgctggagaatgagcgcaagacgtccgaccagcagtacaagggtcaggtgatcgaccgcaagagcctgcgcgccagcccgccgcaactactggtgaccaacgcgaccatgctggagtacatgctcatccgcaaggatgatgagccgatcctgcagaagtcggccggcaagctgcgctggatcattctggacgaggcgcacactcacatcggctcccaggccgcggagatggcgctgctgctgcgccgggtgatgctggccttccaggtcaaaccgcaggatgtgcgcttcgtggcgacctcggccaccttcggctcggatacccagaccatcgagagcctgcgcaccttcctcgccgatatcggcggagtggatccgcagcaggtgcatgtcgtgcagggtcatcgggatatcccggcgctgctgaacgccacgcccgatgccgagcaggacacccctgaagccatcggcgccatcgaggcggaccaggagcagtcgacgctgcgctaccggcgtctggaggccagccccaccgctcggcggctgcgcgccctgttcatgcctgatggccaggtgaaaccacaaagcctgcaagggctgatccgtgagtccggtctaccctcggcgcaggtgctcgcctggctggatctgctgtccggcaccaagagtgccgagggcctgtccttcctgccgctgcgcgcacacctgttccataacgtgattccggcaatccgcgcctgcgtggaccgccactgcagccacaaggccggcaccgcgctggcacatgccgactggccgttcggcatggtctatctggaggagcggactcactgccgctgcggcgcgccgctgatgccactggtgtcctgcgaggagtgcaacgagagcttcctgcaggcggccaccaaaagcagtagcagtgctctggtcgatccgacacagcaacaggacgacgagttcgctctcgaagatgaaaccacggaggccgatgatcagaccaaggataaggatactgtgtcatccatccagatcctgatcaccaatcgcgccgtcaagaatggcagtgcagacttcctcgatcgcgccactcaccgactgacgcccaatcgtccggcggatggtggcatcgagctgcagctcttccgcactgccaagaacgaatgcccctgctgtggcgccaatatccagggccgcagcctgctgcgccccacgcgcatcggtacgcccttcaccctcagcacggtgatcggcaccctgctggagttctgcccgccggatccgatgccgaccggcaagccgttccagggccgcaagctgatctccttcaccgacagccgccagggcaccgcacggattgccatcaagctgcagcaggactccgagcgcaaccggattcgcgggctgatctatcagcgcctgctgcaggcacaacccgtcaatgggctgtccgcagaggacttgcaggacctgcaagaccttcaaacagcaacgcaactgagtcgtatcgagcagaaacacctgcagtctttgctcgacaggcaggctgaagctacaaagggcgcggaaataagctggacagatatggccaaccatctggccggcacgcctgagctacagatgggcatgctcgactactacaacaacctcgcgccgaacaccttcggcaagcaggacagtgtcgccctggccagcatgctgctggcgcgcgagttctatcgccgcccgaagcgcgccaacagcttggaaaccctgggcctggtacaggtctgctatcccaagctggccaacgtcaccggcaaacccatggcctggcccgcgcacctggatgccgagtcttggcgtacctacctgaaagtgctgctggacttcttcgtccgcgaaaacaccatcctgaacatcaacgaacgctggcagtcactgatcggcgcacgcattcgccccaaatgggtagttgcgccggtcttgggggaaaagcctgaaaagctgcagagccgctttgtccgctggccggcggtcaataccgtcaatggcatccagtcgcgggccatcctgctgctctgcaaggcgttcaactggtcgaccgcggcccatcaggaccagatcgactcgatcctgagcgaggcctggcgggtactgacccagcaggcaaagctgctgatttcgtcaggcgacggctatcagctcgacctcaaggacctgagcttccggctgcccgaaacggtctaccagtgcccggtatcgcggcgcttcatcgacaccccgttcgagcagctcagtccctatacgccacgtaccgaccgcgagatggtcgtcaaggtgacgccctacactctgccgcgtccgcccgaggcgctcctgcatgtgccgggtgatgagggcctgctggcgatccgcgactggctgaacagcgagccgcagatccagcagctgcgcaaggacgcgctctggtcggacgtcatggaccgggtcatcgaggggggccactacttccgtgccgccgagcactcggcgcagcagccgaagagcaagctggacagctacgaaggcctgttcaagaccggcaggctgaacctgctgagctgctcgaccaccatggaaatgggcgtggacatcggcggcatcagcgtggtggcgatgaacaacgtgcccccgcacccggccaactacctgcagcgtgccggccgtgccgggcgccgccgcgagggacgctcgctggccctggccgtctgcaagaacaccccgcacgaccagagcgtgttcaacaacccgctctggccgttcaacacgcccatgcgcatgcccaaggtgtccctgcagagccccgatctggtacagcgccacgtcaatgcctggctgctgtcgcactggctcaagcacgtggtcgccgcccaggaaatcaagtcgatgaccgccggtgccttcttcctcgacggcgaactgcctatgtcgctggccgcgcgtttctgcctgtggtgcgacaaccaggcggtcgataccgaaacgctggtgggacaggccctcaaggacatcacccgccgcagcatcctcgacaccaccccgcagcccgagctgttcaagcatgccagccgccgcatgaaagagatcatgcaggcatggcagcaggaatactcggccagccacgcccagctgctgcagattgccgacaagaaggccgctgcctaccgcgccatggatgcacagctcagccgcatcgcgaaggagtacctgctcagcgagctggctgaccggcgcttcctgccgggctacggcttcccgaccgacatcgtcagcttcgacaaccgctgcatgcagaccttgaagcgggaggacggcgaccagcgcgaggacaaccgcgcccgttaccgctcgctggcttcccgcgaccgcatcaccggcctgcgcgaatatgcgccgggcgccgagctggtcatggatgggctggtctacaagtcctccggcatcaccctgaactggcacgctcccgcgtctgccgaaaacgtcaaggagcttcagctgttcaagaaggcctggcgctgtgggcaatgcggtgccagtgactcggccatcaatcccggactggagatcaactgccaggaatgcggcgcgccgatcgagcgcgacaacatccgtgaatacctggtgcctgcaggctttgccgtggacttcttcgacgagccgcacaacgacatcagccgcctgcagtatgtgccggtcaatgcgccctggctgaacgtgccggccagctgggtctgcctggccaacccggcactcggccagttccgcgccagccagcaggcgcagctgttcaactacacctcgggcgccaaccagaagggctttgccatctgcctggagtgcggcaaggccgagcccatgctgagctatcccgatgcatccgcccctgccaatgaacagtatctgccggctattttccgccagaaggcacagcaccgccgcctgcgcggtggcaaaagcaatgaacaaggcgacgggacaaacatctgccccggcagccacaacagctggaagatcaaacagaacgtccaccttggccatgacagcctgaccgatgcgctggaactggtgctgcgcaaccctaccagcggcgaactgctcaacgacgatatcaccgcctactcgattgccgtggcgctgcgcgaggcgattgccgccgatctgggcatacaaaccgaagagctgggctgcgcaagccatccgatcaaggtcgatggccagccaacccgcgccatccaggtgttcgacctgcgcagcggtggctacaccacccaggccgcggagcggctgaatgaagccagcctgtggcgaaaggtcatcgctcgtctggacagctgcaactgctcgcatgcctgccagaactgcctactcagtttcgatacccgcttcgaggccgagcgcctcaatcgtcacgtcgcgctggagtggatcaatcagacttggcttaccggcctggcgctgcccgccgagctcgctgtctttggtccgaaaagccaggcagaaatcgccactctacaggaagcggtcgaaagagcgattactagggacgacaacgcgaagaccgtagccatttacttcactgcacccgccgaagagtgggatcttgctgtcgcacgccgcctgaggcatcaactgcatagctgggaaagcgtcggacacctagtgcaattacatttactggaaagtaccgtttccagcctgccaagagaccaaaaggaatggttggcaaagctagccttcaacggagtacagatatgcctacacaattccataccggatctcggggcgctggcactcaatgtctcactgcaaggcccacaaggctgcattgcctgggctagcgacaatacgaacctggccgcacctggccacacatgggatctagcggaggccggtgcacggatcatccgaggcaccccctccgacctcaaggcagagcgcatcttgaatgctgccgatctcatgccggccccaccccctggcttgatcaagatcgagatcggcaatcagctggatggctcgctcgacaactttgctcgtcggttctgggagcacctaggtactgaggccaatggcctgattaatgatgccctcacaggcaaggatccaattacagaactggtttacagcgaccgttacgtatgcagcccgctagttgtgaatctgctggtcagcgtgatccacgagctcggacggctgagtgatgcagatttcgctatccgaatcctaggccgacaatatcagcgggaagacaatcgctcgccttggcagtaccggcatgactggcactcagctcgcgagcgcgatgaggccctccgccaggctctggcgtactgcggccgcgagggagaggtgctaagcctgcctaccttgccgcactaccgccggctacagcttaagctgcgctccggtaatcaactgaccatccagtttgatcaggggctttcgtattgggaagccgagcgcagcgaaaagtcttaccagctcaggttcgactttgcatcacgcgagcttggagaagaaatcatggagcgcatcaggtgtaaagtttcggcggctggggaggaaaacactcagatattcctctcttcctcttga

SEQ ID NO: 29857 - DNA, 3111 bp, Pseudomonas aeruginosa
ctgtgcgaggcagctggccagagaaaggtagctcatgagaagacccgcagcctggtaattgatgggcgtcgtcagtggcgtctgcaaaccactataaaaagtgaaggcaaacgtttcatcggcctggtcgcggtgaatggcggcctgcccatgcgccttgtcgagtcggcacagggcgggttatcccgcctgctacgcatggtcactgagcaggcactggaataccgcctgcaggatgagcgtctgcgccaggccatcgaggcccaggccgagcttttgcccgcctgctaccagcaggcgccggtctacgaactgctcgacagcttggtcaaggcggtgctgcacatccgcaaggcctatgccctgcagagcgcccaagacccaatcgcccggctgcaggaagagtgccctcactgggaagagctcttccccatcgccctcgattcccaggccgccgccagcctgatcaagggtctggtccgggatacagtcagcatcacgccccagtcgcggcggcctcctttccagatccagcgcggcctgcgcttcagttccgatggctccatacccgtctacgagctgtccttcgtgatgcaggctcaggccaggcgcgatcaggttgccgaggcgctggggatggccgtggatgcgctgccgccacacttccagctcctgctgcgcatcggcgagcgggaatacctggtcggcgaagccctgcttagagacgaggaataccagctgatcgccaggccgctgccggccatccacagcctgcacaatgccgcgcagctgatcgtcagccgctggggcgccaccctgcacattgccaacctaccgggcggcgaagccttgagccatgacgagccgctgatcttcgagaatacctacccctttgcccgcctgctcgcccagggcgatgcgctggtcaagggcgagtcggcactggcggccatgccggcaagaaccatcgtgtatgccgaagaaggcgaggctcgcgagctgcatgactgcctggccgacgggcaaatgctgatggaacttcccgccggtaccacccggctcacgtacaaacaacagcccttcgttgtcaccatcagcgccagcgctacccgccacccggaagcctactggcatggcaacagtctggaggcgctctccgtgccggggctgctgttccgtggcacgccgcgcctacgcattgagcagggaacgggcttttccagctatgcgcccgcccatgagctgtttgtccgcacgcagggcaaggagctgccgctcgcccaagcccgggcgccggggctgtgccggctgatctggcgcaaggatggccagcgcctgctgaacacccgcgccgtgcttctcccggacgaagcctccatcacctacgcaccgggcgccactaccctcgagggcagcattcgccttcaccactggcctgatgtgcccgtgcgctgcgagagcgaacagatcgcgctggagcgccgccatgatggaacaggcctgaccctgcggctgaagagcaccggcagccggccggccaccacggttccgctgtgcctgcagtggcccgacggcgagcagaagctcactctgcccttccccggctatggcgtcacgctgctgcgcaacgacactcctctcaagctgaatcaggccctgaccatcgaagaactgatcggctgccgcgcggtactgatgccggctcagggcgccgaaaactggcggattcgcctgacctccagcggcaccgactcacgctccaccctgtcgcaggaaattcgctacaccgggatccgcgaaatccgtctgttcgagctgattccggcgatccagcagatgatgtcctgccacccggggctcgatcatgtcgtgcagctagagttgattcatgcccaccagacccacgctcgcctacaggtgggccgctactcgacgcgcatccgcctgcacagccagcgcgagatggcgtcactgaacgatagcggctccgacgttctgcttgagcagccgcatgccgagggtctgatattgggcctgccactggcagaaccggaacatgacccggtcagcctgccgctgcatttttccgaacaggtgttcaccggcagctggctggtcagcctgccagacgatgccgtcggcccttggttgctgtacacctctgccgagtcaccgctacacagccgtgcgaccatcgtgccaccgaccgcgagccaactgtcgaagcccctgaccccgctgcgcgaggcgctctgcgaaggcgatggcgaagagcgcatgcgccagctcagggccgcgctgcgcgccatggccgcagacccgcaggctgatgactggcaaacgctggagctgctgctggatcggctgcaccacctgccgctggccagcctggatatctgccaggcactaatccgcgagccgcaggcgctgaccatggccaccctgctgctggatgatttctccagccgcctggccgagcgcctgccctgcgagctgcccttcgagtggctgctgatcgccccggagcactggttcggcaccttcgcgacactgcgccagcaactggccgccgacaatccgcgcatgctgtcggtaatccgcaacgacatccagagcaagagccagttcctgtcccgctggcagcccgcgctgcgcttcatcttcgatcagggcctgcaccactccttcgatctgcaaagcccggatgtggggttcttcctgaaaaacccggcgatgctcaccgcctcctggcagtcgtacctgtttgatggcgagaactcggccatgcagcagatgttccggcgcaaccccgccgaaacccatcaatatcccggcagcggcaatacggatatcggagccttcctgaaaacgccccacgggcaaatgctcctccgctgctgcaagctcccggccaatgacttcaagctggccacggtcatgctgcccttcatggccgccttcgatacctacgccggccgcgggcagcaatggcaagccgacccgccacgcctgttcagcctcagaaacgctcgccagttcgataccgtctggttcgactcggtctatcaacttggcctggccatggcgcaagccgcctcgatgcagaagtga

SEQ ID NO: 29858 - DNA, 6216 bp, Pseudomonas aeruginosa; identical to SEQ ID NO: 29856

SEQ ID NO: 29859 - DNA, 3111 bp, Pseudomonas aeruginosa
ctgtgcgaggcagctggccagagaaaggtagctcatgagaagacccgcagcctggtaattgatgggcgtcgtcagtggcgtctgcaaaccactataaaaagtgaaggcaaacgtttcatcggcctggtcgcggtgaatggcggcctgcccatgcgccttgtcgagtcggcacagggcgggttatcccgcctgctacgcatggtcactgagcaggcactggaataccgcctgcaggatgagcgtctgcgccaggccatcgaggcccaggccgagcttttgcccgcctgctaccagcaggcgccggtctacgaactgctcgacagcttggtcaaggcggtgctgcacatccgcaaggcctatgccctgcagagcgcccaagacccaatcgcccggctgcaggaagagtgccctcactgggaagagctcttccccatcgccctcgattcccaggccgccgccagcctgatcaagggtctggtccgggatacagtcagcatcacgccccagtcgcggcggcctcctttccagatccagcgcggcctgcgcttcagttccgatggctccatacccgtctacgagctgtccttcgtgatgcaggctcaggccaggcgcgatcaggttgccgaggcgctggggatggccgtggatgcgctgccgccacacttccagctcctgctgcgcatcggcgagcgggaatacctggtcggcgaagccctgcttagagacgaggaataccagctgatcgccaggccgctgccggccatccacagcctgcacaatgccgcgcagctgatcgtcagccgctggggcgccaccctgcacattgccaacctaccgggcggcgaagccttgagccatgacgagccgctgatcttcgagaatacctacccctttgcccgcctgctcgcccagggcgatgcgctggtcaagggcgagtcggcactggcggccatgccggcaagaaccatcgtgtatgccgaagaaggcgaggctcgcgagctgcatgactgcctggccgacgggcaaatgctgatggaacttcccgccggtaccacccggctcacgtacaaacaacagcccttcgttgtcaccatcagcgccagcgctacccgccacccggaagcctactggcatggcaacagtctggaggcgctctccgtgccggggctgctgttccgtggcacgccgcgcctacgcattgagcagggaacgggcttttccagctatgcgcccgcccatgagctgtttgtccgcacgcagggcaaggagctgccgctcgcccaagcccgggcgccggggctgtgccggctgatctggcgcaaggatggccagcgcctgctgaacacccgcgccgtgcttctcccggacgaagcctccatcacctacgcgccgggcgccactaccctcgagggcagcattcgccttcaccactggcctgatgtgcccgtgcgctgcgagagcgaacagatcgcgctggagcgccgccatgatggaacaggcctgaccctgcggctgaagagcaccggcagccggccggccaccacggttccgctgtgcctgcagtggcccgacggcgagcagaagctcactctgcccttccccggctatggcgtcacgctgctgcgcaacgacactcctctcaagctgaatcaggccctgaccatcgaagaactgatcggctgccgcgcggtactgatgccggctcagggcgccgaaaactggcggattcgcctgacctccagcggcaccgactcacgctccaccctgtcgcaggaaattcgctacaccgggatccgcgaaatccgtctgttcgagctgattccggcgatccagcagatgatgtcctgccacccggggctcgatcatgtcgtgcagctagagttgattcatgcccaccagacccacgctcgcctacaggtgggccgctactcgacgcgcatccgcctgcacagccagcgcgagatggcgtcactgaacgatagcggctccgacgttctgcttgagcagccgcatgccgagggtctgatattgggcctgccactggcagaaccggaacatgacccggtcagcctgccgctgcatttttccgaacaggtgttcaccggcagctggctggtcagcctgccagacgatgccgtcggcccttggttgctgtacacctctgccgagtcaccgctacacagccgtgcgaccatcgtgccaccgaccgcgagccaactgtcgaagcccctgaccccgctgcgcgaggcgctctgcgaaggcgatggcgaagagcgcatgcgccagctcagggccgcgctgcgcgccatggccgcagacccgcaggctgatgactggcaaacgctggagctgctgctggatcggctgcaccacctgccgctggccagcctggatatctgccaggcactaatccgcgagccgcaggcgctgaccatggccaccctgctgctggatgatttctccagccgcctggccgagcgcctgccctgcgagctgcccttcgagtggctgctgatcgccccggagcactggttcggcaccttcgcgacactgcgccagcaactggccgccgacaatccgcgcatgctgtcggtaatccgcaacgacatccagagcaagagccagttcctgtcccgctggcagcccgcgctgcgcttcatcttcgatcagggcctgcaccactccttcgatctgcaaagcccggatgtggggttcttcctgaaaaacccggcgatgctcaccgcctcctggcagtcgtacctgtttgatggcgagaactcggccatgcagcagatgttccggcgcaaccccgccgaaacccatcaatatcccggcagcggcaatacggatatcggagccttcctgaaaacgccccacgggcaaatgctcctccgctgctgcaagctcccggccaatgacttcaagctggccacggtcatgctgcccttcatggccgccttcgatacctacgccggccgcgggcagcaatggcaagccgacccgccacgcctgttcagcctcagaaacgctcgccagttcgataccgtctggttcgactcggtctatcaacttggcctggccatggcgcaagccgcctcgatgcagaagtga

SEQ ID NO: 29860 - DNA, 6216 bp, Pseudomonas aeruginosa
atgctctatcagaagaactatttctccgctctcaccggcaacctgagcacccgcagcgagcgcgccgcccagggcctgctcagtctaggcaatccgcagctgcggcagttcctgcatgatcagctgaccgccgcccccggcactccgggcgcctggctggccgacccggtcttcgaaccgaccttcggctggcaggaaagctctgaaaccatgagttcgctggccggcggtgacctactacaccgacgccttgccgaagccatggcggccccgcccaaggagccccatgatcttgcagaggaatatgccttccccagcaatcgccatcctttcacccaccagttggcggcctgggagattctcaaccgtcccgagccgcaatcgctggtggtgaccagcggcaccggctcgggcaagaccgaatgcttcctggtgccggtcctcaaccagctggccaaggccatcgacgcgggcgaagacccggaaggcgttcgcgccctgttcatctatccgctgaacgcgctgatcaactcgcagcagaaccgcctggatgcctggacagacggcttcggcgggcagattcgccactgcctgtacaccggcgcgctggagaatgagcgcaagacgtccgaccagcagtacaagggtcaggtgatcgaccgcaagagcctgcgcgccagcccgccgcaactgctggtgaccaacgcgaccatgctggagtacatgctcatccgcaaggatgatgagccgatcctgcagaagtcggccggcaagctgcgctggatcattctggacgaggcgcacactcacatcggctcccaggccgcggagatggcgctgctgctgcgccgggtgatgctggccttccaggtcaaaccgcaggatgtgcgcttcgtggcgacctcggccaccttcggctcggatacccagaccatcgagagcctgcgcaccttcctcgccgatatcggcggagtggatccgcagcaggtgcatgtcgtgcagggtcatcgggatatcccggcgctgctgaacgccacgcccgatgccgagcaggacacccctgaagccatcggcgccatcgaggcggaccaggagcggtcgacgctgcgctaccggcgtctggaggccagccccaccgctcggcggctgcgcgccctgttcatgcctgatggccaggtgaaaccacaaagcctgcaagggctgatccgtgagtccggtctaccctcggcgcaggtgctcgcctggctggatctgctgtccggcaccaagagtgccgagggcctgtccttcctgccgctgcgcgcacacctgttccataacgtgattccggcaatccgcgcctgcgtggaccgccactgcagccacaaggccggcaccgcgctggcacatgccgactggccgttcggcatggtctatctggaggagcggactcactgccgctgcggcgcgccgctgatgccactggtgtcctgcgaggagtgcaacgagagcttcctgcaggcggccaccaaaagcagtagcagtgctctggtcgatccgacacagcaacaggacgacgagttcgctctcgaagatgaaaccacggaggccgatgatcagaccaaggataaggatactgtgtcatccatccagatcctgatcaccaatcgcgccgtcaagaatggcagtgcagacttcctcgatcgcgccactcaccgactgacgcccaatcgtccggcggatggtggcatcgagctgcagctcttccgcactgccaagaacgaatgcccctgctgtggcgccaatatccagggccgcagcctgctgcgccccacgcgcatcggtacgcccttcaccctcagcacggtgatcggcaccctgctggagttctgcccgccggatccgatgccgaccggcaagccgttccagggccgcaagctgatctccttcaccgacagccgccagggcaccgcacggattgccatcaagctgcagcaggactccgagcgcaaccggattcgcgggctgatctatcagcgcctgctgcaggcacaacccgtcaatgggctgtccgcagaggacttgcaggacctgcaagaccttcaaacagcaacgcaactgagtcgtatcgagcagaaacacctgcagtctttgctcgacaggcaggctgaagctacaaagggcgcggaaataagctggacagatatggccaaccatctggccggcacgcctgagctacagatgggcatgctcgactactacaacaacctcgcgccgaacaccttcggcaagcaggacagtgtcgccctggccagcatgctgctggcgcgcgagttctatcgccgcccgaagcgcgccaacagcttggaaaccctgggcctggtacaggtctgctatcccaagctggccaacgtcaccggcaaacccatggcctggcccgcgcacctggatgccgagtcttggcgtacctacctgaaagtgctgctggacttcttcgtccgcgaaaacaccatcctgaacatcaacgaacgctggcagtcactgatcggcgcacgcattcgccccaaatgggtagttgcgccggtcttgggggaaaagcctgaaaagctgcagagccgctttgtccgctggccggcggtcaataccgtcaatggcatccagtcgcgggccatcctgctgctctgcaaggcgttcaactggtcgaccgcggcccatcaggaccagatcgactcgatcctgagcgaggcctggcgggtactgacccagcaggcaaagctgctgatttcgtcaggcgacggctatcagctcgacctcaaggacctgagcttccggctgcccgaaacggtctaccagtgcccggtatcgcggcgcttcatcgacaccccgttcgagcagctcagtccctatacgccacgtaccgaccgcgagatggtcgtcaaggtgacgccctacactctgccgcgtccgcccgaggcgctcctgcatgtgccgggtgatgagggcctgctggcgatccgcgactggctgaacagcgagccgcagatccagcagctgcgcaaggacgcgctctggtcggacgtcatggaccgggtcatcgaggggggccactacttccgtgccgccgagcactcggcgcagcagccgaagagcaagctggacagctacgaaggcctgttcaagaccggcaggctgaacctgctgagctgctcgaccaccatggaaatgggcgtggacatcggcggcatcagcgtggtggcgatgaacaacgtgcccccgcacccggccaactacctgcagcgtgccggccgtgccgggcgccgccgcgagggacgctcgctggccctggccgtctgcaagaacaccccgcacgaccagagcgtgttcaacaacccgctctggccgttcaacacgcccatgcgcatgcccaaggtgtccctgcagagccccgatctggtacagcgccacgtcaatgcctggctgctgtcgcactggctcaagcacgtggtcgccgcccaggaaatcaagtcgatgaccgccggtgccttcttcctcgacggcgaactgcctatgtcgctggccgcgcgtttctgcctgtggtgcgacaaccaggcggtcgataccgaaacgctggtgggacaggccctcaaggacatcacccgccgcagcatcctcgacaccaccccgcagcccgagctgttcaagcatgccagccgccgcatgaaagagatcatgcaggcatggcagcaggaatactcggccagccacgcccagctgctgcagattgccgacaagaaggccgctgcctaccgcgccatggatgcacagctcagccgcatcgcgaaggagtacctgctcagcgagctggctgaccggcgcttcctgccgggctacggcttcccgaccgacatcgtcagcttcgacaaccgctgcatgcagaccttgaagcgggaggacggcgaccagcgcgaggacaaccgcgcccgttaccgctcgctggcttcccgcgaccgcatcaccggcctgcgcgaatatgcgccgggcgccgagctggtcatggatgggctggtctacaagtcctccggcatcaccctgaactggcacgctcccgcgtctgccgaaaacgtcaaggagcttcagctgttcaagaaggcctggcgctgtgggcaatgcggtgccagtgactcggccatcaatcccggactggagatcaactgccaggaatgcggcgcgccgatcgagcgcgacaacatccgtgaatacctggtgcctgcaggctttgccgtggacttcttcgacgagccgcacaacgacatcagccgcctgcagtatgtgccggtcaatgcgccctggctgaacgtgccggccagctgggtctgcctggccaacccggcactcggccagttccgcgccagccagcaggcgcagctgttcaactacacctcgggcgccaaccagaagggctttgccatctgcctggagtgcggcaaggccgagcccatgctgagctatcccgatgcatccgcccctgccaatgaacagtatctgccggctattttccgccagaaggcacagcaccgccgcctgcgcggtggcaaaagcaatgaacaaggcgacgggacaaacatctgccccggcagccacaacagctggaagatcaaacagaacgtccaccttggccatgacagcctgaccgatgcgctggaactggtgctgcgcaaccctaccagcggcgaactgctcaacgacgatatcaccgcctactcgattgccgtggcgctgcgcgaggcgattgccgccgatctgggcatacaaaccgaagagctgggctgcgcaagccatccgatcaaggtcgatggccagccaacccgcgccatccaggtgttcgacctgcgcagcggtggctacaccacccaggccgcggagcggctgaatgaagccagcctgtggcgaaaggtcatcgctcgtctggacagctgcaactgctcgcatgcctgccagaactgcctactcagtttcgatacccgcttcgaggccgagcgcctcaatcgtcacgtcgcgctggagtggatcaatcagacttggcttgccggcctggcgctgcccgccgagctcgctgtctttggtccgaaaagccaggcagaaatcgccactctacaggaagcggtcgaaagagcgattactagggacgacaacgcgaagaccgtagccatttacttcactgcacccgccgaagagtgggatcttgctgtcgcacgccgcctgaggcatcaactgcatagctgggaaagcgtcggacacctagtgcaattacatttactggaaagtaccgtttccagcctgccaagagaccaaaaggaatggttggcaaagctagccttcaacggagtacagatatgcctacacaattccataccggatctcggggcgctggcactcaatgtctcactgcaaggcccacaaggctgcattgcctgggctagcgacaatacgaacctggccgcacctggccacacatgggatctagcggaggccggtgcacggatcatccgaggcaccccctccgacctcaaggcagagcgcatcttgaatgctgccgatctcatgccggcctcaccccctggcttgatcaagatcgagatcggcaatcagctggatggctcgctcgacaactttgctcgtcggttctgggagcacctaggtactgaggccaatggcctgattaatgatgccctcacaggcaaggatccaattacagaactggtttacagcgaccgttacgtatgcagcccgctagttgtgaatctgctggtcagcgtgatccacgagctcggacggctgagtgatgcagatttcgctatccgaatcctaggccgacaatatcagcgggaagacaatcgctcgccttggcagtaccggcatgactggcactcagctcgcgagcgcgatgaggccctccgccaggctctggcgtactgcggccgcgagggagaggtgctaagcctgcctaccttgccgcactaccgccggctacagcttaagctgcgctccggtaatcaactgaccatccagtttgatcaggggctttcgtattgggaagccgagcgcagcgaaaagtcttaccagctcaggttcgactttgcatcacgcgagcttggagaagaaatcatggagcgcatcaggtgtaaagtttcggcggctggggaggaaaacactcagatattcctctcttcctcttga

SEQ ID NO: 29861 - DNA, 3111 bp, Pseudomonas aeruginosa; identical to SEQ ID NO: 29769

SEQ ID NO: 29862 - DNA, 6216 bp, Pseudomonas aeruginosa; identical to SEQ ID NO: 29856

SEQ ID NO: 29863 - DNA, 3111 bp, Pseudomonas aeruginosa; identical to SEQ ID NO: 29857

SEQ ID NO: 29864 - DNA, 6216 bp, Pseudomonas aeruginosa; identical to SEQ ID NO: 29856

SEQ ID NO: 29865 - DNA, 3111 bp, Pseudomonas aeruginosa; identical to SEQ ID NO: 29857

SEQ ID NO: 29866 - DNA, 6216 bp, Pseudomonas aeruginosa; identical to SEQ ID NO: 29860

SEQ ID NO: 29867 - DNA, 3111 bp, Pseudomonas aeruginosa; identical to SEQ ID NO: 29769

SEQ ID NO: 29868 - DNA, 6216 bp, Pseudomonas aeruginosa; identical to SEQ ID NO: 29774

SEQ ID NO: 29869 - DNA, 3111 bp, Pseudomonas aeruginosa; identical to SEQ ID NO: 29769

SEQ ID NO: 29870 - DNA, 6216 bp, Pseudomonas aeruginosa; identical to SEQ ID NO: 29774

SEQ ID NO: 29871 - DNA, 3111 bp, Pseudomonas aeruginosa; identical to SEQ ID NO: 29769

SEQ ID NO: 29872 - DNA, 6216 bp, Pseudomonas aeruginosa; identical to SEQ ID NO: 29774

SEQ ID NO: 29873 - DNA, 3111 bp, Pseudomonas aeruginosa; identical to SEQ ID NO: 29769

SEQ ID NO: 29874 - DNA, 6216 bp, Pseudomonas aeruginosa; identical to SEQ ID NO: 29774

SEQ ID NO: 29875 - DNA, 3111 bp, Pseudomonas aeruginosa; identical to SEQ ID NO: 29769

SEQ ID NO: 29876 - DNA, 6336 bp, Pseudomonas aeruginosa; identical to SEQ ID NO: 29828

SEQ ID NO: 29877 - DNA, 3336 bp, Pseudomonas aeruginosa; identical to SEQ ID NO: 29829

SEQ ID NO: 29878 - DNA, 6216 bp, Pseudomonas aeruginosa 148; identical to SEQ ID NO: 29764

SEQ ID NO: 29879 - DNA, 2913 bp, Pseudomonas aeruginosa 148
atggtcactgagcaggcactggaataccgcctgcaggatgagcgtctgcgccaggccatcgaggcccaggccgagcttttgcccgcctgctaccagcaggcgccggtctacgaactgctcgacagcttggtcaaggcggtgctgcacatccgcaaggcctatgccctgcagagcgcccaagacccaatcgcccggctgcaggaagagtgccctcactgggaagagctcttccccatcgccctcgattcccaggccgccgccagcctgatcaagggtctggtccgggatacagtcagcatcacgccccagtcgcggcggcctcctttccagatccagcgcggcctgcgcttcagttccgatggctccatacccgtctacgagctgtccttcgtgatgcaggctcaggccaggcgcgatcaggttgccgaggcgctggggatggccgtggatgcgctgccgccacacttccagctcctgctgcgcatcggcgagcgggaatacctggtcggcgaagccctgcttagagacgaggaataccagctgatcgccaggccgctgccggccatccacagcctgcacaatgccgcgcagctgatcgtcagccgctggggcgccaccctgcacattgccaacctaccgggcggcgaagccttgagccatgacgagccgctgatcttcgagaatacctacccctttgcccgcctgctcgcccagggcgatgcgctggtcaagggcgagtcggcactggcggccatgccggcaagaaccatcgtgtatgccgaagaaggcgaggctcgcgagctgcatgactgcctggccgacgggcaaatgctgatggaacttcccgccggtaccacccggctcacgtacaaacaacagcccttcgttgtcaccatcagcgccagcgctacccgccacccggaagcctactggcatggcaacagtctggaggcgctctccgtgccggggctgctgttccgtggcacgccgcgcctacgcattgagcagggaacgggcttttccagctatgcgcccgcccatgagctgtttgtccgcacgcagggcaaggagctgccgctcgcccaagcccgggcgccggggctgtgccggctgatctggcgcaaggatggccagcgcctgctgaacacccgcgccgtgcttctcccggacgaagcctccatcacctacgcgccgggcgccactaccctcgagggcagcattcgccttcaccactggcctgatgtgcccgtgcgctgcgagagcgaacagatcgcgctggagcgccgccatgatggaacaggcctgaccctgcggctgaagagcaccggcagccggccggccaccacggttccgctgtgcctgcagtggcccgacggcgagcagaagctcactctgcccttccccggctatggcgtcacgctgctgcgcaacgacactcctctcaagctgaatcaggccctgaccatcgaagaactgatcggctgccgcgcggtactgatgtcggctcagggcgccgaaaactggcggattcgcctgacctccagcggcaccgactcacgctccaccctgtcgcaggaaattcgctacaccgggatccgcgaaatccgtctgttcgagctgattccggcgatccagcagatgatgtcctgccacccggggctcgatcatgtcgtgcagctagagttgattcatgcccaccagacccacgctcgcctacaggtgggccgctactcgacgcgcatccgcctgcacagccagcgcgagatggcgtcactgaacgatagcggctccgacgttctgcttgagcagccgcatgccgagggtctgatattgggcctgccactggcagaaccggaacatgacccggtcagcctgccgctgcatttttccgaacaggtgttcaccggcagctggctggtcagcctgccagacgatgccgtcggcccttggttgctgtacacctctgccgagtcaccgctacacagccgtgcgaccatcgtgccaccgaccgcgagccaactgtcgaagcccctgaccccgctgcgcgaggcgctctgcgaaggcgatggcgaagagcgcatgcgccagctcagggccgcgctgcgcgccatggccgcagacccgcaggctgatgactggcaaacgctggagctgctgctggatcggctgcaccacctgccgctggccagcctggatatctgccaggcactaatccgcgagccgcaggcgctgaccatggccaccctgctgctggatgatttctccagccgcctggccgagcgcctgccctgcgagctgcccttcgagtggctgctgatcgccccggagcactggttcggcaccttcgcgacactgcgccagcaactggccgccgacaatccgcgcatgctgtcggtaatccgcaacgacatccagagcaagagccagttcctgtcccgctggcagcccgcgctgcgcttcatcttcgatcagggcctgcaccactccttcgatctgcaaagcccggatgtggggttcttcctgaaaaacccggcgatgctcaccgcctcctggcagtcgtacctgtttgatggcgagaactcggccatgcagcagatgttccggcgcaaccccgccgaaacccatcaatatcccggcagcggcaatacggatatcggagccttcctgaaaacgccccacgggcaaatgctcctccgctgctgcaagctcccggccaatgacttcaagctggccacggtcatgctgcccttcatggccgccttcgatacctacgccggccgcgggcagcaatggcaagccgacccgccacgcctgttcagcctcagaaacgctcgccagttcgataccgtctggttcgactcggtctatcaacttggcctggccatggcgcaagccgcctcgatgcagaagtga

SEQ ID NO: 29880 - DNA, 6216 bp, Pseudomonas aeruginosa BL02; identical to SEQ ID NO: 29774

SEQ ID NO: 29881 - DNA, 3348 bp, Pseudomonas aeruginosa BL02
gtgccgcttgtccaatggatttcagactttttatctaggcgtggactgcaagagccggatggtcgccccctattcgcctataagacctcatcagaagaattcgagacactgcgtcagctcttgcatgggctcaacctggggcaacacgcgcatcccgaatatgctcaggcctggctactctttgcggccgaatggtggaagcgcgaatatccgggaggagcatggcgttggggaccactgtgcgaggcagctggccagagaaaggtagctcatgagaagacccgcagcctggtaattgatgggcgtcgtcagtggcgtctgcaaaccactataaaaagtgaaggcaaacgtttcatcggcctggtcgcggtgaatggcggcctgcccatgcgccttgtcgagtcggcacagggcgggttatcccgcctgctacgcatggtcactgagcaggcactggaataccgcctgcaggatgagcgtctgcgccaggccatcgaggcccaggccgagcttttgcccgcctgctaccagcaggcgccggtctacgaactgctcgacagcttggtcaaggcggtgctgcacatccgcaaggcctatgccctgcagagcgcccaagacccaatcgcccggctgcaggaagagtgccctcactgggaagagctcttccccatcgccctcgattcccaggccgccgccagcctgatcaagggtctggtccgggatacagtcagcatcacgccccagtcgcggcggcctcctttccagatccagcgcggcctgcgcttcagttccgatggctccatacccgtctacgagctgtccttcgtgatgcaggctcaggccaggcgcgatcaggttgccgaggcgctggggatggccgtggatgcgctgccgccacacttccagctcctgctgcgcatcggcgagcgggaatacctggtcggcgaagccctgcttagagacgaggaataccagctgatcgccaggccgctgccggccatccacagcctgcacaatgccgcgcagctgatcgtcagccgctggggcgccaccctgcacattgccaacctaccgggcggcgaagccttgagccatgacgagccgctgatcttcgagaatacctacccctttgcccgcctgctcgcccagggcgatgcgctggtcaagggcgagtcggcactggcggccatgccggcaagaaccatcgtgtatgccgaagaaggcgaggctcgcgagctgcatgactgcctggccgacgggcaaatgctgatggaacttcccgccggtaccacccggctcacgtacaaacaacagcccttcgttgtcaccatcagcgccagcgctacccgccacccggaagcctactggcatggcaacagtctggaggcgctctccgtgccggggctgctgttccgtggcacgccgcgcctacgcattgagcagggaacgggcttttccagctatgcgcccgcccatgagctgtttgtccgcacgcagggcaaggagctgccgctcgcccaagcccgggcgccggggctgtgccggctgatctggcgcaaggatggccagcgcctgctgaacacccgcgccgtgcttctcccggacgaagcctccatcacctacgcgccgggcgccactaccctcgagggcagcattcgccttcaccactggcctgatgtgcccgtgcgctgcgagagcgaacagatcgcgctggagcgccgccatgatggaacaggcctgaccctgcggctgaagagcaccggcagccggccggccaccacggttccgctgtgcctgcagtggcccgacggcgagcagaagctcactctgcccttccccggctatggcgtcacgctgctgcgcaacgacactcctctcaagctgaatcaggccctgaccatcgaagaactgatcggctgccgcgcggtactgatgtcggctcagggcgccgaaaactggcggattcgcctgacctccagcggcaccgactcacgctccaccctgtcgcaggaaattcgctacaccgggatccgcgaaatccgtctgttcgagctgattccggcgatccagcagatgatgtcctgccacccggggctcgatcatgtcgtgcagctagagttgattcatgcccaccagacccacgctcgcctacaggtgggccgctactcgacgcgcatccgcctgcacagccagcgcgagatggcgtcactgaacgatagcggctccgacgttctgcttgagcagccgcatgccgagggtctgatattgggcctgccactggcagaaccggaacatgacccggtcagcctgccgctgcatttttccgaacaggtgttcaccggcagctggctggtcagcctgccagacgatgccgtcggcccttggttgctgtacacctctgccgagtcaccgctacacagccgtgcgaccatcgtgccaccgaccgcgagccaactgtcgaagcccctgaccccgctgcgcgaggcgctctgcgaaggcgatggcgaagagcgcatgcgccagctcagggccgcgctgcgcgccatggccgcagacccgcaggctgatgactggcaaacgctggagctgctgctggatcggctgcaccacctgccgctggccagcctggatatctgccaggcactaatccgcgagccgcaggcgctgaccatggccaccctgctgctggatgatttctccagccgcctggccgagcgcctgccctgcgagctgcccttcgagtggctgctgatcgccccggagcactggttcggcaccttcgcgacactgcgccagcaactggccgccgacaatccgcgcatgctgtcggtaatccgcaacgacatccagagcaagagccagttcctgtcccgctggcagcccgcgctgcgcttcatcttcgatcagggcctgcaccactccttcgatctgcaaagcccggatgtggggttcttcctgaaaaacccggcgatgctcaccgcctcctggcagtcgtacctgtttgatggcgagaactcggccatgcagcagatgttccggcgcaaccccgccgaaacccatcaatatcccggcagcggcaatacggatatcggagccttcctgaaaacgccccacgggcaaatgctcctccgctgctgcaagctcccggccaatgacttcaagctggccacggtcatgctgcccttcatggccgccttcgatacctacgccggccgcgggcagcaatggcaagccgacccgccacgcctgttcagcctcagaaacgctcgccagttcgataccgtctggttcgactcggtctatcaacttggcctggccatggcgcaagccgcctcgatgcagaagtga

SEQ ID NO: 29882 - DNA, 6216 bp, Pseudomonas aeruginosa BL03
atgctctatcagaagaactatttctccgctctcaccggcaacctgagcacccgcagcgagcgcgccgcccagggcctgctcagtctaggcaatccgcagctgcggcagttcctgcatgatcagctgaccgccgcccccggcactccgggcgcctggctggccgacccggtcttcgaaccgaccttcggctggcaggaaagctctgaaaccatgagttcgctggccggcggtgacctactacaccgacgccttgccgaagccatggcggccccgcccaaggagccccatgatcttgcagaggaatatgccttccccagcaatcgccatcctttcacccaccagttggcggcctgggagattctcaaccgtcccgagccgcaatcgctggtggtgaccagcggcaccggctcgggcaagaccgaatgcttcctggtgccggtcctcaaccagctggccaaggccatcgacgcgggcgaagacccggaaggcgttcgcgccctgttcatctatccgctgaacgcgctgatcaactcgcagcagaaccgcctggatgcctggacagacggcttcggcgggcagattcgccactgcctgtacaccggcgcgctggagaatgagcgcaagacgtccgaccagcagtacaagggtcaggtgatcgaccgcaagagcctgcgcgccagcccgccgcaactgctggtgaccaacgcgaccatgctggagtacatgctcatccgcaaggatgatgagccgatcctgcagaagtcggccggcaagctgcgctggatcattctggacgaggcgcacactcacatcggctcccaggccgcggagatggcgctgctgctgcgccgggtgatgctggccttccaggtcaaaccgcaggatgtgcgcttcgtggcgacctcggccaccttcggctcggatacccagaccatcgagagcctgcgcaccttcctcgccgatatcggcggagtggatccgcagcaggtgcatgtcgtgcagggtcatcgggatatcccggcgctgctgaacgccacgcccgatgccgagcaggacacccctgaagccatcggcgccatcgaggcggaccaggagcagtcgacgctgcgctaccggcgtctggaggccagccccaccgctcggcggctgcgcgccctgttcatgcctgatggccaggtgaaaccacaaagcctgcaagggctgatccgtgagtccggtctaccctcggcgcaggtgctcgcctggctggatctgctgtccggcaccaagagtgccgagggcctgtccttcctgccgctgcgcgcacacctgttccataacgtgattccggcaatccgcgcctgcgtggaccgccactgcagccacaaggccggcaccgcgctggcacatgccgactggccgttcggcatggtctatctggaggagcggactcactgccgctgcggcgcgccgctgatgccactggtgtcctgcgaggagtgcaacgagagcttcctgcaggcggccaccaaaagcagtagcagtgctctggtcgatccgacacagcaacaggacgacgagttcgctctcgaagatgaaaccacggaggccgatgatcagaccaaggataaggatactgtgtcatccatccagatcctgatcaccaatcgcgccgtcaagaatggcagtgcagacttcctcgatcgcgccactcaccgactgacgcccaatcgtccggcggatggtggcatcgagctgcagctcttccgcactgccaagaacgaatgcccctgctgtggcgccaatatccagggccgcagcctgctgcgccccacgcgcatcggtacgcccttcaccctcagcacggtgatcggcaccctgctggagttctgcccgccggatccgatgccgaccggcaagccgttccagggccgcaagctgatctccttcaccgacagccgccagggcaccgcacggattgccatcaagctgcagcaggactccgagcgcaaccggattcgcgggctgatctatcagcgcctgctgcaggcacaacccgtcaatgggctgtccgcagaggacttgcagggcctgcaagaccttcaaacagcaacgcaactgagtcgtatcgagcagaaacacctgcagtctttgctcgacaggcaggctgaagctacaaagggcgcggaaataagctggacagatatggccaaccatctggccggcacgcctgagctacagatgggcatgctcgactactacaacaacctcgcgccgaacaccttcggcaagcaggacagtgtcgccctggccagcatgctgctggcgcgcgagttctatcgccgcccgaagcgcgccaacagcttggaaaccctgggcctggtacaggtctgctatcccaagctggccaacgtcaccggcaaacccatggcctggcccgcgcacctggatgccgagtcttggcgtacctacctgaaagtgctgctggacttcttcgtccgcgaaaacaccatcctgaacatcaacgaacgctggcagtcactgatcggcgcacgcattcgccccaaatgggtagttgcgccggtcttgggggaaaagcctgaaaagctgcagagccgctttgtccgctggccggcggtcaataccgtcaatggcatccagtcgcgggccatcctgctgctctgcaaggcgttcaactggtcgaccgcggcccatcaggaccagatcgactcgatcctgagcgaggcctggcgggtactgacccagcaggcaaagctgctgatttcgtcaggcgacggctatcagctcgacctcaaggacctgagcttccggctgcccgaaacggtctaccagtgcccggtatcgcggcgcttcatcgacaccccgttcgagcagctcagtccctatacgccacgtaccgaccgcgagatggtcgtcaaggtgacgccctacactctgccgcgtccgcccgaggcgctcctgcatgtgccgggtgatgagggcctgctggcgatccgcgactggctgaacagcgagccgcagatccagcagctgcgcaaggacgcgctctggtcggacgtcatggaccgggtcatcgaggggggccactacttccgtgccgccgagcactcggcgcagcagccgaagagcaagctggacagctacgaaggcctgttcaagaccggcaggctgaacctgctgagctgctcgaccaccatggaaatgggcgtggacatcggcggcatcagcgtggtggcgatgaacaacgtgcccccgcacccggccaactacctgcagcgtgccggccgtgccgggcgccgccgcgagggacgctcgctggccctggccgtctgcaagaacaccccgcacgaccagagcgtgttcaacaacccgctctggccgttcaacacgcccatgcgcatgcccaaggtgtccctgcagagccccgatctggtacagcgccacgtcaatgcctggctgctgtcgcactggctcaagcacgtggtcgccgcccaggaaatcaagtcgatgaccgccggtgccttcttcctcgacggcgaactgcctatgtcgctggccgcgcgtttctgcctgtggtgcgacaaccaggcggtcgataccgaaacgctggtgggacaggccctcaaggacatcacccgccgcagcatcctcgacaccaccccgcagcccgagctgttcaagcatgccagccgccgcatgaaagagatcatgcaggcatggcagcaggaatactcggccagccacgcccagctgctgcagattgccgacaagaaggccgctgcctaccgcgccatggatgcacagctcagccgcatcgcgaaggagtacctgctcagcgagctggctgaccggcgcttcctgccgggctacggcttcccgaccgacatcgtcagcttcgacaaccgctgcatgcagaccttgaagcgggaggacggcgaccagcgcgaggacaaccgcgcccgttaccgctcgctggcttcccgcgaccgcatcaccggcctgcgcgaatatgcgccgggcgccgagctggtcatggatgggctggtctacaagtcctccggcatcaccctgaactggcacgctcccgcgtctgccgaaaacgtcaaggagcttcagctgttcaagaaggcctggcgctgtgggcaatgcggtgccagtgactcggccatcaatcccggactggagatcaactgccaggaatgcggcgcgccgatcgagcgcgacaacatccgtgaatacctggtgcctgcaggctttgccgtggacttcttcgacgagccgcacaacgacatcagccgcctgcagtatgtgccggtcaatgcgccctggctgaacgtgccggccagctgggtctgcctggccaacccggcactcggccagttccgcgccagccagcaggcgcagctgttcaactacacctcgggcgccaaccagaagggctttgccatctgcctggagtgcggcaaggccgagcccatgctgagctatcccgatgcatccgcccctgccaatgaacagtatctgccggctattttccgccagaaggcacagcaccgccgcctgcgcggtggcaaaagcaatgaacaaggcgacgggacaaacatctgccccggcagccacaacagctggaagatcaaacagaacgtccaccttggccatgacagcctgaccgatgcgctggaactggtgctgcgcaaccctaccagcggcgaactgctcaacgacgatatcaccgcctactcgattgccgtggcgctgcgcgaggcgattgccgccgatctgggcatacaaaccgaagagctgggctgcgcaagccatccgatcaaggtcgatggccagccaacccgcgccatccaggtgttcgacctgcgcagcggtggctacaccacccaggccgcggagcggctgaatgaagccagcctgtggcgaaaggtcatcgctcgtctggacagctgcaactgctcgcatgcctgccagaactgcctactcagtttcgatacccgcttcgaggccgagcgcctcaatcgtcacgtcgcgctggagtggatcaatcagacttggcttaccggcctggcgctgcccgccgagctcgctgtctttggtccgaaaagccaggcagaaatcgccactctacaggaagcggtcgaaagagcgattactagggacgacaacgcgaagaccgtagccatttacttcactgcacccgccgaagagtgggatcttgctgtcgcacgccgcctgaggcatcaactgcatagctgggaaagcgtcggacacctagtgcaattacatttactggaaagtaccgtttccagcctgccaagagaccaaaaggaatggttggcaaagctagccttcaacggagtacagatatgcctacacaattccataccggatctcggggcgctggcactcaatgtctcactgcaaggcccacaaggctgcattgcctgggctagcgacaatacgaacctggccgcacctggccacacatgggatctagcggaggccggtgcacggatcatccgaggcaccccctccgacctcaaggcagagcgcatcttgaatgctgccgatctcatgccggccccaccccctggcttgatcaagatcgagatcggcaatcagctggatggctcgctcgacaactttgctcgtcggttctgggagcacctaggtactgaggccaatggcctgattaatgatgccctcacaggcaaggatccaattacagaactggtttacagcgaccgttacgtatgcagcccgctagttgtgaatctgctggtcagcgtgatccacgagctcggacggctgagtgatgcagatttcgctatccgaatcctaggccgacaatatcagcgggaagacaatcgctcgccttggcagtaccggcatgactggcactcagctcgcgagcgcgatgaggccctccgccaggctctggcgtactgcggccgcgagggagaggtgctaagcctgcctaccttgccgcactaccgccggctacagcttaagctgcgctccggtaatcaactgaccatccagtttgatcaggggctttcgtattgggaagccgagcgcagcgaaaagtcttaccagctcaggttcgactttgcatcacgcgagcttggagaagaaatcatggagcgcatcaggtgtaaagtttcggcggctggggaggaaaacactcagatattcctctcttcctcttga

SEQ ID NO: 29883 - DNA, 3348 bp, Pseudomonas aeruginosa BL03; identical to SEQ ID NO: 29881

SEQ ID NO: 29884 - DNA, 6216 bp, Pseudomonas aeruginosa BL09; identical to SEQ ID NO: 29764

SEQ ID NO: 29885 - DNA, 3348 bp, Pseudomonas aeruginosa BL09; identical to SEQ ID NO: 29881

SEQ ID NO: 29886 - DNA, 6216 bp, Pseudomonas aeruginosa BL12; identical to SEQ ID NO: 29764

SEQ ID NO: 29887 - DNA, 3348 bp, Pseudomonas aeruginosa BL12; identical to SEQ ID NO: 29881

SEQ ID NO: 29888 - DNA, 6216 bp, Pseudomonas aeruginosa BL13
atgctctatcagaagaactatttctccgctctcaccggcaacctgagcacccgcagcgagcgcgccgcccagggcctgctcagtctaggcaatccgcagctgcggcagttcctgcatgatcagctgaccgccgcccccggcactccgggcgcctggctggccgacccggtcttcgaaccgaccttcggctggcaggaaagctctgaaaccatgagttcgctggccggcggtgacctactacaccgacgccttgccgaagccatggcggccccgcccaaggagccccatgatcttgcagaggaatatgccttccccagcaatcgccatcctttcacccaccagttggcggcctgggagattctcaaccgtcccgagccgcaatcgctggtggtgaccagcggcaccggctcgggcaagaccgaatgcttcctggtgccggtcctcaaccagctggccaaggccatcgacgcgggcgaagacccggaaggcgttcgcgccctgttcatctatccgctgaacgcgctgatcaactcgcagcagaaccgcctggatgcctggacagacggcttcggcgggcagattcgccactgcctgtacaccggcgcgctggagaatgagcgcaagacgtccgaccagcagtacaagggtcaggtgatcgaccgcaagagcctgcgcgccagcccgccgcaactgctggtgaccaacgcgaccatgctggagtacatgctcatccgcaaggatgatgagccgatcctgcagaagtcggccggcaagctgcgctggatcattctggacgaggcgcacactcacatcggctcccaggccgcggagatggcgctgctgctgcgccgggtgatgctggccttccaggtcaaaccgcaggatgtgcgcttcgtggcgacctcggccaccttcggctcggatacccagaccatcgagagcctgcgcaccttcctcgccgatatcggcggagtggatccgcagcaggtgcatgtcgtgcagggtcatcgggatatcccggcgctgctgaacgccacgcccgatgccgagcaggacacccctgaagccatcggcgccatcgaggcggaccaggagcagtcgacgctgcgctaccggcgtctggaggccagccccaccgctcggcggctgcgcgccctgttcatgcctgatggccaggtgaaaccacaaagcctgcaagggctgatccgtgagtccggtctaccctcggcgcaggtgctcgcctggctggatctgctgtccggcaccaagagtgccgagggcctgtccttcctgccgctgcgcgcacacctgttccataacgtgattccggcaatccgcgcctgcgtggaccgccactgcagccacaaggccggcaccgcgctggcacatgccgactggccgttcggcatggtctatctggaggagcggactcactgccgctgcggcgcgccgctgatgccactggtgtcctgcgaggagtgcaacgagagcttcctgcaggcggccaccaaaagcagtagcagtgctctggtcgatccgacacagcaacaggacgacgagttcgctctcgaagatgaaaccacggaggccgatgatcagaccaaggataaggatactgtgtcatccatccagatcctgatcaccaatcgcgccgtcaagaatggcagtgcagacttcctcgatcgcgccactcaccgactgacgcccaatcgtccggcggatggtggcatcgagctgcagctcttccgcactgccaagaacgaatgcccctgctgtggcgccaatatccagggccgcagcctgctgcgccccacgcgcatcggtacgcccttcaccctcagcacggtgatcggcaccctgctggagttctgcccgccggatccgatgccgaccggcaagccgttccagggccgcaagctgatctccttcaccgacagccgccagggcaccgcacggattgccatcaagctgcagcaggactccgagcgcaaccggattcgcgggctgatctatcagcgcctgctgcaggcacaacccgtcaatgggctgtccgcagaggacttgcaggacctgcaagaccttcaaacagcaacgcaactgagtcgtatcgagcagaaacacctgcagtctttgctcgacaggcaggctgaagctacaaagggcgcggaaataagctggacagatatggccaaccatctggccggcacgcctgagctacagatgggcatgctcgactactacaacaacctcgcgccgaacaccttcggcaagcaggacagtgtcgccctggccagcatgctgctggcgcgcgagttctatcgccgcccgaagcgcgccaacagcttggaaaccctgggcctggtacaggtctgctatcccaagctggccaacgtcaccggcaaacccatggcctggcccgcgcacctggatgccgagtcttggcgtacctacctgaaagtgctgctggacttcttcgtccgcgaaaacaccatcctgaacatcaacgaacgctggcagtcactgatcggcgcacgcattcgccccaaatgggtagttgcgccggtcttgggggaaaagcctgaaaagctgcagagccgctttgtccgctggccggcggtcaataccgtcaatggcatccagtcgcgggccatcctgctgctctgcaaggcgttcaactggtcgaccgcggcccatcaggaccagatcgactcgatcctgagcgaggcctggcgggtactgacccagcaggcaaagctgctgatttcgtcaggcgacggctatcagctcgacctcaaggacctgagcttccggctgcccgaaacggtctaccagtgcccggtatcgcggcgcttcatcgacaccccgttcgagcagctcagtccctatacgccacgtaccgaccgcgagatggtcgtcaaggtgacgccctacactctgccgcgtccgcccgaggcgctcctgcatgtgccgggtgatgagggcctgctggcgatccgcgactggctgaacagcgagccgcagatccagcagctgcgcaaggacgcgctctggtcggacgtcatggaccgggtcatcgaggggggccactacttccgtgccgccgagcactcggcgcagcagccgaagagcaagctggacagctacgaaggcctgttcaagaccggcaggctgaacctgctgagctgctcgaccaccatggaaatgggcgtggacatcggcggcatcagcgtggtggcgatgaacaacgtgcccccgcacccggccaactacctgcagcgtgccggccgtgccgggcgccgccgcgagggacgctcgctggccctggccgtctgcaagaacaccccgcacgaccagagcgtgttcaacaacccgctctggccgttcaacacgcccatgcgcatgcccaaggtgtccctgcagagccccgatctggtacagcgccacgtcaatgcctggctgctgtcgcactggctcaagcacgtggtcgccgcccaggaaatcaagtcgatgaccgccggtgccttcttcctcgacggcgaactgcctatgtcgctggccgcgcgtttctgcctgtggtgcgacaaccaggcggtcgataccgaaacgctggtgggacaggccctcaaggacatcacccgccgcagcatcctcgacaccaccccgcagcccgagctgttcaagcatgccagccgccgcatgaaagagatcatgcaggcatggcagcaggaatactcggccagccacgcccagctgctgcagattgccgacaagaaggccgctgcctaccgcgccatggatgcacagctcagccgcatcgcgaaggagtacctgctcagcgagctggctgaccggcgcttcctgccgggctacggcttcccgaccgacatcgtcagcttcgacaaccgctgcatgcagaccttgaagcgggaggacggcgaccagcgcgaggacaaccgcgcccgttaccgctcgctggcttcccgcgaccgcatcaccggcctgcgcgaatatgcgccgggcgccgagctggtcatggatgggctggtctacaagtcctccggcatcaccctgaactggcacgctcccgcgtctgccgaaaacgtcaaggagcttcagctgttcaagaaggcctggcgctgtgggcaatgcggtgccagtgactcggccatcaatcccggactggagatcaactgccaggaatgcggcgcgccgatcgagcgcgacaacatccgtgaatacctggtgcctgcaggctttgccgtggacttcttcgacgagccgcacaacgacatcagccgcctgcagtatgtgccggtcaatgcgccctggctgaacgtgccggccagctgggtctgcctggccaacccggcactcggccagttccgcgccagccagcaggcgcagctgttcaactacacctcgggcgccaaccagaagggctttgccatctgcctggagtgcggcaaggccgagcccatgctgagctatcccgatgcatccgcccctgccaatgaacagtatctgccggctattttccgccagaaggcacagcaccgccgcctgcgcggtggcaaaagcaatgaacaaggcgacgggacaaacatctgccccggcagccacaacagctggaagatcaaacagaacgtccaccttggccatgacagcctgaccgatgcgctggaactggtgctgcgcaaccctaccagcggcgaactgctcaacgacgatatcaccgcctactcgattgccgtggcgctgcgcgaggcgattgccgccgatctgggcatacaaaccgaagagctgggctgcgcaagccatccgatcaaggtcgatggccagccaacccgcgccatccaggtgttcgacctgcgcagcggtggctacaccacccaggccgcggagcggctgaatgaagccagcctgtggcgaaaggtcatcgctcgtctggacagctgcaactgctcgcatgcctgccagaactgcctactcagtttcgatacccgcttcgaggccgagcgcctcaatcgtcacgtcgcgctggagtggatcaatcagacttggcttgccggcctggcgctgcccgccgagctcgctgtctttggtccgaaaagccaggcagaaatcgccactctacaggaagcggtcgaaagagcgattactagggacgacaacgcgaagaccgtaaccatttacttcactgcacccgccgaagagtgggatcttgctgtcgcacgccgcctgaggcatcaactgcatagctgggaaagcgtcggacacctagtgcaattacatttactggaaagtaccgtttccagcctgccaagagaccaaaaggaatggttggcaaagctagccttcaacggagtacagatatgcctacacaattccataccggatctcggggcgctggcactcaatgtctcactgcaaggcccacaaggctgcattgcctgggctagcgacaatacgaacctggccgcacctggccacacatgggatctagcggaggccggtgcacggatcatccgaggcaccccctccgacctcaaggcagagcgcatcttgaatgctgccgatctcatgccggccccaccccctggcttgatcaagatcgagatcggcaatcagctggatggctcgctcgacaactttgctcgtcggttctgggagcacctaggtactgaggccaatggcctgattaatgatgccctcacaggcaaggatccaattacagaactggtttacagcgaccgttacgtatgcagcccgctagttgtgaatctgctggtcagcgtgatccacgagctcggacggctgagtgatgcagatttcgctatccgaatcctaggccgacaatatcagcggggagacaatcgctcgccttggcagtaccggcatgactggcactcagctcgcgagcgcgatgaggccctccgccaggctctggcgtactgcggccgcgagggagaggtgctaagcctgcctaccttgccgcactaccgccggctacagcttaagctgcgctccggtaatcaactgaccatccagtttgatcaggggctttcgtattgggaagccgagcgcagcgaaaagtcttaccagctcaggttcgactttgcatcacgcgagcttggagaagaaatcatggagcacatcaggtgtaaagtttcggcggctggggaggaaaacactcagatattcctctcttcctcttga

SEQ ID NO: 29889 - DNA, 3348 bp, Pseudomonas aeruginosa BL13; identical to SEQ ID NO: 29881

SEQ ID NO: 29890 - DNA, 6216 bp, Pseudomonas aeruginosa BL20; identical to SEQ ID NO: 29764

SEQ ID NO: 29891 - DNA, 3348 bp, Pseudomonas aeruginosa BL20
gtgccgcttgtccaatggatttcagactttttatctaggcgtggactgcaagagccggatggtcgccccctattcgcctataagacctcatcagaagaattcgagacactgcgtcagctcttgcatgggctcaacctggggcaacacgcgcatcccgaatatgctcaggcctggctactctttgcggccgaatggtggaagcgcgaatatccgggaggagcatggcgttggggaccactgtgcgaggcagctggccagagaaaggtagctcatgagaagacccgcagcctggtaattgatgggcgtcgtcagtggcgtctgcaaaccactataaaaagtgaaggcaaacgtttcatcggcctggtcgcggtgaatggcggcctgcccatgcgccttgtcgagtcggcacagggcgggttatcccgcctgctacgcatggtcactgagcaggcactggaataccgcctgcaggatgagcgtctgcgccaggccatcgaggcccaggccgagcttttgcccgcctgctaccagcaggcgccggtctacgaactgctcgacagcttggtcaaggcggtgctgcacatccgcaaggcctatgccctgcagagcgcccaagacccaatcgcccggctgcaggaagagtgccctcactgggaagagctcttccccatcgccctcgattcccaggccgccgccagcctgatcaagggtctggtccgggatacagtcagcatcacgccccagtcgcggcggcctcctttccagatccagcgcggcctgcgcttcagttccgatggctccatacccgtctacgagctgtccttcgtgatgcaggctcaggccaggcgcgatcaggttgccgaggcgctggggatggccgtggatgcgctgccgccacacttccagctcctgctgcgcatcggcgagcgggaatacctggtcggcgaagccctgcttagagacgaggaataccagctgatcgccaggccgctgccggccatccacagcctgcacaatgccgcgcagctgatcgtcagccgctggggcgccaccctgcacattgccaacctaccgggcggcgaagccttgagccatgacgagccgctgatcttcgagaatacctacccctttgcccgcctgctcgcccagggcgatgcgctggtcaagggcgagtcggcactggcggccatgccggcaagaaccatcgtgtatgccgaagaaggcgaggctcgcgagctgcatgactgcctggccgacgggcaaatgctgatggaacttcccgccggtaccacccggctcacgtacaaacaacagcccttcgttgtcaccatcagcgccagcgccacccgccacccggaagcctactggcatggcaacagtctggaggcgctctccgtgccggggctgctgttccgtggcacgccgcgcctacgcattgagcagggaacgggcttttccagctatgcgcccgcccatgagctgtttgtccgcacgcagggcaaggagctgccgctcgcccaagcccgggcgccggggctgtgccggctgatctggcgcaaggatggccagcgcctgctgaacacccgcgccgtgcttctcccggacgaagcctccatcacctacgcgccgggcgccactaccctcgagggcagcattcgccttcaccactggcctgatgtgcccgtgcgctgcgagagcgaacagatcgcgctggagcgccgccatgatggaacaggcctgaccctgcggctgaagagcaccggcagccggccggccaccacggttccgctgtgcctgcagtggcccgacggcgagcagaagctcactctgcccttccccggctatggcgtcacgctgctgcgcaacgacactcctctcaagctgaatcaggccctgaccatcgaagaactgatcggctgccgcgcggtactgatgtcggctcagggcgccgaaaactggcggattcgcctgacctccagcggcaccgactcacgctccaccctgtcgcaggaaattcgctacaccgggatccgcgaaatccgtctgttcgagctgattccggcgatccagcagatgatgtcctgccacccggggctcgatcatgtcgtgcagctagagttgattcatgcccaccagacccacgctcgcctacaggtgggccgctactcgacgcgcatccgcctgcacagccagcgcgagatggcgtcactgaacgatagcggctccgacgttctgcttgagcagccgcatgccgagggtctgatattgggcctgccactggcagaaccggaacatgacccggtcagcctgccgctgcatttttccgaacaggtgttcaccggcagctggctggtcagcctgccagacgatgccgtcggcccttggttgctgtacacctctgccgagtcaccgctacacagccgtgcgaccatcgtgccaccgaccgcgagccaactgtcgaagcccctgaccccgctgcgcgaggcgctctgcgaaggcgatggcgaagagcgcatgcgccagctcagggccgcgctgcgcgccatggccgcagacccgcaggctgatgactggcaaacgctggagctgctgctggatcggctgcaccacctgccgctggccagcctggatatctgccaggcactaatccgcgagccgcaggcgctgaccatggccaccctgctgctggatgatttctccagccgcctggccgagcgcctgccctgcgagctgcccttcgagtggctgctgatcgccccggagcactggttcggcaccttcgcgacactgcgccagcaactggccgccgacaatccgcgcatgctgtcggtaatccgcaacgacatccagagcaagagccagttcctgtcccgctggcagcccgcgctgcgcttcatcttcgatcagggcctgcaccactccttcgatctgcaaagcccggatgtggggttcttcctgaaaaacccggcgatgctcaccgcctcctggcagtcgtacctgtttgatggcgagaactcggccatgcagcagatgttccggcgcaaccccgccgaaacccatcaatatcccggcagcggcaatacggatatcggagccttcctgaaaacgccccacgggcaaatgctcctccgctgctgcaagctcccggccaatgacttcaagctggccacggtcatgctgcccttcatggccgccttcgatacctacgccggccgcgggcagcaatggcaagccgacccgccacgcctgttcagcctcagaaacgctcgccagttcgataccgtctggttcgactcggtctatcaacttggcctggccatggcgcaagccgcctcgatgcagaagtga

SEQ ID NO: 29892 - DNA, 6216 bp, Pseudomonas aeruginosa BWHPSA011; identical to SEQ ID NO: 29784

SEQ ID NO: 29893 - DNA, 3348 bp, Pseudomonas aeruginosa BWHPSA011; identical to SEQ ID NO: 29881

SEQ ID NO: 29894 - DNA, 6216 bp, Pseudomonas aeruginosa BWHPSA023; identical to SEQ ID NO: 29774

SEQ ID NO: 29895 - DNA, 3348 bp, Pseudomonas aeruginosa BWHPSA023; identical to SEQ ID NO: 29881

SEQ ID NO: 29896 - DNA, 6216 bp, Pseudomonas aeruginosa BWHPSA028; identical to SEQ ID NO: 29764

SEQ ID NO: 29897 - DNA, 3348 bp, Pseudomonas aeruginosa BWHPSA028; identical to SEQ ID NO: 29881

SEQ ID NO: 29898 - DNA, 4413 bp, Pseudomonas aeruginosa BWHPSA039
atgctctatcagaagaactatttctccgctctcaccggcaacctgagcacccgcagcgagcgcgccgcccagggcctgctcagtctaggcaatccgcagctgcggcagttcctgcatgatcagctgaccgccgcccccggcactccgggcgcctggctggccgacccggtcttcgaaccgaccttcggctggcaggaaagctctgaaaccatgagttcgctggccggcggtgacctactacaccgacgccttgccgaagccatggcggccccgcccaaggagccccatgatcttgcagaggaatatgccttccccagcaatcgccatcctttcacccaccagttggcggcctgggagattctcaaccgtcccgagccgcaatcgctggtggtgaccagcggcaccggctcgggcaagaccgaatgcttcctggtgccggtcctcaaccagctggccaaggccatcgacgcgggcgaagacccggaaggcgttcgcgccctgttcatctatccgctgaacgcgctgatcaactcgcagcagaaccgcctggatgcctggacagacggcttcggcgggcagattcgccactgcctgtacaccggcgcgctggagaatgagcgcaagacgtccgaccagcagtacaagggtcaggtgatcgaccgcaagagcctgcgcgccagcccgccgcaactgctggtgaccaacgcgaccatgctggagtacatgctcatccgcaaggatgatgagccgatcctgcagaagtcggccggcaagctgcgctggatcattctggacgaggcgcacactcacatcggctcccaggccgcggagatggcgctgctgctgcgccgggtgatgctggccttccaggtcaaaccgcaggatgtgcgcttcgtggcgacctcggccaccttcggctcggatacccagaccatcgagagcctgcgcaccttcctcgccgatatcggcggagtggatccgcagcaggtgcatgtcgtgcagggtcatcgggatatcccggcgctgctgaacgccacgcccgatgccgagcaggacacccctgaagccatcggcgccatcgaggcggaccaggagcagtcgacgctgcgctaccggcgtctggaggccagccccaccgctcggcggctgcgcgccctgttcatgcctgatggccaggtgaaaccacaaagcctgcaagggctgatccgtgagtccggtctaccctcggcgcaggtgctcgcctggctggatctgctgtccggcaccaagagtgccgagggcctgtccttcctgccgctgcgcgcacacctgttccataacgtgattccggcaatccgcgcctgcgtggaccgccactgcagccacaaggccggcaccgcgctggcacatgccgactggccgttcggcatggtctatctggaggagcggactcactgccgctgcggcgcgccgctgatgccactggtgtcctgcgaggagtgcaacgagagcttcctgcaggcggccaccaaaagcagtagcagtgctctggtcgatccgacacagcaacaggacgacgagttcgctctcgaagatgaaaccacggaggccgatgatcagaccaaggataaggatactgtgtcatccatccagatcctgatcaccaatcgcgccgtcaagaatggcagtgcagacttcctcgatcgcgccactcaccgactgacgcccaatcgtccggcggatggtggcatcgagctgcagctcttccgcactgccaagaacgaatgcccctgctgtggcgccaatatccagggccgcagcctgctgcgccccacgcgcatcggtacgcccttcaccctcagcacggtgatcggcaccctgctggagttctgcccgccggatccgatgccgaccggcaagccgttccagggccgcaagctgatctccttcaccgacagccgccagggcaccgcacggattgccatcaagctgcagcaggactccgagcgcaaccggattcgcgggctgatctatcagcgcctgctgcaggcacaacccgtcaatgggctgtccgcagaggacttgcaggacctgcaagaccttcaaacagcaacgcaactgagtcgtatcgagcagaaacacctgcagtctttgctcgacaggcaggctgaagctacaaagggcgcggaaataagctggacagatatggccaaccatctggccggcacgcctgagctacagatgggcatgctcgactactacaacaacctcgcgccgaacaccttcggcaagcaggacagtgtcgccctggccagcatgctgctggcgcgcgagttctatcgccgcccgaagcgcgccaacagcttggaaaccctgggcctggtacaggtctgctatcccaagctggccaacgtcaccggcaaacccatggcctggcccgcgcacctggatgccgagtcttggcgtacctacctgaaagtgctgctggacttcttcgtccgcgaaaacaccatcctgaacatcaacgaacgctggcagtcactgatcggcgcacgcattcgccccaaatgggtagttgcgccggtcttgggggaaaagcctgaaaagctgcagagccgctttgtccgctggccggcggtcaataccgtcaatggcatccagtcgcgggccatcctgctgctctgcaaggcgttcaactggtcgaccgcggcccatcaggaccagatcgactcgatcctgagcgaggcctggcgggtactgacccagcaggcaaagctgctgatttcgtcaggcgacggctatcagctcgacctcaaggacctgagcttccggctgcccgaaacggtctaccagtgcccggtatcgcggcgcttcatcgacaccccgttcgagcagctcagtccctatacgccacgtaccgaccgcgagatggtcgtcaaggtgacgccctacactctgccgcgtccgcccgaggcgctcctgcatgtgccgggtgatgagggcctgctggcgatccgcgactggctgaacagcgagccgcagatccagcagctgcgcaaggacgcgctctggtcggacgtcatggaccgggtcatcgaggggggccactacttccgtgccgccgagcactcggcgcagcagccgaagagcaagctggacagctacgaaggcctgttcaagaccggcaggctgaacctgctgagctgctcgaccaccatggaaatgggcgtggacatcggcggcatcagcgtggtggcgatgaacaacgtgcccccgcacccggccaactacctgcagcgtgccggccgtgccgggcgccgccgcgagggacgctcgctggccctggccgtctgcaagaacaccccgcacgaccagagcgtgttcaacaacccgctctggccgttcaacacgcccatgcgcatgcccaaggtgtccctgcagagccccgatctggtacagcgccacgtcaatgcctggctgctgtcgcactggctcaagcacgtggtcgccgcccaggaaatcaagtcgatgaccgccggtgccttcttcctcgacggcgaactgcctatgtcgctggccgcgcgtttctgcctgtggtgcgacaaccaggcggtcgataccgaaacgctggtgggacaggccctcaaggacatcacccgccgcagcatcctcgacaccaccccgcagcccgagctgttcaagcatgccagccgccgcatgaaagagatcatgcaggcatggcagcaggaatactcggccagccacgcccagctgctgcagattgccgacaagaaggccgctgcctaccgcgccatggatgcacagctcagccgcatcgcgaaggagtacctgctcagcgagctggctgaccggcgcttcctgccgggctacggcttcccgaccgacatcgtcagcttcgacaaccgctgcatgcagaccttgaagcgggaggacggcgaccagcgcgaggacaaccgcgcccgttaccgctcgctggcttcccgcgaccgcatcaccggcctgcgcgaatatgcgccgggcgccgagctggtcatggatgggctggtctacaagtcctccggcatcaccctgaactggcacgctcccgcgtctgccgaaaacgtcaaggagcttcagctgttcaagaaggcctggcgctgtgggcaatgcggtgccagtgactcggccatcaatcccggactggagatcaactgccaggaatgcggcgcgccgatcgagcgcgacaacatccgtgaatacctggtgcctgcaggctttgccgtggacttcttcgacgagccgcacaacgacatcagccgcctgcagtatgtgggggtttggggagcaatggaaccaaaaaccaacgtaagctctgaatcccaccgtaaaggggctttccgatctccagctcacccgccaggcattactctctga

SEQ ID NO: 29899 - DNA, 3348 bp, Pseudomonas aeruginosa BWHPSA039; identical to SEQ ID NO: 29881

SEQ ID NO: 29900 - DNA, 6216 bp, Pseudomonas aeruginosa C20; identical to SEQ ID NO: 29774

SEQ ID NO: 29901 - DNA, 3348 bp, Pseudomonas aeruginosa C20; identical to SEQ ID NO: 29881

SEQ ID NO: 29902 - DNA, 6216 bp, Pseudomonas aeruginosa C23; identical to SEQ ID NO: 29774

SEQ ID NO: 29903 - DNA, 3348 bp, Pseudomonas aeruginosa C23; identical to SEQ ID NO: 29881

SEQ ID NO: 29904 - DNA, 6216 bp, Pseudomonas aeruginosa C2773C; identical to SEQ ID NO: 29784

SEQ ID NO: 29905 - DNA, 3423 bp, Pseudomonas aeruginosa C2773C
ttgagattgaaaaaaggacacgatccaaggacagcctttgaggcagctcactcgttcacaaaaaaggaattatgtgtgccgcttgtccaatggatttcagactttttatctaggcgtggactgcaagagccggatggtcgccccctattcgcctataagacctcatcagaagaattcgagacactgcgtcagctcttgcatgggctcaacctggggcaacacgcgcatcccgaatatgctcaggcctggctactctttgcggccgaatggtggaagcgcgaatatccgggaggagcatggcgttggggaccactgtgcgaggcagctggccagagaaaggtagctcatgagaagacccgcagcctggtaattgatgggcgtcgtcagtggcgtctgcaaaccactataaaaagtgaaggcaaacgtttcatcggcctggtcgcggtgaatggcggcctgcccatgcgccttgtcgagtcggcacagggcgggttatcccgcctgctacgcatggtcactgagcaggcactggaataccgcctgcaggatgagcgtctgcgccaggccatcgaggcccaggccgagcttttgcccgcctgctaccagcaggcgccggtctacgaactgctcgacagcttggtcaaggcggtgctgcacatccgcaaggcctatgccctgcagagcgcccaagacccaatcgcccggctgcaggaagagtgccctcactgggaagagctcttccccatcgccctcgattcccaggccgccgccagcctgatcaagggtctggtccgggatacagtcagcatcacgccccagtcgcggcggcctcctttccagatccagcgcggcctgcgcttcagttccgatggctccatacccgtctacgagctgtccttcgtgatgcaggctcaggccaggcgcgatcaggttgccgaggcgctggggatggccgtggatgcgctgccgccacacttccagctcctgctgcgcatcggcgagcgggaatacctggtcggcgaagccctgcttagagacgaggaataccagctgatcgccaggccgctgccggccatccacagcctgcacaatgccgcgcagctgatcgtcagccgctggggcgccaccctgcacattgccaacctaccgggcggcgaagccttgagccatgacgagccgctgatcttcgagaatacctacccctttgcccgcctgctcgcccagggcgatgcgctggtcaagggcgagtcggcactggcggccatgccggcaagaaccatcgtgtatgccgaagaaggcgaggctcgcgagctgcatgactgcctggccgacgggcaaatgctgatggaacttcccgccggtaccacccggctcacgtacaaacaacagcccttcgttgtcaccatcagcgccagcgctacccgccacccggaagcctactggcatggcaacagtctggaggcgctctccgtgccggggctgctgttccgtggcacgccgcgcctacgcattgagcagggaacgggcttttccagctatgcgcccgcccatgagctgtttgtccgcacgcagggcaaggagctgccgctcgcccaagcccgggcgccggggctgtgccggctgatctggcgcaaggatggccagcgcctgctgaacacccgcgccgtgcttctcccggacgaagcctccatcacctacgcgccgggcgccactaccctcgagggcagcattcgccttcaccactggcctgatgtgcccgtgcgctgcgagagcgaacagatcgcgctggagcgccgccatgatggaacaggcctgaccctgcggctgaagagcaccggcagccggccggccaccacggttccgctgtgcctgcagtggcccgacggcgagcagaagctcactctgcccttccccggctatggcgtcacgctgctgcgcaacgacactcctctcaagctgaatcaggccctgaccatcgaagaactgatcggctgccgcgcggtactgatgtcggctcagggcgccgaaaactggcggattcgcctgacctccagcggcaccgactcacgctccaccctgtcgcaggaaattcgctacaccgggatccgcgaaatccgtctgttcgagctgattccggcgatccagcagatgatgtcctgccacccggggctcgatcatgtcgtgcagctagagttgattcatgcccaccagacccacgctcgcctacaggtgggccgctactcgacgcgcatccgcctgcacagccagcgcgagatggcgtcactgaacgatagcggctccgacgttctgcttgagcagccgcatgccgagggtctgatattgggcctgccactggcagaaccggaacatgacccggtcagcctgccgctgcatttttccgaacaggtgttcaccggcagctggctggtcagcctgccagacgatgccgtcggcccttggttgctgtacacctctgccgagtcaccgctacacagccgtgcgaccatcgtgccaccgaccgcgagccaactgtcgaagcccctgaccccgctgcgcgaggcgctctgcgaaggcgatggcgaagagcgcatgcgccagctcagggccgcgctgcgcgccatggccgcagacccgcaggctgatgactggcaaacgctggagctgctgctggatcggctgcaccacctgccgctggccagcctggatatctgccaggcactaatccgcgagccgcaggcgctgaccatggccaccctgctgctggatgatttctccagccgcctggccgagcgcctgccctgcgagctgcccttcgagtggctgctgatcgccccggagcactggttcggcaccttcgcgacactgcgccagcaactggccgccgacaatccgcgcatgctgtcggtaatccgcaacgacatccagagcaagagccagttcctgtcccgctggcagcccgcgctgcgcttcatcttcgatcagggcctgcaccactccttcgatctgcaaagcccggatgtggggttcttcctgaaaaacccggcgatgctcaccgcctcctggcagtcgtacctgtttgatggcgagaactcggccatgcagcagatgttccggcgcaaccccgccgaaacccatcaatatcccggcagcggcaatacggatatcggagccttcctgaaaacgccccacgggcaaatgctcctccgctgctgcaagctcccggccaatgacttcaagctggccacggtcatgctgcccttcatggccgccttcgatacctacgccggccgcgggcagcaatggcaagccgacccgccacgcctgttcagcctcagaaacgctcgccagttcgataccgtctggttcgactcggtctatcaacttggcctggccatggcgcaagccgcctcgatgcagaagtga

SEQ ID NO: 29906 - DNA, 6216 bp, Pseudomonas aeruginosa CF127; identical to SEQ ID NO: 29784

SEQ ID NO: 29907 - DNA, 3348 bp, Pseudomonas aeruginosa CF127; identical to SEQ ID NO: 29881

SEQ ID NO: 29908 - DNA, 6216 bp, Pseudomonas aeruginosa NCMG1179; identical to SEQ ID NO: 29784

SEQ ID NO: 29909 - DNA, 2913 bp, Pseudomonas aeruginosa NCMG1179; identical to SEQ ID NO: 29879

SEQ ID NO: 29910 - DNA, 6336 bp, Pseudomonas aeruginosa PA21_ST175; identical to SEQ ID NO: 29776

SEQ ID NO: 29911 - DNA, 3336 bp, Pseudomonas aeruginosa PA21_ST175; identical to SEQ ID NO: 29777

SEQ ID NO: 29912 - DNA, 6336 bp, Pseudomonas aeruginosa PA99; identical to SEQ ID NO: 29826

SEQ ID NO: 29913 - DNA, 3336 bp, Pseudomonas aeruginosa PA99
atgtcgtactccgtaattaagtactcgtcctggctgggacgctttctccagcgtcgtgggctttcagcgcctgatcagcgcggactctatgcgtaccactgcagtctcgaagagtacggagagctgcagcatttgctccgtgagtttgggggctttgatgcggcgttaaaggacccggcagcctgtgcttgtttggtactttttggttcggagtggtatcgccgtgagtaccgcagtgagtatgcctggacctgggacccgatctggaaaactctgggatttaatctgtcgccgggagagctaagcaaggtcatccctaaagggttggaggggtattggaaacgtccccttcatttctacgaagcgggtcatcgggattttctagggtcgctgtttggtgaggggggcttgccctttcaggtattgcgcgagggaggcagccgcttccagtggctgtttgaccgcttgctaaggcagtacgaccagtggcacctgctgggcttcaacaccctacagcaggtggagcagcaactggaaaaggccagtcttcctcaggtgtttgcctcacgtacgtcgatcgaactgattgcgcgtatggtcgatgagcttgtggctctggtccggaattatgggctggcgcaggcggatgagcccgtcgtccgcctggatgctctgaaccccaagtggcgtgaattgttccctctgcctctggataacgagactggcagcgaactcctcaatggtcttttaaagactgcgaccattgagggcaaaaagcgacgccgggatgcgactggatggtcttgtcgacacttttggcatgaggcgcagccggatgtgctcaaggttcaggtctcgatgccggaggaggtggtgcttcgtctgacgacgcagccatctaccacccgttttgagctggccattgtcgaagatggacaggcgattgctgcgcttggacccggctacgcgctggtcgacaacggtgttgcccatatccggctgcgccttcgtgaggtgatcggaaagcggcaggattgcagtgcccaactgagcctggtggctatggcaggtggcatgctgatcgccacccagccgatagagggcagtgcagtggcccttggcgaagtaccgttgggtttcgagccagtgaatgatcgctggcagctatgcggtcaggcttcattcaatacggctggtgaagagctgctgctggtgctgcccgaaggtgggaagttgaacatggctgcagagggcgaggaagccatcttcagcgatatggcaccggctttttcgctgcatacggtaaaggttcagggcaaggcgcagttccaggttgagagtgatgaactctaccggatacgcacgggacatgcggttggtatgggcttggggctggaactggctggtacccagatcgactggccgaccaagcccgctctgacctttgtcggtctgcctcgtgtgcagtggccgaccgctgctggggaactgcaacagcagggcggtgacctgtacgttgccggcaaacagccgggaagcggcttgttgcaggaggtactcggtacccaatatgtgtcggtgcgcaaccgcagtggcaacgccctgttacgtcgcagggtgggtatcttgccgacggatttccgtgttgagctgcgcagtggtgagaagccggggcaggggagcattttggtgcattcccggcagcgctgcctgctccagattgttgacgacagtctgcaggtacagcaggtaaagcgtgaggatcacaccgagcttaggctctcggcaaagggctttcctccagtcagggtccgcctttcagttacccccagcttgatggctgacccagtggagattgacctgccgtttcccaactcgggttttctggcctttgatggcacaggcaaacatctgaaacgcgatctcagtgtcgacgacctgttgggggcgcgtctgtatctgtttggccgggctggcgcaccaacccgttttagccttgagctgaccctcaggggtagtgcggccaggaatgcttgttacagctggacctacacggtggccgaaaagccgctggagctcagtctgttcaatatccgtgaacagattgttgacctgctttcgcttcagtcgggcattgatcaggtcgtcgagttgcgggtgttcggtaacggtcaggataccagttaccgcatccgtaggtattcgacggagatgcaactggatcgcgaccgtcagatgctgtgtgctgccaatctgcacgatggcgccgacgccattcccgaaccggtgttgatgctgttgcatgatcctatgcgtagctccatcgcgctccgttcccgcaccagcgaaggtgtgcccaccggcgacttcgagttaccgatagctgttgaaagggatggtccctggctggtgttgcccaaatcgggctcatctgtatcgttccggccgctatttatcgctggtggatggaagccgttggcgccgagcgatggaatccagagtctgcaaaaggcagtgttgaccttcgatcatgcttcacctgttagctccttcacgcctgtgttggatgccatggcggttaaccctatgcatagcggctggcagttcttgcgggccttgtatgaagggtacggctatctgcccctggcgaccttcgaggtctggaaggctctggtagggcacacccgcgcgttggcgatggcacttttcaagtttgaaatggaggcgacattccttggccggctggagactgagtttccgattttctgggagtttcttcccattacagaaatccatcttgcggccaagcgcttcgctgcattccttaaggtgaaaggggtcgctgaggaagccattgatgctctgatcggacgaatgttttcgcgattgggggaaacctattcagcctacgggcagagtgtgcagcgcttcctttctggcaagcctgttggcccagagatcaaggtgccgctagcgactttcaagagtgtcctgcatggctggtaccttgagttgattcgcgagcgcagtgaggcaaagtggccggagttcggctgcaagcggctggagcgttggcacagcagccaaggctgctcggtgattgccttcaggtcggaaatggattaccgcaatgcggtgctctatctaccggtattcgccgctgcggtcgcctgtggcaaggctcggttcacagatgcgtttgcggatggcgtcgaggcgattttcttcttgcgccaggtccgcgatttcgattcgaagtggttcaactcgatctatcaatattgcttgttgaacagcgtcatggatatgcagaaggcagagtcggttaatggataa

SEQ ID NO: 29914 - DNA, 6201 bp, Pseudomonas aeruginosa PAK; identical to SEQ ID NO: 29844

SEQ ID NO: 29915 - DNA, 3087 bp, Pseudomonas aeruginosa PAK
atgtcacatgagaagactcgcaagctggtcatcgaagggcgtcgccaatggcgcctgcaaaccgccatcaagaatgaaggcaaacgtttcattggcctggtcgtggtgaatggcggcctgccgatgcgcctggtcgagtcggcgcagggcgggctatccggcctgctgcgcatggtcaccctacaggcggtggactacaacctgcacgatgagcaactacgtcaggctatcgaagcccaggctgctcttttgcccgcatgctatcagcaagcaccggtctatgagctgctggacaacctgatcaaggcggtgctgcatatccgcaggacctatgctctgacgggtgctcaggatccgatcgctaagctgcaggaagaatgccctcagtgggaagagctctttcccatcgcgctcgacaatcaggcagcagccagcctcatcaaggggctggtcagaggcatcgttgacatcacgccccaggccaagcaactgccgtttcagatactgcgtggcctgcgtcttagctccgatggctccatgcccgtctacgagctgtcctttgcgatgcaggcacaggccaagcgcgatcgaatcgccgaggcgttagggatggtcgcagaccgactgccgccgcacttccaactgctgctgcgcatcggtgagcgggagcatctggtcggggaagcattgctcagggatgacgagtatcagcttatcgccagaccgctgccccccattcaaactgtgcacgaagctgcgcagctgatagtcagtcgttggggcgccaccttgcacatcgccaacctgcccggcggcgaagcgttaagccacgacgaacctttgatcttcgaaaattcttatccctttgctcgtctgatagcccaaggcgatgctctggtgaaggggctgtccgcactggcggtcatgccggcaagaaccatcgtattggctgaggaaggcgagactcgtgagcttcacgactgccttgctgatgggcagatgctgatggagcttccggccggcaaaacgaggctcgcatatcgcggacaagcgttcattgtcaccgtcagcgccattgctacgcaccgcccggaagcctattggcaaggcaatagcctagaggcgctctctgtgccgggcctgctattccgcggtacaccacgccttcgagttgatcaggggctggggcattccagttacgcgccgtcccatgaactttttgttcgcagccattccaaggagctcccactcggtgaggcacaagcaccaggactatgccgactgatctggcgcaaggatggccagcgcctgctgagcacccgcgccgtgctcctcccagagggcgcttctattacctatgttccagcggcaagcacccttgaaggagtcattcgtctcgataactggcccgacgtaccagttcgttgtgagaacgaagagatcgagctggacagccgtcatgatgggacaagcctggtcctcagactgaaaagcaccagcgctcggcctgcaacttcagttccgctctgcatgcagtggcccgacggcgaacataggctcacgctgccgttccccggttatggcgtcacgctgcagcgcaacaatcttcctctcaagtccaatcaggccttgaccatcgatgagctgatcggctgtcgtgccctgctaatgtcggcgcacggcgcagagcattggcaggttcgcctgacgtctgtcggacctgatgctcgctccaccctgtctcaggaaattcgctatacggggattcgggagatacggctgttcgagctgatcccgacaatccaacagatgctttcctgccacccagggctagatcatgctgtgcaactggagctgatgcatacccatcagacacgtgctcgccttcaagtcggccgctactcgacgcgcatccgcccgcacagccagaaacagatggtgtcattgagcaatggtggccgagatcttattcttgagcagccccaagctgagggactgatgctagccctaccgctggccgagcctgaccatgaaccggtcagcctgccgttgcatttctccgagcaggtattcacaggcaactggttggttagcctgcccacggatgcgactggcccctggttgctgtacacctcagacgaatcaccactacatagccgcccgacagttgttccgccgaccatgatcggtttgtcgaagccattgactcctctgcgtcaagcgctctgcgcggccgatggcgaggtgcgtatgagcatgctcagagccgctctgcgtacgatggtggctgacccgcacgataaggactggcaaacgctggaacttctgcttgagcgactgcaccacttgccaccggccagcctggatatttgccaggcactaatacgtgagccgcaggcgctcgccatgaccacactgctcctcgacggcttctccagtcgcatggctgaacgcctgccctccgagctgcccttcgagtggctgctcatcgctccagaccactggttcgacactttctcgatacttcgccagcagttagccgctggcgatgaccgactattgtcgatcatccgccacgacatccagagcaagagtcagtacctgtctcgctggcaacccgcactgcgcttcattttcgaacaaggcttccaccgctacttcgatctccaaagccaggatgtagggttcttcctgaaaaatccggcggtgctcaccggaatctggttggacaggctgtttgaagggggagagaaatctgccatgcagcggatgttccaacgcaaccctgctgaaacccatcaataccctgccgccgggaatacgaatatcggggcattcctgaaaactacgcatggccaattactactccgccgcagcaagcttcctgccaacgacttcaagttggccgtggtaatgctgcccttcatggctgccttcgacgcccatgccggccatggtcggcagtggcaagccgatccggcacgcctgctcagcctaagaaatgctcgcctgttcgataccgtctggtttgattcggcctatgaactcggcctggccatggcgcaagccgactcgatgctcaagtga

SEQ ID NO: 29916 - DNA, 6207 bp, Pseudomonas aeruginosa PS42
atgctctatcagaagaactatttctccgctcttaccagcaacctgagtacccgcagcgagcgcgccgcccagggcctgctcagtctaggcaatccgcagctgcggcagttcctgcatgatcagctgaccgccgcccccggtactccgggcgcctggctggccgacccggtcttcgaaccgaccttcggctggcaggaaagctctgaaaccatgagttcgctggccggcggtaacctactacaccgacgccttgccgaagccatggcggccccgcccaaggagccccatgatcttgcagaggaatatgccttccccagcaatcgccatcctttcacccaccagttggcggcctgggagattctcaaccgtcccgagccgcaatcactggtggtgaccagcggcaccggctcgggcaaaaccgagtgtttcctggtaccggtcctcagccagctggccaaggaaatcgacgctggcgaagacccggagggtgtccgcgccctgttcatctaccctttaaacgccctgatcaactcgcaacagaaccgcctggatgcctggacccacggattcggcggacagattcgccattgtctatacaccggtgccctggagaacgaacgcaggaatagagaccagcagtacgatggccaggtgatcgaccgcaagagcctgcgcgccagcccgccgcaactgctggtgaccaacgcgaccatgctggagtacatgctcatccgcaaggatgacgagccgatcctgcagaagtcggccggcaagctgcgctggatcattctggacgaggcgcacacccacatcggctcccaggccgcggagatggcgctgctgctgcgccgggtgatgctggccttccaagtcaagccacaggatgtgcgcttcgtggcgacctcggccaccttcggctcggatactcagaccatcgagagcctgcgtaccttcctcgccgatatcggcggagtggatccgcagcaggtgcatgtcgtgcagggacatcgggatatcccggcgctgctgaacgccaccccggttgccgagcaggacacccctgaagccatctgtgccatcgaggcggaccaggaacagtcgacgctgcgctaccagcgcttggaagctagccccaccgctcggcggctgcgcgccctgttcatgcctgatggccaggtgaaaccacaaagcctgcaagggctgatccgtgagtccggtctaccctcggcgcaggtgctcgcctggctggatctgctgtccggcaccaagagtgccgagggcctgtccttcctgccgctgcgcgcacacctgttccataacgtgattccggcaatccgcgcctgcgtggaccgccactgcagccacaaggccggcaccgcgctggagcatgccgactggccgtttggcatggtttacctggaagagcgaactcactgccgctgcggcgcgccgctaatgccgctggtgtcctgcgaggagtgcaacgagagcttcctgcaggcggggactaagggtagcagcgagctggtcgacccgactcagcaacaggtcgacgagttcgccctcgacgaagattctgcgggggccgaggatcaggccgaagatactgtgtcatctatccagatcctgatcactaatcgcgccgtcaagaattacagtggcgacttcctcgatcgcaccacccagcgactgacccccaatcgtcccgcggatggcggtatcgagctgcagctcttccgcaccatcaagaacgaatgcccttgctgtggcgccaatatccagggccgcagcctgctacgtccggcgcgcatcggcacgcctttcaccctgagcacggtgatcggcaccctgctggaattctgcccaccagatccgatgcctaccggcaagcctttccagggccgcaagctgatttccttcaccgacagtcgccagggcacggcgcgtattgccatcaagctgcagcaggactccgagcgcaaccggatccgcgggctgatatatcagcgtttgctgcaggcacaaccgatcgatggactgtccgcagaggacttgcaggatctgcaagacctacaaacagcaacgcaactgagtcgtatcgagcagaaacacctgcagtctttgctcgacaggcaggctgaagctacaaagggagcggaaataagctggacagatatggccaaccatctggccggcaccccagagctgcagatgggcatgctcgattactacaacaacctcgcgccgaataccttcggcaagcaggacagtgtcgccctggccagcatgctgctggcgcgcgagttctatcgccgcccgaagcgcgccaacagcttggaaaccctgggcctggtacaggtctgctatcccaagctggccaacgtcaccggcaaacccatggcctggcccgcgcacctggatgccgagtcttggcgtacctacctgaaagtgctgctggacttcttcgtccgcgaaaacaccatcctgaacatcaacgagcgctggcagtcactgatcggcgcacgcattcgccccaaatgggtagttgcgccggtcttgggggaaaagcctgaaaagctgcagagccgctttgtccgctggccggcggtcaacaccgtcaatggcatccagtcgcgggccattctgctgctctgcaaggcattcaactggtcgaccgcgatccatcaggatcagatcgactcgatcctgagtgaggcttggcgggtactgacccagcaggcaaagctgttgattacgtcaggcgacggctatcagctcgacctcaaggacctgagtttccggctgcccgaaacggtctatctgtgcccggtatcgcggcgcttcatcgacaccccgttcgagcaactcagtccctatacgccacgtaccgaccgcgagatggtcgtcaaggtgacgccctacaccctgccgcggccgcccgaggcgctcctgcatgtgccgggtgatgagggcctgctggcgatccgcgactggctgaacagcgagccgcagatccagcagctgcgcaatgacgcgctctggtcggacgtcatggaccgggtcatcgaggggggccactacttccgtgccgccgagcactcggcgcagcagccgaagagcaaactagacagctacgaaggcaagttcaagaccggcaagctgaacctgctgagctgctcgaccaccatggaaatgggcgtggacatcggcggcatcagcgtggtggcgatgaacaacgtccccccgcacccagccaactacctgcagcgcgccggccgcgccgggcgccgccgcgagggacgctcgctagccctggccgtctgcaagaacaccccgcacgaccagagcgtgttcaacaacccgctctggccgttcaacacgcccatgcgcatgcccaaggtgtccctgcagagccccgatctggttcagcgccacgtcaatgcctggctgctgtcgcactggctcaagcacgtggttgctgcccaggaaatcaagtcgatgaccgctggcgccttcttcctcgacggcgaactgcctatgtcactggccgcccgtttttgcctgtggtgcgacaaccagagggtcgataccgaggcgttggttgaacagtcgctcaaggacatcacccgacgcagcatcctcgatactgccccgcagcccgagctgttcaagcacgccagcagccgcatagccgagatcatgcaggcatggcggcaggagcattcggccagccacacccaactgcagcagattaccgacaagaaggccgccgcctaccgcgctatggaggcacagctcagccgtatcgagaaggagtacctgctcagcgaactggctgacaggcgcttcctgccgggctacggcttcccgaccgacatcgtcagcttcgataaccgctgcatgcagaccttgaagcgggaggacggcgaccagcgcgaggacaaccgcgcccgctaccgctcgctggcttcccgcgaccgtatcaccggcctacgcgaatatgcgccgggtgccgagctggtcatggacgggctggtttacaaatcctctggtatcacgctgaactggcacgcgcctgcgtctgccgaaaacgtcaaagagttgcagctgttcaagaaagcctggcgctgtgggcaatgcggtgccagtgactcggccatcaatcccggactggagatcaactgccaggaatgcggcgcgccgatcgagcgcgacaacattcgtgaatacctggtgcctgcaggctttgccgtggacttcttcgacgagccgcacaacgacatcagccgcctgcagtatgtaccggtcaaagcgccatggctgaacgtgcctgccaactggatctgtctggccaatccggcgctcggccagttccgcgccagccagcaggcgcacctgttcaactacacctcgggtgccaatcagcaaggctttgccatctgcctggagtgcggcaaggctgagcccatgctgagctatcccgatgcatccgcccctgccaatgaacagtatctgccggctattttccgccagaaggcacagcaccgccgcctgcgcggtggcaaaagcaatgaacaaggcgacgggacaaacatctgccccggcagccacaacagctggaagatcaaacagaacgtccaccttggccatgacagcctgaccgatgcgctggaactggtgctgcgcaaccctaccagcggcgaactgctcaacgacgatatcaccgcctactcgattgccgtggcgctgcgcgaggctattgccgccgatctgggcatacaaaccgaagagctgggctgcgcaagccatccgatcaaggtcgatagccagccaacccgcgccatccaggtgttcgacctgcgcagcggtggctacaccacccaggccgcggagcggctgaatgaagccagcctgtggcgaaaggtcatcgctcgtctggacagctgcaactgctcgcatgcctgccagaactgcctactcagtttcgatacccgcttcgaggccgagcgcctcaatcgtcacgtcgcgctggagtggatcaatcagacttggcttgccggcctggcgctgcccgccgagctcgctgtctttggtccgaaaagccaggcagaaatcgccactctacaggaagcggtcgaaagagcgattactagggacgacaacgcgaagaccgtagccatttacttcactgcacccgccgaagagtgggatcttgctgtcgcacgccgcctgaggcatcaactgcatagctgggaaagcgtcggacacctagtgcaattacatttactggaaagtaccgtttccagcctgccaagagaccaaaaggaatggttggcaaagctagccttcaacggagtacagatatgcctacacaattccataccggatctcggggcgctggcactcaatgtctcactgcaaggcccacaaggctgcattgcctgggctagcgacaatacgaacctggccgcacctggccacacatgggatctagcggaggccggtgcacggatcatccgaggcaccccctccgacctcaaggcagagcgcatcttgaatgctgccgatctcatgccggccccaccccctggcttgatcaagatcgagatcggcaatcagctggatggctcgctcgacaactttgctcgtcggttctgggagcacctaggtactgaggccaatggcctgattaatgatgccctcacaggcaaggatccaattacagagctggtttacagcgaccgttacgtatgcagcccgctagttgtgaatctgctggtcagcgtgatccacgagctcggacggctgagtgatgcagatttcgctatccgaatcctaggccgacaatatcagcgggaagacaatcgctcgccttggcagtgccggcatgactggcactcagctcgcgagcgcgatgaggccctccgccaggctctggcgtactgcggccgcgagggagaggtgctaagcctgcctaccttgccgcactaccgccggctacagcttaagctgcgctccggtaatcaactgaccgtccagtttgatcaggggctttcgtattgggaagccgagcgcagcgaaaagtcttaccagctcaggttcgactttacatcacgcgagcttggagaagaaatcatggagcgcatcagttgtaaagtttcggcggctggggaggaaaacactcagatattcctctcttcctcttga

SEQ ID NO: 29917 - DNA, 3348 bp, Pseudomonas aeruginosa PS42
gtgccgcttgtccaatggatttcagactttttatctaggcgtggactgcaagaaccggatagtcgcccgctattcgcctataggacctcatcagaagaattcgagatactgcgtcagcttttgcatgggctcaacgtggggcaacacgcgcaccccaaatatgctcaggcctggctactctttgcggccgaatggtggaagcgcgaatatccgggaggagcatggcgttggggaccactgtgcgaggcagccggccagcaggggttgccccaggataagacccgcagactggtcatcgacggacgccacctatggcgtctgcagaccgccatcaagaatgaaggcaagcgcttcatcggcctggtcgcagtgaatggcggcctgcccatgcgcctggtcgagtcggcgcagggcgggctgtccggcctgctgcgcatggtcaccgagcaggcgctgcgctacgagctgcaggatgagcagctgcgtcaggctatcgaggcccaagccgagctcttgcccgcctgctaccagcaggcgccggtctacgagctgctcgacaatctggtcaaggcggtgctgcacatccgcaagacctatgccctgcagggcgcccaagacccaatcgcccggctgcaggaagagtgccctcactgggaagatctcttccccatcgccctcgattctcaggccgccgccagcctgatcaaaggcctggtccgggatacagtcagcatcacgccccagtcgcggcggcctcctttccagatccagcgcggtctgcgcttcagctccgatggctcaatgcccgtctacgagctgacattcgcgatgcaggctcaggcccgacgcgaccaggtggccgaagcactggggatggccatggaggcgctgccgccacacttccagctgctgctgcgcatcggcgagcgggaatacctggtcggcgaagctctgctcaaagacgaggaataccagctgatcgccaggccgctgccggccatccacagcctgcacaatgccgcgcagctgatcgtcagccgctggggcgccaccctgcacattgccaacctaccgggcggcgaagccttgagccatgacgagccgctgatcttcgagaatacctatccctttgcccgcctgctcgcgcagggcgatgcgctggtcaagggcgagtcggcactggcggccatgccggcgagaaccatcgtgtatgccgaagaaggcgaggctcgcgagctgcatgactgcctggccgacgggcaaatgctgatggaacttcccgccggtaccacccggctcacgtacaaacaacagcccttcgttgtcaccatcagcgccagcgctacccgccacccggaagcctactggcatggcaacagtctggaggcgctctccgtgccggggctgctgttccgtggcacgccgcgcctacgcattgagcagggaacgggcttttccagctatgcgcccgcccatgagctgtttgtccgcactcaaggcagggagctgccgctcgcccaagcccgggcgccggggctgtgccggctgatctggcgcaaggatggccagcgcctgctgaacacccgcgccgtgcttctcccggacgaagcctccatcacctacgcgccgggcgccagcaccctcgagggcagcattcgcctgcaccactggcctgatgtgccggtgcgctgcgagagcgaacaggtcgcgctggagcgccgccatgataggacaggcctgctcctgcggctgaagagcaacggcagccggccggccaccacggttccgctgtgtctgcagtggcccgacggcgagcagaggctcactctgcccttccccggctatggcgtcacgctgctgcgcaacgacactcctctcaagctgaatcaggccctgaccatcgaagagctgatcggatgccgtgcggtattgatgtcggcacagggcgccgagaactggcagattcgcctgacgtccagcggcgccgatgcccgctccaccctctctcaggaaattcgctacaccgggattcgtgaaatccgcctgttcgagctgatcccggcgatacagcagatgttgtcctgccacccggggctcgatcatgtcgtgcagctagagttgattcatgcccaccagacccacgctcgcctacaggtgggccgctactcgacgcgcatccgcctgcacagccagcgcgagatggcgtcactgaacgatagcggctccgacgttctgcttgagcagccgcatgccgagggtctgatattgggcctgccactggcagaaccggaacatgacccggtcagcctgccgctgcatttttccgaacaggtgttcaccggcagctggctggtcagcctgccagacgatgccgtcggcccttggttgctgtacacctctgccgagtcaccgctacacagccgtgcgaccatcgtgccaccgaccgcgagccaactgtcgaagcccctgaccccgctgcgcaaggcgctctgcgaagccaatggcgaagagcgcatgtgccagctccgggctgcgctacacaccatggcagcagacccggaagccgaggactggcagacactagagctgctgctggaccggctgcaccacctgccactggccagcctggacatctgccaggcactaatccgcgagccgcaggctctggccacggcaacgctgctgctggacgatttctccagccggctggcagagcgcctgccctgcgagctgcccttcgagtggctgctgatcgcgccaaagcactggttcgacactttcgcgacactgcgccagcagctggcagccgacaatccccgcctgctatcggtgatccgcaacgacatccagagcaagagccagttcctgtcacgctggcagccggcgctgcgctttatcttcgatcagggcttgcaccactcgttcgatctacaaagcccagatgtggcgttcttcctgagaaatccggcgatgctcaccgactcctggttgtctcaactgctggatggcgagcactcggccatgcagcagatgttccgacgcaatcccgctgaaacccatcaatatcctggcagtggcaatacggatataggggaattcctgaaaacaccccacgggcaaatgctcctccgccactgcaagctccccgccaacgacttcaagctgaccacagtcatgctgcccttcatggccgccttcgatacctactccggccatggacagcagtggcaagccgatccggcacgcctgttcagcctaagaaacgctcgccagttcgatacggtctggtttgactccgcctatcaactcggcctggccatggcgcaagccgcctcgatgcagaagtga

SEQ ID NO: 29918 - DNA, 6216 bp, Pseudomonas aeruginosa S35004; identical to SEQ ID NO: 29784

SEQ ID NO: 29919 - DNA, 3348 bp, Pseudomonas aeruginosa S35004; identical to SEQ ID NO: 29881

SEQ ID NO: 29920 - DNA, 6216 bp, Pseudomonas aeruginosa SG17M; identical to SEQ ID NO: 29774

SEQ ID NO: 29921 - DNA, 3423 bp, Pseudomonas aeruginosa SG17M; identical to SEQ ID NO: 29905

SEQ ID NO: 29922 - DNA, 6201 bp, Pseudomonas alcaligenes NBRC 14159
atgctctatcagaagaactatttctccgccctcaccgacaacctgagcacccgcagcgagcgggccgcccagggcctgctcagcctcggcaacccgcagctgcgccagtttctacatgaccagctgaccgccgcccccggcacgccgggcgcctggctggccgatccggttttcgaaccgaccttcggctggcaggaaagcgctgaaaccatgagttccctggccggcggcaacatgctgcaccagcgtctggctagggccatggaatccccgcccaaggaccttgcccaggaatacaccttccccggaaaccgccatcccttcacccaccagctggcggcctgggatatcctcaaccgtgcggtgccgcaatcgctggtggtgaccagcggcaccggctcgggcaagaccgaatgcttcctggtgccggttctcaaccagttggccaaggaaatcgacaccggcgaagacccggaaggcgttcgcgccctgttcatctacccgctgaacgcgctgatcaattcgcagcaaaatcgtctggatgcctggactgatgggtttggtggacagattcgtcactgcctatacaccggagcgcttgagaatgagcgaaaggtgtccgatcagcagtacaaaggccaagtgatcgatcgtaaaagtctgcgcgaacgaccgccgcagctgctcgttaccaacgccaccatgctggagtacatgcttatccgcaaagaggatgagccgatcctgcaaaagtccgccggcaagttacagtggatcattcttgacgaggcgcacacccatatcggctcccaagccgccgagatggccctgctgctgcgccgagtgatgctggccttccaggtcaagccgcaggacgtgcgcttcgttgcaacctcggccaccttcggctcggatacgcagaccatagagagcttgcgcaaatttctagccgatatcggtggagtggctccagagcaggtgcatgtcgtgcagggacaccgggatattcctaccctacggaatgcagcaccagatgccgtgcaggatacccccgaagcaatcagtacgattgaagcagaacaagagcaatcgacactgcgttaccagcgccttgaggcgagtccgaccgctcgacggctgcgctccctgttcacgccggatggacaggtgaagccgcaaagcctgcaaggacttgcaaaagattccgaccttcccttgactaaggtactcgcctggctggacgtgatgtctggtaccaagaatgccgacggcctctccttcctaccgctacgtgctcacctgtttcacaacgtaataccggcgattcgcgcctgcgtggatcagaactgcccccacaaagccggcacagctctggagcatgccgactggccgttcggcatggtttatctggaagagcggactcactgcaactgcggcgtccccctcatgccgctggtgtcctgtgaggagtgcaacgagagctttttgcaagcgaaacctaccagtagtggaaaactaattgatcaatcgcaacagcaggtcgacgagttttctctagatgaagaatctactgatattgaagatccggctgacaccgataatgacgcactgagccagatattaattaccaaccgcaatgtcgggcacgtccgctctgaatatcttgatcgtaacagccaaaaactgatgttcgatggtcctaaggatggctacatcgaactacagatcttccagagcagcaggaatgagtgcccgtgctgtggcgccactatccagggtcgcggtctacttcgaccagcccgcgtcggcacgccctttaccctgagcacagtaattagcaccctgctggaattctgcccgccggatcaaatgccatccggcaagcctttccaaggtcgcaaactgatttccttcaccgacagtcgccaaggaacagcacgcatagcagtcaagctacagcaggactctgagcggaacaggattcgcgggcttatttatcagcgcctacttcaagcccaacccgttacggttatgtcagaggaggagctacaggagctctgcgagctacaagcacaagcttcctcgcaaaaacttgaacgctatgcgcaaaagtatttggagcagctactggagaagcaggccgaggcggccaagggagccgaaatcggttggaccgatatggtcgactatcttgctagcacatcagatttgcagttgggtgtcctagactactatcacagcctagcccctaagacctttggtaaacaagacagtgtcgccttggccaaaatgctgcttgctcgtgagttcttccgtaggccgaaacgtgccaatagcttggaaaccctggggcttgtacaggtctgctatcccaagctagccagcataactagcaaacctttagcgtggcctgcgtacctgaacgtagaatcctggcgtgcctatctaaaagtactgctggatttctttgtacgtcaaaacgccgttctaaatatcgacaaacaatggcagccgctgatcggcgttcgtatcagccccaagtgggtagttgcgcccgtgtttgatggtaaagctgaaagactatctggtcgctacgtgcgctggccaacagtcaataccgtcagtagcgtccagtctcgagcaatcttactgctctgtaaggcattcaactggtcaactgcggtgcaccaagatcacattgactcgatcctgcgtgaggcttggaatgcacttacccaacaggcaaagctgctgatctcgtcgggtgacggctaccaactggacttcaaggatctgagcttccggctgccgaatgaagtctatctttgcccagtaacacggcgtttcatcgacaccccgttcgagcagctgagcccctacaccccacgaaccgaccgtgagatggtcgtcaaggtgatgccctacaccctaccacgtccgccagaaacgctcctgcattcccccggcgatgaagctctgctggcgatccgggactggctgaacaacctgccggaaatccagaaactacgacaagatgcactctggtcggacgtcatggatctggttatcgagggtggaaactacttccgtgcggccgagcactcggcccagcaatcgaagagcaaactggacacatacgagggcttgttcaaggcgggcaagctgaacctgctgagctgctcgaccaccatggaaatgggagtggatatcggaggcatcagcgtagtggcgatgaacaacgtgcccccgcacccggccaactacttgcagcgcgccggacgcgccggacgtcgcagagagggacgttcgcttgccttggccgtctgcaagaacactccacacgaccagagcgtgttcaataacccgctctggccgttcaacacgcctatgcgcatgccaaaggtgtctctgcagagccccgatctagtgcagcgccacgtcaatgcctggctgctatcgcactggctcaagcacgtggtagccgcccaggaaatcaagtcgatgaccgccggcacgttcttccttgatggagaaatgcccatgtcgctggccgcacgcttctgcctgtggtgcgacaatcaggcggtcgataccgaggcgcctgtagagcaggccctcaaggacatcactctacgcagcatcctcgataccacaccgcagcacgagctgttcaaacgcgccagcagccgcatgaacgagatcatgcaggcatggcggcaggagcattcggccagctacgctcagctgctacagattgccgacaagaaagctgccgcctctcgcgccatggaggcgcaactcagccgcatagagaaggagtacctactgagtgagctggctgaccggcgattcctacccggttacggctttccaacagatattgtcagcttcgacaaccgctgcatgcagacgctaaagcaggaagaagtcgataagcgcgaggacaaccgcgcgcgctatcgctcgttagcctcacgcgatcgcatcactggcctacgtgaatatgcgccaggtgctgaacttgttatggacgggcttgtttataagtcatccggcataacgctgaactggcatgcccccgcgtctgctgaaaacgtcaaggagctgcagctcttcaagaaggcatggcgctgtgggcaatgcggcgcgagcgacacagctattaccccgggacttgagatcaactgccaggaatgtggtgctccaatcgagtcggatgaagtccgcgaatacctagtccctgcaggttttgcggtggacttcttcgatgagccgcacaatgacatcagtcacctgcagtacgtaccggtgaaaaacccgtggctaaacgtgcccgccagttgggtatgcctggccaatccagcgctcggccagttccgcgccagccaacacgcccatctgttccactacacctcgggagccaatcagaagggcttcgccatctgcttggagtgcggtaaggcagagcctatgctcagccaccccgatacatctgcccctgctaatgagcaatacttaccagccgttttccgtcagaaagcacagcatcgacgtctacgcggtggcaagaatgacgatggagagaacgtctgccctggcagccataacagctggaagatcaagcagaacatacatctgggtcatgacagtctgaccgatgcgctagaactgattctacgcaacccctccagcggtgaacttttgaatgatgatgtcaccggctactctattgccgtagcgctgcgggaagcgatcgccgccgagctaggtgtacaaaccgaagagctgggttgcgactgtcatccgattaaggtcgatggttatccgtctcgtgccattcgggtttttgacttgcgcagcggtggctacaccacccaggcagcagagcgactgaacgcctctggcctgtggcagcgggttatcactcgattagacagttgcgactgctcgcatgcatgtcagcgttgcctgctcagcttcgataaccgatttgaagccgatcgccttgatcgccatgctgcattggcgtggatcaatcaaagttggcttgccggtctggcactgccaactgagctagccgtctttggcccgcaaagccaggctgaaattactaacctgcaggaagccgtcgaacgcgcgattactctggacgacagcaggaagatcgtcgctatatacctcactgcacccagcgaagagtgggatcttgccgtagctcgccgtctgaggcatcaactgcatagttgggatagtgctgggcaccaagtgcagttgcacttgctggaaagtaccgtttctaccctgccaggtgaccaaaaggaatggttagcaaagctagctttcaacggagttcaggtctgcctgcacaacgtcataccagatcttggggcgctggcactaaatgtcacactgcaaggcccgcaaggctgcattgcctgggctagcgacaatgcgaacctgaccgcacctggccacacctgggatctagcggaggccggtgcacgaatcatccggggcacactctccgccctcaaagcagagcgcatcttgaatgctgccgatctcatgccggccccacccactggcttgattaagatcgaaatcggcaatcagctggacggctcgctcgacaactttgctcgtcggttctgggagcacctaggtactgaggccaatggcctgattaatgatgccctcacaggcaaggatccaattacagaactggtttacagcgaccgttacgtatgcaacccgctagttgtgaatctgctggtcagcgtgatccacgagctcggacggctgagtgatgtagatttcgctatccgaatcctaggccgacaatatcagcgggaagacaatcgctcgccttggcagtgccggcatgattggcgctcagctcgcgagcgcgatgaggcgctccgccaggctctggcgtactgcggcctcgagggagaggtgctaagcctgcctaccttgccgcactaccgccggctacagcttaagctgcgctccggtaatcaactgaccatccagtttgatcaggggctttcgtattgggaacccgagcgcagcgagaagtcttaccaactcaggttcgactttgcatcacgcgagcttggagaggaaataatggagcgcatcaggtgtaaaatttccgcggctggggaggaaaacacccagatattcctctcttcctcttga

SEQ ID NO: 29923 - DNA, 3348 bp, Pseudomonas alcaligenes NBRC 14159
gtgccgcttgtccaatggatttcagattttttatctaggcgtggactgcaagagccggatggtcgccccctattcgcctataagacctcatcagaagaattcgagacactgcgtcagctcttgcatgggctcaacctggggcaacacgcgcaccccgaatatgcccaggcctggctactctttgcggccgaatggtggaagcgcgaatatccagggggagcatggcgttggggaccactgtgcgaggcagccggccagagaaaggtatctcacgagaagacccgcagcctggtaattgacgggcgtcgtcagtggcgtctgcaaaccactataaaaagtgaaggcaaacgtttcattggtctggtcgcggtcaatggcggtctgccaatgcggctcgtcgagtcggctcaaggcgggctatcgggtctcctgcggatggtgagtgagcaggcgcttcgctacaacctccacgatgaacaagtgcaccaggccatagaggcccaggccgcacttttgccggcctgctaccagcaggcgccggtctacgaactgctcgaaaatctggtcaaggcggtgctgcacatccgcaagacctattccttacagggcgcccacgatccgatctccaaactgcgagaagagtgcccacaatgggaagagctctttcctatcgcactcgactctcaggccgcagccagcctgatcaagggtttggtcaaggggatagtcagtataacgccccagtctcggcgcccccctttccagatacaacgaggcctgcgcttcagttccgatggctctgcccccgtctacgagctgtctttcgcgatgcaggcacaggcagcgcgcgaacaggttgcagaggcattgggaacaaccggcgcagcgctgccgccacactttcagttactgctacgcatcggtgaaagggagtatttggtcggcgaagccctgcttaggggtgaggaatatcagcttatcgctaggccactaccgacaattcgcagtcttcacgaacccgcacagctgattgttagtcggtggggtgccaccctgcacatcgccaacctgcccggcggcgaagccttgagccctgacgagccgctaatcttcgagaacgcctatccctttgcccgcttgctcgcgcaaggcgatgcgctggtcaagggggagtcggcactggcgctcatgccagcaaaaaccatcgtattttctgaagagggtgaggctcgcgagctttacgactgccttgccgatgaacaagtgctgatagagcttccggcaggcgtaacccgacttacctatcgaaaacaaccgttcattgtcaccatcagcaccagcgcttcccaccaccccgaggcttactggcagggtgacagcctagaggtactctccgtaccgggactgctgttccgcggtaaaccacgcctgcgaatcgaacaggcaacgggcttcactagccatgcgccggcccatgaattgtttgttcgagcgcaaggaaaggaggtcagcctcgcccaagccaaagccccaggactgtgccggttgacctggcgtaaggatggtcagcgcttgatgaacaaccgcgccgtgcttctcccggaagatgcgtccatcgcatacgtcccgggtgccagtccatttgagggcagtgttcgtctccgtctctggcctgacattcccgtccactgcgagaacgaacagatcgaactgaagcgccatcacgatggggcagctctgatcctacaactgaagagcattggcagccggccggccaccacggttccgctctgtctgcagtggcccgacggggagcaaaggctcacgctaccgttccccggttatggcgttacgttgctacgcaacggcatccagctcaaatcgaatcaggccctgaccatcgaggacctggtcggctgccgtgctctgctgatgtcagcccagggagccgaaaattggctggtgcgtctgacgtctagcggcgatgcctcgcgatccaccctgtctcaggaaattcgctatacaggtattcgcgaaatccgcctgttcgagctgataccagcgatccagcagatgctgtcctgccacccaaggctcgatcatgtcgtgcagctagagctgatccactcccaccaaacacatgctcgcctacaggtgggtcgctactcgactcaacttcgcctacacagcgaccgcgagatggcgtccctaagcgatggcggtcgcgacctgctgctcgatcaggaagaggccgaggatctggttcatggcctgccgctggccgagccggaacatgaccccgtcagtctgccactacatttctccgagcaggtgttcaccggtaactggaaggtcagcctgccggacgatgccgtaggcccctggctcctatacacccgcgatgactctccactacacagccgtccgacaatcgtgccgtcgaccgcgaacgacctctcaaaacccctgagcccgctgagaaaggcgctctgcgaggccaatggcgaagagcgcatgcacctgctaagggccacgctgcgcttgatggccgcagaccctaaggtcgaggactggcagattctggaactgctgctggaccggcttcaccatcttccgctagcaagtttggatatctgccaagcactgatccgtgagccgcaggcgcttgccatggccacgttgttgctagacgacttttccagccgtctggccgagcgcctgccctgtgagctgcccttcgagtggctgctgatcgccccggagcactggttcgacaccttcgcgacactgcgccagcagctagccgccgacgatccgcgcctgctgtcactgatccgcaacgacatccagagcaagagccagtttctgtcccgctggcagccagcactgcacttcatcttcgatcagggcctgcaccgttctttcgatctacaaagccgagatgtggggctcttcctgaaaaacccagcggtactcaccaccgcctggcagtcgcacctgtttgatggcgagaactcagccatgcagcagatgttccggcgcaaccctgccgaaacccatcagtatcccggcagcggcaatacggatgttggagccttcctgaaaacgccccatgggcacatgcttctccgctgcagcaagctccctgccaacgacttcaagctagccacggtcatgctgcccttcatggccgccttcgatacttatgccggccgtggacggcaatggcaagccgacccggcacgcctgttcagcctcagaaatgctcgccagttcgatagtgtctggtttgactcggcctatcaactcggcctggccatggcgcaagccgcctcgatgcagaagtga

SEQ ID NO: 29924 - DNA, 6201 bp, Pseudomonas alcaligenes NBRC 14159
atgctctatcaaaagaattatttctccgccctaaccacaaatttgagcacccgcagcgaacgcgctgcgcagggcctgctcagccttggcagccctcacctgcgccagttcctgcatgatcagctgaccgcctctcccggcactccaggtgcctggcttgcagatccagttttcgaaccgaccttcggttgggaagaaagcaatgaaaccatgggctctctatccggcggcaatctattgcacccgcgtcttgccgaagccatggcatccccgcccaaggatcttgcccaggaatacaccttccccgtcacccggcatccattcacccaccagttagcggcctggaaaacattaaatagcccggagccgcaatcactggtggttaccagcggcaccggttcgggaaagaccgaatgtttcctggtgccagtcctcaaccatctggcgaaggagatcgatgccggggaagacctggaaggggttcgtgccctgttcatctatccgctgaatgccctgatcaactcacagcaaaaccgtctagacgcctggaccgatggctttggcgggcagattcgccactgtctatacaccggcgcgctggaaaatgagcgaaaggcttccgatcagcaatacaagggccaggtgattgaccgtaagagcctgcgcgagcggccgccacagctactcgtaaccaatgcaaccatgctcgagtacatgctcattcgtaaagacgatgagcctatcctgcaaaagtcggccggaaaactgcgctggatcattcttgacgaggctcatacccatatcggctcacaagctgctgagatggctctgttactgcgccgggtgatgctggcgtttcaagttaagcctcaggatgtccgcttcgttgcgacttcagctaccttcggctcggatatgcaaaccatcgagagcctccgcaagttcctcgccgatatcggcggagtgactcctgatcaggtgcatgttgtgcagggccacagggatattccagcattgctggacgccaagccagaaacctctcaggacacgcccgaatccatcggggctatcgagggagaacaagagcaatctgcgctgcgctaccggcgcctggaggccagcccgactgcacggaggttgcgttccctgttcattcctgatggacaagtgaaaccgcaaagcctactgggtctcacgagagcatccggtctcacggcagcacaaatactggcctggttggatctgatgtccggcactaagagtgccgacgggctgtcctacctgccgttacgagcgcacctgttccacaacgtaatcccggcaatccgcgcctgcgtggatcggaactgcgcttacaaggctggcacagcgctggatcacgcggagtggcccttcggaatggtgtatctggaggaacggacccattgccgctgcaatgccccgttaatgcctctggtctcctgcgaggagtgcaatgagagcttcttgcaggcaaaacctaccagcagcggaagattgatcgatcagtcgctacaacaggtcgacgaattttctctagatgaagactctgcggatacggaagaccaagccgataacgacagtgaatcacttagccaaatcctgattaccaaccgccccgtggcgcacggcagctctgagttccttgatcgcactagccagaaactgatgttcgatggtcccaaggaaggctacatcgaactgcaggttttccagagccacaaaaatgagtgcccatgctgtggcgccaccatccaaggtagcagcctgatgcgcccggcccgaatcggcacgcccttcaccttgagtacggtgattgggaccctattggaattttgccctccagacccgatgccgtccggcaagcctttccaaggccgcaagctaatttccttcaccgacagccgccaaggtacggcacgcattgcggtcaagctacagcaggactctgagcggaaccggattcgcgggttgatttatcagcgccttctacaggcccaacccactgcggccatgtcagaggaagagctgcaggaattccgtgatctacaggcacgtgcagcctcacaaacgcttgaccgctatgcgcagaaatatctggagcaactgcaggagaagcaaactgagacggctaagggcaccgcaatctgctggaccgacatggtcaaccatctggccagcaccccggatctgcaactgggcattctggactactaccacggcctcgcccccaaaacttttggcaagcacgacagtatcgccttggccaaaatgctgctcgcccgtgaattcttccgcagacccaaacacgccaacagtctggaaactctaggactggtgcaagtgtgctatcccaagctgaccaacatcaccaccaaacccatggcctggcctgcgcacctggatgtcgaatcctggcgcacctaccttaaagtactgatggatttcttcgtccgccaaaacgccatcctgaatatcgatagacaatggcaatcactgatcggcattcgtatcagtcccaagtgggtagtagctccggtttctgatggcaaacttgaaaggcttcctggtcgctacgtacgctggccttcagtcaataccgtcagcagcgcccaatcacggcctatcctgctgctctgcaaggcgttcaactggtcaaccgcggctcatcaggatcaaatcgactcgatcctgcgtgacgcttggcaagcactcacccagcaggcaaaactgctgatttcctctggtgatggctatcagctcgacctcaatgatctgagcttccggctgcccaccgaagtctacctctgcccggtatcaaggcgcttcatagacactccgttcgagcagctaagcccgtatacgccacgcaccgaccgcgcgatggtcgtcaaagtgacaccatacaccctgccgcgccccccagaagacctcctatatctgccgggtgatgacggcctcttggcgattcgtgactggctcaacacccagccggaaatccagcagctgcgccaggagtctctctggtctgacgtaatggatctggttatcgagggcggcaactacttccatgcggccgagcactcggcccaacaaccgaagcacaaactggatacctacgaaagcatgttcaaggcaggcaagctgaacctgctgagctgttcgaccaccatggaaatgggtgtggatatcggcggcatcagcgtagtggccatgaacaacgtccccccacacccggccaactacctccaacgtgcgggacgagctggtcgtcgtcgtgaagggcgctccctggcgctaaccgtttgtaagaacaccccgcacgatcagagtgtgttcaataaccccctctggcccttcaccacgcccatgcgcatgcccaaggtttccctgcaaagccctgagctggtacagcgccatatcaacgcctggctgctctcgcactggctgaaacacgttgtcgccgcccaggaaatcaagtcgatgacggcaggtgcattcttcctcgacggcgaaatgcctatgtcgctggccaagcgcttctgtctatggtgcaacaatcaggcaagcgaagcggatccgcaggtagtacaagccattaaggacattactcgacgcagcattctcgactctacgccgcagtctgagctgctgaatcgcgccagcagcaatctcgccgaaataatgcagacatggcggcaagagcatgaggcaagccgttctcaactgttgcaaattgccgacaagaaagccgtcgcgtcccgcgccatggaggcccaactcagccgtatcgagaaggagtatctgctaagcgagctggctgaccggcgatttctacctggctatggtttcccaacggatatcgtcagtttcgataaccgctgcatgcagaccttaaaactggaggaggccgataagcgtgaggacaaccgcgtacgatatcgttcgctggcttcccgcgatcgcgtcaccggcctgcgcgagtacgcacctggcgccgaactagtcatggacggactggtgtacaagtcctccggcattacgctgaactggcatgcacccgcctccgccgaaggcatcaaggaactacaactcttcaagaaggcctggcgctgcgggcagtgcggcgccagtgacacggccatcaaccccggactggagataaactgccaggactgcggcgctctgatcgagcgggacgagattcgcgaatacctggtgcccgcaggctttgctgtggacttcttcgatgagccgcataacgatatcagccgcctgcagtacgtaccggtcaaagccccgtggctgaatttgccctccagctgggtctgcctggccaaccctgcactcggccagtttcgctccagccagcaggcccacctattccactacacctcgggggctaatcagcagggcttcgccatctgtctagagtgcggcaaggctgagcccatgcttagccatcccgatacatccgcccctgccaatgagcagtatctaccggccattttccgccagaaggcacagcacagacgtctgcgcggcggcaagaacgacgacggggaaaacatctgccccggcagccacaacagctggaagatcaagcagagcatccacctcggccatgacagcctgaccgatgcgctggagttggtactgcgtaggccctccaacggtgaactgctgaacgatgacatcaccggctattcgattgccgtggcgctgcgggaagcaatagccgctgaactgggcgtgcagaccgaagagcttggctgcgattgccacccgattagggtcgatggctctccaacccgagccatccggattttcgacctgcgcagtggcggctatacctctcaggcggcagaacggctgaatgactccagcctgtggcagcgggtcatcacgcgcctggacagctgcaactgttcgcatgcctgccagcgctgcctgctcagctttgatacccgctttgaggctgaccgcctcaatcgccacgctgcactggagtggatcaaccagacctggcttaccggcttaaagttgcccgctgaactcgcagtctttggttcacaaagtcaggcggaaattaccacccttcaggaagcggtcgaacgggcgattacccaagatgacagcgcgaagaccgttacggtctacctcgcggctgccgccgaagactgggatctttccgtcgcccgccgcctgcggcatcagctacagaattgggaagacgccggacaccaagtgcaactgcatctgctggaaagcaccttcgccgctctgcctgccgaccagagggagtggctcgcaaaactgtccttcaacgggattgagatcggcctaaacaaggccatgccagatctcggagtgctggcgctgaacatcagcgtacatgggccgcgaggcaacttcgcctgggccagcgacaatgtaaacctggccgcacctggacgcacctgggatctggcggcagccggggtgcggatcattcggggcgtatcccccatcctgaaaactgagcgcgtactggataccagcgatttaatgccgcctacaacccagggcttggttaaggtcgagatcggtaatcatctggatggctcgctcgatggctttgctcgccggttctgggagcaccttagacaggaggccagaagccttctggctaatgccatcacaggccaggatccaatcatcgagttggtctacagcgaccgctatgtatgcagtccgctggtcgtgaatctgcttgtcaatctgatccatgagatcggagcgcatagcgatgatgtctttgccattaggattcaggggcgtcagtaccagaaggatgacaatcgctcaccttggcagtgctggcacgattggcgcacatctcaagagcgcgatcatgcgatccgtcaggcgtttgagtactgtggcctagaagccgatgtcctcagccttccgagtttgccacactaccgccaattgcaactgcagttgcgctcaggcaagcaactgaccatccagtttgatcaaggactttcctactgggaggccgaacgaagtggaaagccttatctgctcaggttcgatttctcatcacctcggcttggagaggagatcatgacgcgcatccagtgcagagtattagcggccagtgatgaaaacacccagatattcatttcatccacatga

SEQ ID NO: 29925 - DNA, 3351 bp, Pseudomonas alcaligenes NBRC 14159
gtggcgcttgcccaatggatctcagattttctatcccggcgtggactgcaagagccagatggccgtcccctttttgcctataagacctcttcagaagagttcgaagctctgcgccagcttttgcagaatcttcccggagggcagcaagtaactcccagctaccctcaggcttggctactgtttgccgccgagtggtggaagcgggaatattcaggtggcgcatggcgctgggggccgttgtgcgaggcggcaggccagcggggcttgtcacatgagaagactcgcaagctggtcattgaagggcgtcgccaatggtgtctgcaaaccgccatcaagaatgaaggcaaacgcttcatcggcctggtcgcagtgaacggcggcctgccgatgcgcctggtcgagtcggcgcagggggggctatccggcctgctgcgcatggtaaccctacaggcggtggactacgacctgcacgatgagcaactgcgtcaggctatcgaagcccaggctgctcttttgcccgcatgctatcaacaagcaccggtctatgagttgctggacaacctgatcaaggcggtcctgcatatccgcaggacctatgctctgaaggttgcccaggatccgatcgccaagctgcaggaagaatgccctcagtgggaagaactctttccaatcgcgctcgacagtcaggccgcagccagcctcatcaagggcctggtccgggtcacagtcggcatcacaccccagtccagacgtccccctttccagattcagcgcggcctgcgcttcagctccgacggctccatgcccgtctacgagctgtcctttgcaatgcaggcacaagccaagcgagatcaagttgccgagtcactgggtttggctgctgatcgactgccgccgcacttccaactgctgctgcgcatcggtgagcgggagcacctggtcggcgaagcattgctcagggatgacgagtatcagcttatcgccagaccgctgccctccattcaaactgtgcacgaatctgcgcagctgatagtcagtcgttggggcgccaccttgcacatcgccaacctgcccggcggcgaagcgttaagccacgacgaaccgttgattttcgaaaatacttatccctttgctcgtctgattgctcaaggcgatgctctggtaaaggggctgtccgcactggcggtcatgccggcaagaaccatcgtattggctgaggaaggcgagacccgtgaacttcacgactgccttgctgatgggcagatgctgatggagcttccggctggcaagacgaggctcgcttatcgcggacaagcgttcattgtcaccatcagcgccagtgcctcgcaccgcccggaagcctattggcaaggtaatagtctagaggcgctttctgtgccgggcttactgttccgtggtacgccacgccttcgagtcgatcaggggccagggcattccagttacgcgccgtcccatgaactttttgttcgcagccattccaaggagctagcactcggtgaggcacaggcaccaggactatgccgactgatctggcgcaaggatggccagcgcttgctgagcacccgcgccgtactcctcccggcgggagcttccattacctatgttccagcggcaagcaccctcgaaggaaccattcgactcgataactggcccgacgtaccagttcgttgtgagaacgaagagattgagctggacagccgtcatgatggaacaagcctgatcctcaggctgaaaagcacgagcgctcaacctgcaacttcggttccgctctgcctacagtggcccgacggcgaacataggctcacgctgccgttccccggttatggcgtcacactgcggcgtgacaatcttcctctcaagcccaatcaggccttgaccatcgatgagctgatcggctgtcgtgccctgctaatgtcggcaaagggcgcagagcattggcaggttcgcctgacgtctgtcggacccgatgctcgcgccaccctgtcacaggaaattcgctacacggggattcgggagattcggctgttcgagctgatcccggcaatccaacagatgctttcctgccacccggggctagatcatgctgtgcaactggagctaatacatacccatcagacacgtgctcgccttcaagtcggccgctactcgacgcgcatccgcccgcacagccagagacagatggtgtcattgagtgatggaggccgagatctcattctcgagcagccccaagctgaaggcctgatgctagccctaccactggccgagcctgaccatgagccggtcagcctgccgctgcatttctccgagcaggtgttcacaggcaactggttggtcagcctgcccaccgatgcgactggcccctggttgctgtacacatcagacgaatcaccactgcatagccgcccgacagttgttccgccgacaatgattggtctgtcgaagccattgactcctctgcgtcaagcgctctgcgaggccgatggtgaggtgcgcatgagcatgctcagagccgctctgcgctcgatggtgaatgacccgcaagataaggactggcaaacgctggaacttctgcttgagcgactgcaccacttgccaccggccagcctggatatttgccaggcactgatacgtgagccgcaggcgctcgccatgaccacactgctcctcgacggcttctccagtcgaatggctgaacgcctgccatccgagctgcccttcgagtggctgctcatcgctccagaccactggttcgacaccttcgcgatacttcgccggcagtttgccgctagcgatgaccgactcttgtcgatcatccgccacgacatccagagcaagagtcagtacctgtctcgctggcaacccgcgctgcgcttcattttcgaacaaggcttccaccgctacttcgatctccaaagccaggatgtagggttcttcctgagaagtccggcggtgctcaccggaacctggttagacaggctgtttgaagggggagagaaatctgccatgcagcggatgttccaacgcaaccctgctgaaacccatcaataccctggcgccgggaatacgaatatcggggcattcctaaaaactacgcatggccaattactactccgccgcagcaagcttcctgccaacgacttcaagttggccgtggtaatgctgcccttcatggccgccttcgacgcccatgccggtcatggccagcagtggcaagccgatccggcccgcctgctcagcctcagaaatgctcgccagttcgataccgtctggtttgattcggcctatgaactcggcctcgccatggcgcaagccggctcgatacaaaagtga

SEQ ID NO: 29926 - DNA, 6318 bp, Pseudomonas bauzanensis
atgcgatttttcagggacctgatcgagcaaagccttgagcgtacccgcgaagcgactctcggcgttcttgggattaaacatccgggcctgcgccatcacttaagccagagcatcgttaatgagttgggtgatgatgattgtttcctagcgccgccagtttttgaacacaccttcggctggaatgagtcgaatgtaaaattgcaagatctgcagggtgatttgctttccacaagcctgctggacacgttagagcggcctcactatcgacccgatcctaacctttctgttgaaaagcggccttatcgattcgctcggcaccaatatccctacacccaccagctgcaggcttggcgtgttcttcttgatgaggagccacgctcggcagtcattaccaccggcacgggctctggtaagaccgaatgctttatggtcccgattctcgaggatctggttcgtgaacacgagcgcagcgagtctgcccttgtgggtgtccgcgctctgttcctctatccgctcaatgctctgatcaattcccagcaagagcgactcgacgcttggacccacaagtacggtaataacatccgcttctgcctgtacaacggcaagactgaggaacgtgcggataaagttcgtaaggatcagcagcagaagcccaatcagatcttatcccgggaactgctgcgcagggagcctgcccccatcctgatgactaacgccaccatgttggagtacatgctggttcgtcaggtcgacaatcctatcttagagatctcgcgtcagcagcaatcgctgcgctggatcgtacttgacgaagcacacacctacgtgggctctcaagcggctgagctttcgctcctgctgcggcgggtggttcaggcgttcgggaggcagtccgagcagatccgctttgtcgctacctcggctacaatcgctggtgaagatgccgaggagcggttgaaacgctacctggcggatcttgcagatgtgccgcttgagcaggtggatgttatcggaggttcccgtgtctggccggatcttgtattaaattcgccaagcaagaatattgctctgcaggaaatccgccatatcgagccggaggccgatgtatcaccggcgcgcttcgagatgctgacccagagcactattgcccggcgtttgcggcatgcagtcatcagctcagccaagcctcttgacctcaacgatctgttagatgaagttgctgaccaactgcagggagacagcctgggtgaacggcagcaggaggtgctcgactggctcgacaccatgactggcacgcacccggatgaaggccagccgccgtttttaaagcttcgcatacatctgttccagcgcatgctgcatggcctgtgggcttgcgtcgaccctcaatgcagcgcgaaacccagccatctgcaggactggcccttcggcaacgtttatgtgacccagcgggcgcgctgcaaatgccatgcgccggtatatgagctgggcttctgcgacgactgcaagaccccacacctgttggcagaagatcgcaatggcgaactccatcagctgagcacatacgccggtgatgagttcgccctcaatcacgaaaacggcagcgaggatgcgcctccagaagtgttgactgcgaatacctccagcacacgtctgataattgcaggattgtcggctgcgcatgagccttacttcccaaccactctggatcttgagagccaaaagctgggggcagtcaatgtcccccgcaacatcaagctctttctggttagagagggaaaagagagctcaggcaaaaaagagaaagactgcgcctgctgcagccactgcaacaactcgtcgtttggcaccagcgacttcctaagaaaagcctacctcggtgcaccgttctacattgccaacgccgtgccgaccgtcttggaattctgtcctgatcctgacaaggcggattgcgaaggccgctctcccgaagagctaccgggacgcgggcgcaagttgatcaccttcactgacagccgccagggtacagcgcgcatggcggtgagaatgcagcaggaggcagagcggtctcggctacgtgggttggtttttgaaacactgagaaatgcgcaggccaaggctgatgccgcacccaaggacacacccagtggcagtccggccgaactgctcaatctcgctgaaaacctggaaaaacaaggcttggctggcatggcggcggagctgcgcaagcaagctgaacttttgcagagcggcgcagcacccgccaatgaggccgaaatcattccatggccgcagatggccgagtccctcgcggcagccagggatattgataagttcatcctgcgatacaaccgctatgccaatccggcgttgttcgatggtagtgaaggcggtatgactatggcgcgcctattactggctcgcgagttctcccggcgtcccaagaaccagaacagtacggaaacgcttggactaatcaaagtcgggtaccaagggctggataaggtgacgacgactccgcctctctgggttgattctcgtgccactcccgctgtaggcgctgccagtgaccccagaagcgctctgacgctggatgactggcgcgacttcctcaaggtggcactcgacttctatgtccgggagaacaccttcattccgatggaaaacaaaatgcgccgctggatgggcagccgcttcagcccaaaggcgctgtactcgcccaagagcgacgtgcaggaaagcaacatcatccggaagtggccgcagatcaaacagggcacgccccatcgcctgatcaggttgctggaactggcaactggcctgaaccgtaccatgaacgcggacgccgacaagatcaacagctggcttgaagcggcgtggctggcgctggtcaatgccgggatcctagaggcctccgacaccggttatcgtttgcgactggagactctaacattctctttgcctactgatggctgggtctgcccattgacccggcgcattttcgacaccaccttccgcggtctgacaccctatctgccgcaaaaactgatgagccaggactaccgctgtcagaaaatccagattccagccttcagcaccctgatgccagatggttccccagcgcccaagcagttgcagatacggcacctggtcgcgagagacgcggttattgaccagctgcggcaggagagcctttggacagatatcagcgaccgcacggtcgagggcggcttctactaccgaactgcagaacactcggcgcagcagtcggcaaaacggctggatgactatgtcgaggagttcaagcgcggcgatatcaacgtgctgaactgctccaccaccatggagatgggcgtggatatcggcggcatctcggccgttgtgatgaacaatcttccgccacatccggctaactatctgcagcgtgcaggtcgtgcagggcgacgcagcgaggcccgggctatcgcttatacgctgtgcaaggccgacccgcataaccaacgtgccttcagcaatcccaagtggccgttcgttactgctattccggcaccgagcatcactctcagctctgcgcggatcgtgcagcggcatgtcaactcgctgttgctctcgctgttcctgcgcacccatagcagcaataatggcgatcgtaccaagctgactctgcactggttcttcgctccagacgactcacccggtcagcagctcatggcctggctcacggcagggcctgatgattttgaccgtgccgtgaagcagctggtgcgtggcacctgcctggaaggtcgttcgctcagctcgatcaccggcgaaactcggctggcattgcgcaacctcgaggagcgctggctgagtgaatatcgcaatatcaaccagaagctgcaggcagccagcgacgggccatacaagaaggcgctagcgctggagaagcaacgccatgaaaacgaataccttctccgctacctggcgtcgtctgcatttctgccgggctatggctttccgactgacgtggtgagtctcaagacctataacgtcgaggacttcctgcatcagcattggaaaagtgatgccagtcgcgaggacagcattttcgacaataaggaaatgccctcgcgcagcctgaatatcgccattcgcgaatatgccccaggggctcaggtggtgatcgatggccgggtctaccgctctgcgggcgtcagcttgcagtggcatgccgacgggcaggtcaatgaagcacaaaaattcgacatcgcttggcgctgccctgaatgcgggaacacgggtctggtcgaaaacgcctatgcgaataacgaggggttgtgctgttcgcattgcacgaccccaattccatccagcgagcgccacatggtgctgcgtccgggcggttttgtgaccgacttctatgaggaaaccaccaacgatgtcacttcgcagaagtttatccgcgtcgagcgaccgcgtatccagctgaatgctgaaagtattgccttaccggaccaacgttgcggcttcgtgcgcttcggtcatgaaggcagcgtcttccaccattcatctggcgagcatgaaaagggctatgccatctgcatgacctgtgggcgcgcggaatccatgcttgcctcgggcgaggtgcccaaggacctgcaacccgataaagctcaccgcccggttggcggcttggccggtagccgcaaggagcgtgactgttcgggcgaagcggtcaaggctaatctgcacctgggctaccagatccgtaccgatgtgctggaggtcttcctcagaaacccactcacaggcgaatggctttccgacactcctgaggaccgtctgattgcgacaacgctaggtgttgccatgcgggacgtgatagccgatcggctgggtatcgccagcagcgaaatgggtttcagccatcgcctcgaccgcgaccgtgacacccggcaaggccgctcggtcatccagctgttcgatgaagtcagcgggggtgccgggttcgtgctggccggcctgagcgatattgcattactgctgggcaaggctctggatcggctgcagtgcccagccaactgtgagaatgtctgctcgcactgcttggccagccaggacagccgcgtcgagcgtgaagagctggatcgcaagctggcgctgcggtggctaagcgaagccaggttggttgagcatctggggttgcccgatacatttgctgagctgcatggcgcgcgctattgctcgctaggtccgctgcgcgaactgagtgccgccatcaactcactggatcgccgcgatcagactgcatcaattctgctttgcctctacggtgactgtgcggattgggatcttgaccatcctcgcttccgggaacagttgctgacctgggccgttaccgaacgactcaaggtacgcctcggcattgctgatccgttgctgctgggcgcggaacaaaaggaaaccttggcgctgctagtccgtctgggcgtcgaactagtcgaactgccaatcgaagtactgcacgcaccttacctggtcgcccaactgtcatcccaagctggtgtccggagcctttacagcaacattaataacgtcggagtgcctggagccgattggctacaaggccatgccgatgttgtttgggctacaagtaagttgatgccagctgttacgggtaattccatcgacagccgcagctggcaccaaccgttgcatggggcgcgtatcgttgaaatttcttcgcagcttgatgggcctgtcaacaccctgcgaaaacgcctcaccgtactgatcgacgctcagatgccggagttagccgctttgattcgcaacgatcaagcgatttccgtcagctattcggatcgctacctgaagtcacccctgacgttgatgttccttacaggcttcttggagctgttccggagtgacgaacttcagactatatcgatacagacgctggcacctggcggtaaccagcccagttatctcctcaaccatgactggatgcgagcggatgaacagaagagcgttctcaggttctggctcacggagcaattcgatattgaaccagatatcaccctaatgagtagccctcgtgatttacttcactgtcgagtgattacggtgagatgggcgtctggcaggatcagcaagattctgttggaccagggtatgggttactggcgtggaagaatgccatacagagatcagatgaacttcgacttcaacatgtcaccgcatgatcagaaagacgtcatgctggagaaatatagctacgttcaaatgcagcagagtggggagtggccaacctatgtcagttgcgtgattgattga

SEQ ID NO: 29927 - DNA, 3300 bp, Pseudomonas bauzanensis
atggacgtggctgcacgagctggcagtactgcaaaggcgtggttgagtgaattcttgtttacccgtgagatgttcaaggggcctgacggaaagcccctttacagttatcacgtcacggaggcggaattccggtcgcttgtagagctactacgctcccatttcaagcgtggttctgtgccaaacagttccgctcatccggcagcttgcttttgtctacttgtcagcgagcagtatcggcgggcttataacagctcttggtcatggtcaggatctgagtcattgctggaggtgtccttttctccgcagcagcacgcccacctcacggccactggattggcgtattggaaacggccgattcgactgcgggagaacggacgggactggcttggctctctattctctgagggcgggcttccgtggccattggttcaaagtgagtcccacggattcgggcgcgctgtgcgcaggggtattacgcacttctaccggactgaaggtaaccgcagaacaactgcggacctaatggcggacttcgaaaacgacctgccggtaattttccgcaacctcgaaacacgccggcttttagcgggtattgttgatcagctcatgtacctggtcgagcatcacccactcagggatcaagaggatccagccagttatttggatcaggcagcaccagggtggacgggtgctttcccgatcccgttggatgaaagcaatgcacgcacgctgctcaacgattggctccgcgatgctggaaagaaacgcagggagcgccaagagtctttggagaaagcaagggccttcacttgtgagcattttctgcatggcactttaccgcaatggttaatacgcaccgagttgatcctgccccaggagacagagtttgcggttgatccgacaagtctgagtagtacccggcttgagttggcttactacgagggcgagagaatactggctagaggccccgcggtttatgggcagcttactgaaaagggtatcaaggcgcgcttctctaatccgcaagtcactctcgaacgtcgcgatcctagcgagccgctgagtctccgtttgttggacaacggtcgagtagtgcatcaacaatacttcgatggaagcgtcctcgattttcacgatgtacccttgattttcgaacgacgctccgaacgctggcaactggctgctgtgtccagttgctcgttgatatctgagcttgttcgagttcgagttcccaaaggctttaccaccagtttcgaaggtgacacggcaattcctttgggcgaagaccaagaatctggtctctggatggaggcaaactcctgtttcacgctgcaaaagggggatgattgctatctggtcgcgctcaatcaggcggacggtgatgattccaaaccaactctctcgggtgtattcgcactgtacgaaagtactcccgcgctgatcttcctgggctggccgaacctcgacgtgcctgaagattacccatacggcagagaggacttgctagagttcgtcaacggcgtgccgcttgaccggaggcttatgagccattacggctctgttcgttataccttgcgcacccgctcgggcaagacgctcatgcatcgccgtttcggcgttctgcccagagattttaacctctccctgtttcctgaggtacgggagcagccggcacgtattcatatcaagagtgctgcgcagcttggtacgcacattgtcagtgataacttgatagtggagcagcaaggagagtcgttgaatatgcgccaccaaggtgggataccgccttcgacctttgtgattgaagtaggtcaagtattgcctacgctgcagcttcgcttaccctatccctaccaaggagcccgtctgctagaccaagacggcaacccgtcgggagtcagagagctattattggttgatctgatgggctaccgcatttcactgacctcggggttaactcaagggcagacctttcacatgcaattggagctggtaagtgcggagcagccgcatccgcagcgtgtatacaggtttcgggtaggtacggtacctgtaatgctcaacctgttcagctatctcgccgacatgcagaacatgcttggagcagtggatgagcaggatgcctacatcaggcttgtcattgagtccgagcgacgactgttgcagctagatatccgccgctatggcggtcagcttgagtgggagggacgccatgtatttcatataggcggtgtctccaataaagtcgtattagatggtgtgaaggcagaggctatgctgctgtctgatcccaagcaatcccctttgcaacttatggagaagaccagcgaatcagttggtacaggtagtttcgagataccccaggctatgcagtctcgcggaccatggctgatctaccctgcgggtgactcggcgattcgttttcgtccgggcctatatttgatatctgaaaataacgtagatcccgttgtagaggtaatctcactacaccgagccgctgagctgtttcatccttggcgcaatccggatgtcatcgatcagcaggttgccgccatggcgggcgattttaaccacagtggctggcagtacctagctgacctgaagcagaactaccatcacctgccgctttcatcatttgaaacctggaagtctctatcgcgcaaccaagaggcattgagcttcgcagtattccgtcttgagatggatgagtcattctgcgcacgtatccgtgacgagctcgctgtcatttgggaaaccatcccgcttccgctgtgggtaaaggcgcatagggttttccaagacgctatgtgtttgaccgggcttcctgagatgctggtcaagaatcttgtatcgaatcgtgccagcgtattgcgtttcattgtgtccggatttgaatatcttggggattacctaagcaccggtagtcgcagctcattgataaaagtgccgccagaaagtgtcctgccgatctggtatcaggatctgcgtcgatttcacgaggctaacaggagctggccaactttgctgggtcgcgagctttccagctgggtcgaagagctgcaactgccgcctttagtaaaagctctttcattggcagagtttactgatgcggtcacctatctacccattttcatggcctatgtaagcgctggtcaggcaaaaattaccgacctgccggcaccgccggcttatttgaagtttgcgattcgtcttatttctgattttgaccgtcagggatggttcgtgcctgcccacgccttgatggtgtcctatttgctcgcctcgcaggacgaggcataa

SEQ ID NO: 29928 - DNA, 6339 bp, Pseudomonas citronellolis
atggataagtatttctctgggctagtcgagcaggcgctttcccgtgccactgagtccaccttgagtatcttgagcattaccgatccgggcttgcgtgagcacctgggaagtctgatgcgcgcggagtgcgggaaagagggtgcattcctggcgccacccttgttcgagcagaccttcggttgggaagagtcggcgttcaccatggagcaactggcgagcaaggagcacttgctgagcaaggagatcgtggcctcgctcgatggtaaggcgaatgggcgttaccgctttggcgcgagttggaaacccttcacccaccagttggccagctggcgctcattgctagagaggaagcattcggtggtcgtcaccagtggtaccggctcgggtaagaccgaatgctttatggtgccggtgctggaggatctttatcgggagtactgtgacgcaggtcgtcagccgctggtcggggttcgggcgctgttcctgtatccacttaacgccctgatcaactcgcagcgcgaacgtttgaatgcctggactcagagctttggaaacggcattcgctattgcctgtacaacggcaataccccggagttgcaggcgaaggtgcgtagcgagcagagccaaaagcctaacgaaattctgtcgcgcgagctgatgcgtacgcaaccggcgcccattctggtcaccaacggcaccatgctcgaatacataatggtgcgccaggtcgatgcgcccatcgtaagaatctccagagagcagaaatcgctgcgctggattgttctggacgaggctcacacttacgtgggctcccaggcggctgaattggcattgcagctgcgacgggtaatgacagccttcggtgttacgcccaaggatgtccgctttgtggcgacctctgcgactattgccggtgaggacgctgcaggacagttgaagcagtttctctcggatctgtcgggggtgccggttacgcagattgatgtctgggggggtaaccgagtcattcctcctcttgctccctgtcaacaaacgctggttgctctggatacgctcgagtccatgccgcctgtaattgcggacgatccagaggttcatccggatcgatacgaggccctggtccattctccgcaagcccgagcactgagaaatctgctggtgaccacccccaagccgttgaagctaaccgagatggtcagccagatgcgtcaggaaggtgggtggtcactgtcacaggacgaaatactacgttggttggatgtgtgttcaggcactcgtccttcagccagtgagccggcgtttctgaagctgcgggcgcacttcttccagcgcactactcacgggttatgggcctgctttgacgagtgctgctcagcaaagtccggaacggcgctgcaacaaaactggccctttggttatgtctacgccaatcagaggcaaacctgcagctgtggcagcccggtattcgagttggcgttctgcaatgactgcaatgagccgcatctgctggcgcgagataagaatggaaagctcatccagtgggaaagctctggtggcgatgaattttccctgcagactgaaacacctgttgaggaagatgcggaggctggtggcgcagggatactttcagccaagacaccgctggtgctttgctcgttcgagaatgccggcagcgcatacatccccgttgaggtcgataagttcgctggttccttcgcacctgtttcagcggaacgggtacggcttggggttagagatcttgatgccaagtgcagccgtaacagctgtggatcgagtggactgcatgggaactctcctttccgccgcgcaatgctgggcggacccttctatgtagccaatgccgtgccgacagtccttgaatactgtcaagactatcaagaggaagatcagacgccggaacacggcccgcagtctctgcctggtagaggccgtcggctaattaccttcacggacagccgtcagggcacggcgcgcatggctgtacgtatgcaacaggaggcggagcgcagcaggttgcgcggacttgtcgtggagattttgagctggtaccagcggagccaggtcacctctcaggtagattccagcagcatcgatccgtcggtcttgcaacaattaatcgccaaggcgaaagaggaagtggagctataccgcagcgttggtattcgggaggaagtcagggttgcggaggaaaaagttacacggtttacggccatgctagcttcagcaactggagcgaaagttaggccgacgctagtttctctagcctggacggagctcgccaatgagctcaagcagaaggctgacctgaaaggctcgatgctgctttacaacaaatatcagaagcccgaggtcttccgggacaatgatggcccctacaagctggcggagatgttgctattccgcgagtttatgcgccgcccgaaacggcagaacagtcttgaaacccaagggctggtgaaggtcggatacgttggcatggataagatccatgaagtgccggagtactgggggcagaaaggtctgacgctcgatgattggcgtgacttcctaaaggtggcgctggactttcatgttcgggagaacagctatattcaggtcgaagagggctggttgagctggatcggtagccgcttttctgccaagagtctgcgtaatcccgagtcgaaagaagcggatgagatccgggtcaagcgctggcctcagatccgcaatggcaaccattcccagcgcctgatcaaactattgttgcttggtgctggtttgaacccggctaacacggccgacgttgatctggtcaatgcctggctaagagctgcctggttgcagttggccagaccgggctcagcgctgaaggctgacgaaaaccggtactacctacccagagagcacatgctgttctcgttggttgaccgagcctatgtctgcccggttaccaacaagctgttggataccaccttcaaaggctttacgccttacctccccgctcacctggatttctctcagttgactgaagagcagcgcaagagctatcaggcagcgccggttgagctacctgacctgtgggagtttgaccgttctcaggacgattatgcgccgggacttgcgcgagttagagaccagatggcgaatgatcgtcttgtaagcgatctgcgagcacggaacctgtggacggatatcaatgatcgggcagtggaaggtggcttctactaccgcacagcggagcactcggcccagcagtcttctgaacgcctcggctcctatgaagagatgttcaagaaggggcagctcaacgttctgaactgctccaccaccatggagatgggcgtagatattggcggtatttctgctgtggtcatgaacaatgtaccaccgcacccggccaactacctgcagcgtgccggtcgcgcggggcgaagcaaggaatccagggcgattacctacacgctttgtaagaacaacccgcatgatcagcaggttttcgccaatccgagttggccgttcgagaccaggatccccgcgccagtggtggcattgaactccgagcgactcgtacaacggcacatcaactcgctactgttggcggactttctctgcaatgttgtcgggcccactcagactgagaaaaccagtctgaatacacagtggttctacgacgatgagcacggtctctcacaatgtgaccgattcattgagcgactgggacaagttgtctccgatctggacgacgcgctcaaagacttggtgaaaggcacagctctggtcggtgtggacccggctcagctgcgccgtcgttcaatcgattcgatcaagccgctgcagagtcgttggctgaagagctatcgcttcttactttctgaggagaagcacgcgaaagccaacagcccctatctgaagcgtctccagattgaaaaggctcgccactgcaatgagtacctgttgcgggatcttgctgcgcgtaccttcctgcctggttatggcttccctaccgacgtggtgaacttcgataacttcacgattgaggattacatccgcgagcaggacgcagggaaaaagttgaagcacgatcgcgaggataacgtatcccgctacaaggggctgccgtcacgcaatctgtcgattgccattcgcgagtacgctcctggtgcagaaatcgttctggatggccgggtgttcaggtctgccggcgtttccctccactggcataacctcaatgctgatagcaaagaagcgcagaaaatggacattgcgtggcgttgcgatgtctgtggtgctctggactatgaggaggggttgataaagaccgatgagctgacttgcagcaatgtcgactgccagtcactgatcaagccccaaaacattcgcaaggtcctgcagccctctggttttgtcaccgatgcttatgagtcggcctccaatgacatccagcatcagaaattcatcccagttgaaaccgcctgggttttcgtcaacgccaacaagactccattgccaaacccggcggttggggcaatggcttatggtgcggatggaaaggtcttccatcacagctcgggcgagcacggaacaggttatgccttgtgcatgagttgtggtcgagctgagtccatgcaaccggatagcgggttcccgcgagacctgtcgccgtctggcgagcactatccgccgcgcccgactaaagaggacaaagatcagaacaacaagcgccttccctgccagggcagcgggagcattcttcctagtgtgagccttggcgctgtagctactactgatgtgtttgaactcaccttgcaccatcccgtgcgcggggagttcattgcagactcagcgcagggaagtgaaattgccatgacgctagcagtggctttgcgggctgcgctggccgagatactgggcgtatctgcttccgaattgggttatgcaactcggccaagcaaactgccaaatggacagtccattcgcgtccttcagcttttcgacgtaatcagcggtggtgcgggctttgccactagcgcgccgctgcatgtcgaggagctgctgtgggggatggtgaagaagctcgattgcaagcattgtgaaactggctgtagtgagtgcctgctggactcccaaacacggcatgatcacgacaagctggatcgcaaggcagcgctcgactggctgggcccagacttcattcatcacgtgggtttgaccgccgaaaacaaactctcattcgccgatggccagtatgcgcctggcagcattgagagcgttctgcgccggctgatcaacgagggtgcaaagagaattactctagtggcctctggtgatgtggcagagtgggatcttcttgctccacagtttcgtaaggcgattcaggcctatgttctggccgacgagctgactgttgagctgctcgtcccggcagatatcactgatggggttcttgtgcaggatctccagcgcctgtcggaccttggagtaaacgtcgggaatgcgatcactgagccaggtgagcatctcgttgcccaggtgtttaaagagagcgaagttgtcacgctggcctcgcgcagcctcgtggcaactgttccaggccgcagctggcatcaaagcgatgagctagtcgtactctcgaaaagtcagccggaatttggctggcaggcgatggatctttccagtgcagcgagcgactccttcggcaaggtagcgatcgtcgacatctcaatccatgaggaactcaatggaccgctgctgcaattcggtgaacgtttctgggagatgcttggcgctagagatcagcaagtcgctgacgtgattgcgactgcgaagatcaacaggctgatctactcagatcgttacattcagaaccccgcggccgttacgatcctgggggcggttctgagagatctgaaaagccgcatttctgcggatgcggttgtgcaggtgaagacactattcaaatcaggtcgaatacaagggcgtaaagcctttgatgactgggcaagtcaggatgatttcgagttcttctcgcgcaattggctgtcggcaatggttggacatcaagttgagctggttgtggagttgtcgaatcgcgaaatccctcatcaccggaggttagagcttgagtttgaagacggcaggactctgaaggtcagattcgaccaaggggtcgcttattggcaggttcgcttcagctcgcatagcgacatgtggtttgactttgacatggctgtccaagatcagctaatacacatggccaggttggttgaaatggctcggatacaaaactctgagcagaagtgggcgacggatgtgctggtggagctaaagggctggtaa

SEQ ID NO: 29929 - DNA, 3336 bp, Pseudomonas citronellolis
atgtcgtactccgtaattaagtgctcgtcctggctgggacgctttctccagcgtcgtgggctttcagcgcctgatcagcgcggactctatgcgtaccactgcagtctcgaagagtacggagagctgcagcatttgctccgtgagttggggggctttgatgccgcgttaaaggaccccgcagcctgtgcctgtttggtgctttttggttcggagtggtatcgccgtgagtaccgcagcgagtatgcctggacctgggacccgatctggaaagctttgggattcaatctgtcgccgggtgagctgagcaaggccattccaaaagggttggaggggtattggaaacgtccccttcatttctacgaagcgggtcatcgggactttctggggtcgctgtttggtgaggggggcttgccctttcaggtattgcgcgagggaggcagtcgcttccagtcactgtttgatcgtttgctaaggcagtacgaccagtggcacctgctggggttcaacactctccagcaggtggagcagcaactggaaaaggcaagccttcctcaagtgtttgcctcgcgtacgtccgtggaactgattgcgcgcatggtcgatgagcttgtggctctggtacgaaattatgggttgccccaggtggatgagcctgtcgcccgcctggatgcgctgaaccccaagtggcgtgaattgttccctctgcctctggataacgagactggcagcgaactcctcaatggtcttttaaagactgcgaccatcgagggtaaaaagcgacgccgagatgctgctggatggtcttgccgacacttctggcatgaggcccagcctgatgtgctcaaggttcaggtctcgatgccggaggaggtagtgcttcgtctgacgacgcagccatctaccacccgttttgagctggccattgtcgaagatggacaggtgattgctgcgcttggccccggctatgcgctggtcgacaacggtgtcgcccatatccggttgcgcgtccgtgaggtgattggaaagcggcaggattgcagtgctcaactgagtctggtggctatggcaggcggcatgctgatcgccacccagccgatagagggcagtgcagtggcccttggcgaagtaccgttgggtttcgagccagtgaatgatcgctggcagctgtgcggtcaggcttcattcaatacggcgggtgaagagctgctgctggtgctgccagacggtggcaagttgaacatggctgcagagggcgaggaagccatcttcagcgatatggcaccggctttttcgctgcatacggtaaaggttcagggcaaggcgcagttccaggttgagagtgatgaactctaccggatacgcatgggacatgcggttggtatgggcttggggctggaactggctggtacccagatcgactggccgaccaagcccgcgctgacctttgtcggtctgcctcgtgtgcagtggccgaccgttgccggggaactgcaacagcagggcggtgacttgtacgttgccggcaaacagccgggaagcggcttgttgcaggatgtactgggtacccaatatgtgtcggtgcgcaaccgcagcggcgatgccttgctacgccgccgagtgggcatcctgccgacggatttccgtgttgagctgcgcagtggtgagaaaccggggcaggggagcattctggtgcattcccggcagcgctgcctgcttcagattgttgacgacagtctgcaggtacagcaggtaaagcatgaggatcacaccgagcttaggctcttggcaaagggctttcctccagtcagggtccgcctttcagttacccccagcttgatggctgacccagtggagattgacctgccgtttcccaactcgggttctctggcctttgatggcacaggcaaacagctgaagcgtgatctcagcgtcgacgacctgttgggggcgcgtttgtatctgtttggccgggctggcgcaccaacccgctttagccttgagctgaccctcaggggtagtgcggccaggaatgcttgttacagctggacctacacggcggccgaaaagccgctggagatcagtctgttcaatatccgtgaacagattgttgacctgctttcgcttcagtcgggaatcgatcaggtcgtcgagttgcgggtgttcggtaacggtcaggacgccagttaccgcatccgtaggtattcgacggagatgcaactggatcgcgaccgtcagatgctgtgtgctgccaatctgcacgatggcaccgacgccattcccgaaccggtgttgatgctattgcatgatcctatgcgtagctccatcgcgctcagttcccgcaccagcgaaggtgtgcccaccggcgacttcgagttacctattgctgttgaaagggatggtccctggctggtgttgcccaaatcaggctcatctgtgtcgttccggccgctgtttatcgctggtggctggcagcctttggcgccgagcgatgggatccagagtctgcaaaaggcagtattgaccttcgatcacgcttcacctgttagctctttcacgcctgtgttggatgctatggcggttaaccctatgcatagcggctggcagtttttgcgggccttgtatgaggggtacggctatctgcccctggcgaccttcgaggtctggaaggctctggtagggcacacccgcgcgttggcgatggcacttttcaagtttgagatggaagcgaaattccttggtcggctggaggctgagtttccgattttctgggagtttcttcctattgcagaaatccaccttgcggccaagcgcttcgctgcattccttaaggtgaaaggggtcgctgaggaagccattgatgctctgatcggacgaatgttttcgcgattgggggaaacctatccagcctacgggcagagtgtgcagcgcttcctttcaggcaagcctgttggcccagagatcaaggtgccgctagcgactttcaagagtgtcctgcatggctggtaccttgagttgattcgcgagcgcagtgaggcaaagtggccggagttcggcggcgagcggctggtacgttggcacagcagccaaggcggctcggtgattgccttcaggtcggaaatggattaccgcaatgcggtgctctatctaccggtattcgccgctgcggtcgcctgtggcaaggctcggttcacagatgtgtttgcggacggcgtcgaggcgattttcttcttgcgccaggtccgcgatttcgattcgaagtggttcaactcaatctatcaatattgcttgttgaacagcgtcatggatatgcagaaggcagagtcggttaatggataa

SEQ ID NO: 29930 - DNA, 6222 bp, Pseudomonas coronafaciens pv. atropurpurea
atggcttattttgaatcactgatcactgaactcaaaacccggagcacccgggcgatccagagtctcctctcgctcgaaagcaaacctcttcgtgactttttgagcgagaagctggccgcaacacccggatcaaaagatgctctgctggccgaccctgtgtttgagcccaccttcggatggctcaagagcggcgcaaccttgcagtccttgtcaggcgggctgctcagctcacaactggtaaagtgcatgcagcggccgcccgcagtcttcgccgatgaatatacgtttccaggcgataggcagatctttacccaccaactggaagcatgggagatcttggggcaggaagaaccggcatcccttgttgttaccagcggcacggggtcgggcaagtccgaatgctttctcgtcccaattctgaacagtttggcccgtgatatcgaacgcaggggtagactgcagggtgttcaagccctttttatctacccgcttaacgcgcttatcaacagccagcagaatcgtctggacgcctggacagatgggtttgacggtgatctgcgctattgcctttatacgggtgctctagagaacgaagtcaagagcactgcaaaacagtctgcgggccatgtggcagatcgtacctcccttcgcgcaagcgcccccccggttctcgtcactaacgcaaccatgcttgagtacatgctggttcgtaaggaagatgcccccattcttgagcagtccaaggggcagcttcgctggatcgttctcgacgaggctcacacttatgttggctcccaagctgccgaaatggcgctcctgctacgtcgggtcatgctcgcgttcgacgtagatccgcttgacgttcgcttcatcgccacctctgcgacgtttggttcggataaaaagaccgttgagtcgctgcaatccttccttgctgacatggccggcattgaacccgaccagatccatgtcgttcatggttcccgacacgttcccgaaatcgcgcccctacagacgcaacattcctcgaatgactccattgatcagctgatggaaatcgggagcggtcaggaaatcagtaaagagcggtatcacgcgctcacgcagcatccattggcacgccaaatccgaactgcattcctgaaaccagggggtactcgcgtaaacacgcttgcagatcttcatcgctcgctaaatgcagacgtaagccccgccgacatcttgaccatgctggacatcctttcaggcacgcgaagtggtaccacggatgatgacccgttcttccttcctctgcgcgtacatctgtttcacaacgttttgtcaggtattaaggtttgcatcgaccccaaatgcgctcaaaagcttcagaccgtcctggacgcgcccgagtggccttacggaatggtttacaccgctgagcgcttgagctgcgattgcggctgtccgttaatcggcctagtcagttgcaacgactgcaaccagccatttttgcttgcacatcgacgtggcaatctttcgctggtaagtgctgacgatcattcggaagatgagttttctatcaacctggatggagaagccgagttggacggggatgagtcctccagcgccacctcagatgtgcatatgctgatcgtcaaccgcgtcgctggcgttcagacggagagcctttggttcaatcccgtcaagaagcaggtggaagctcacgcttccacacctgatgccatcgggatcagggtcttcaatcagattcagcgtgaccaatgtccttgttgtgcgcaggaatcaccttcaggccgacaatttcgcagagcgtctattggcacacctttcatgctgagcaccgttatctcgacggtgctggagttctgccccgaagacaggaatgatcctctcaacaaacccttccgcggtcggaaaatgatttcgtttaccgacagcagacagggcactgcccgaatcgcggtgaagctacagcaggactccgaacgaaatcgaatccgcagtctggtgtaccactcgctgctaggcgcgacgccatcagcatctttgcccgaagaagacgagcaggatctgcaggattacctgcaagaagagcgcgcaggtactatccgaccacgtgatgtgcgccggctgcaggagttgaaggatcgtaaggccagtttagccaagggtgtagaactgccttggacggagatggtcagcagcttgacaacaaacaaggacttgcaagagggattactgcgctattacaacacactgtcaaagatcgcgtttcctgaaaccagtggtgcgagaacccttgcaggggtgatgcttgcgagggagtttgttcgtcgccccaaacgacagaacaatctggaaacgatgggcttggtggagatcacctaccctgcccttgcgcacgtcgtcaaagccccccttgagtggcctacaggcaacattgtgagctggcgggcctacctgaagattctgctcgacttttatgttcgcgagaacagcttcctgcaccttgaccaggagtggcaacgtttcatcggcgcaaagatcagcccaaaatggctcctcgcaccaacctccaaggaaaaaaacacttcaaggatcaagacttggccgcaggttaatctaggttctaagcgccaatcgcgaccaatccagctcctctgcaatgctttcagctgggacgcgcaagataatcaggacaagatcaaccaccttcttcaagaagcctgggttgccctgacgacgacttcgacgattctgcgaagcagtgaaacaggctatcaactgcaccttgaatctctccattttcgattgagctccgacgtgtttctgtgccccatcacccggcggctcttggacacctcgttcagcaacctttctccttattcagcgcctggcgggcagaatcctttgcggccaatacggcctgtctcaatgcctcgttatcctcaggcattcggcggagatgtagatgcttcagagaaaatcctcaacgcccgcgcttggctaaattcagaaccacaggtgatcggactgcgtgatgaggggctttggtcggacttgcatgaccggattatcgagggggcgtcttacttccgtaccgcggagcactctgcccaacaaccgaaagccaagctcaaatcctacgagactcagttccgttcaggtcacatcaatctgttgagttgttcgaccaccatggagatggggatcgacatcagcggtatcacggccgtcgcgatgaacaacgtaccgccccagacggcaaactacttgcagcgggcaggccgggcgggacgacgcggagaaggacgcgccgttgcgttaaccatttgccgcaagacaccccacgaccagcacgtgttcgctaagccccgctggccgttcgatacaaacatgatcattccggccgtctccctgcgaagccctgacctggtcgcgcgccacgtcaattcctaccttttgtcctactggctcaagacagtattagggcgagaggagctcaaaagcatgaccataggccccttctgcatcgaggaacgaggcgattcattagcgggtcgattcgaagcgtggtgcgccaataccgcgggcagcttgcctgcggtcatcaaaggtatcgagaagctggttcatcgcagtccgctcgtggacatgaatcctgaaacgctaacccgccacaccgcagccgccatgcgagatgccgcgcagagctggagagacgactataccaacgccagccaggaactcggctacttcaaaggctgctcagaaaagaaaagcgcggcattgcgcgcgctgaacgctcagctggaacggatcacgggggagtacctgctgagtgagctggcaactcgccggttccttccaggttacggtttccccacggacatcgtcagcttcaacaacataatcagacagccgcctgacaaagcgcgggaatactcacgcgaagataaccgcggacgctatctggatctcgcgacacgagaccgtgtaaccgggctgcgggaatatgcacccggcgccgaagtggtcatggatggattggtttatgagtcgcggggcatctcactcaattggaggctccccgcgtccgaagaaatactgcgtgaagcgcagcttttcaagtatgcgtggcgttgctcacattgcggcgcaagcgggagtacgttttcgcaacaaccgggcgactgcggacagtgtggaagtgctttggacgagcaggaggatgttctgcgctatttggtgccttcaggattcgctgtggacttctacggcaaggatccacacacagatatcagcaagcctacctatatccccgtccagcggccttggctaagcgtaaacgagccttggttgacgctcgcgaatccagccaatggcgcattcagagcaagcgccaaagcacgcttgttcaaccatactagcggggatggtgggcaagggtttgcactctgcctggagtgtggtcgtgccgaggcaatgcttaagtaccctgacgagcaagctgccaaaaacgagaaatttcttccgcacaaatttcgcagcggcgaacaacacagaaggctcaggggcggtcgcaccgacgatggtgagagcatttgcgcaggcagctccgacagctggaaaatacaacgcaatgttcatttaggacatgacagtgtcgcagatgccttggaagtgatgatccgtaaccctatgacgggcgagtatctcaatgacgaaattgccgccttcagcattgcggttgctctgcgcgatgcaattgccgatcaaatgggagtgatgtccgacgagctcggttttggtaccaagcacgttcagtggcaacgagagcccgttcgactcatacaagtattcgacctgcgcagtggcggctatacgtcccaagctgctcacctgatgaacagcccagttctttgggataatgtgttggatagcctttcatgccattgcaccggcgcatgccaagaatgcttgatcggatttgacacccgatttgatggcgaaaagcttgatcgtcacaaggcgttggaatggatatccaaggattggagagcattcctcgcacttcccgatgacgaagcggtattcggagcggattctgtcgctgaaacctcaacgcttcttgaagctgtagagcggtatcttgcacaggataaatacggtgcagtgaccctctaccttcaaggccctgtttcgctctgggatctgcccatggccacagtgttgagagataaagtgctcggctggcaatgccatagaaagatcgatgtaacgctcatcgccgaaaaaggcactcttgccctgctcgatgaagccagtcgttacagcttggcgtcctgggtcgacgtaggcattacctacgaggaaagcgatccaggccgcatgaatcttcagggcggccatcacttgttagtcgggctgagcggtatagacggcgaactgacctgggcaagcaggcaaccccatataggcatcgccaaccctcactggggagaaagcgatggggaaagcccactggtgcgaggattgctcagccgtggatccgaacctacccgtccctacaccctgagtgaaataagacccaaaactggtgacatcgaggtcgatatccacaaggatttggatggaaccatcgcccgattcggcgaccggctctgggctctgctctgtgataagtcgccggggttacgtgcggccctggaagggaatgatcccctccaatctgtggcatatactgaccgctacgtggtatcgccattggcagccgctttgctgctcgaagccctgacggccctgagagagcgcgcgacagtggagtctggcacgttgcctgtcgcaataaccggcagagaatttgagtcgaaaagccgtgcgcctcagcggatttggcatgactggctcagtgatgtcgatcgtgaccacgcgcttcaggaagctctggattacgtaggctttgaggctcaggtcaggagtgagccaggcatcgaacatgggcgcatgttgaagctggttttcgagtctggcaaacaaatccggattcgtctcgatcagggcttctcatattggcaagtggatcgcaacatgagtcaccggcagcagcagcttttcgacttcaaaaaagactcagttgagcagggtaaggcgctgcatgacattgccgtcgtgttgactgcgcccgagatcggtaatacacagatatttataggactgtaa

SEQ ID NO: 29931 - DNA, 3477 bp, Pseudomonas coronafaciens pv. atropurpurea
atttcgctggaaatttggcctagtaccgctgcgccccagatggctagcatagtgcctgcctttgcaaaatggcaattaggatggacacgaatggaatcaagtgtattgacgcggtctggcctgcgagattggctacaggtgtttgctaaagcgcgaggtgctgagcaaccgacaggttccgcgctgtacgctctgaaggtaacggatgatgagtttgcgtccctgcgcaatgaactcaaacatcaattcaccggggcatttcagcccgccgagccctcaacatatgcagcctgctggctgctctatgccgcagaatggtggaagcgatgctatggaggcggtgcctgggcatggaagccactcttcgatagcatcaatgcgcccgtaccatcgcatcaacatattcagcagttggttgcagcaggcagaaaatattggcatctcgtaggcgaaatgaatggagggaagcgatacattggtgaggtcgccattcagggcggacttccccttcgcttaattgagactgcgcaaggaaacgtatctaggctgcttcacgcagtgctgcgtcagacgatctcattcgatctgtcctcagccgcgataagggctgaagtccaaaatctgcaccctctccttccccgaagctatcgtcaacctgcgatctacgacttgctgggtaaagtggtagatgtcgtcaaggatttgcggcatcgctacgcgctcaaaggcgccgatgatcccatcatttcccttcagcgagcttaccctgaatgggccgacgaattcccgctgcgcatagacggggaagcagcatcacaactgcttcgtggcttggtacgcgaagcgggtgaaactgagcgatgtgatcgccgtatacccttttggatgcgacgccaattgagcttcgatgttgacggctcgtgcgttcttgagaccagggtcgaagtgctgcccacgagcacaccagccattgtagcgcagctgttcggctgcgcgccggaacaactgcctgcgtcatttcaaatctcgttgatcgtaggcggtaatcgctttgcgttagctgagtgcgtggtgcgtagccaaggcatacgcatggctgtgcagaacgttcagctccctgatgattgccatatgtcctttgcacagctacagctcagccggtatggagaaacactccacaccgccatgctccccggcggcgaaagactggaagaaaacgcaccgtgggtattcgaaaacacattccctgttgcccggttgctgaaggtggggagcttacgtatcggcgcacctactgccctagcctgcatccctggcgccgcatttttcttcagtgaagaaggtgaattcgagtccagactcagccccgtggatggcagatcgctgaagctgctcacctctggcacctctcgaatgtcatacaagggcgatgtgtatcgtatccactgtggcgttcaagggaacgaaagtgagctgctgcagtggcgcggccgaattctcgacgttcaagcggaacctgcatttgtatatgcaggcatgccatcactacaccgcgttcacaaggatggctcctcctcgcgcgtaaccgatggagagatagtgtggagcacagtcgctggcgaagaacgcgtcgtttcggacgcacgcccggcattggggatgggcacgttgtcatggaagctggataaggaaactcagatccgccagacagcagtatgcctacccagcaacgccgtgatcgaatccgaagcgggttcatctgcttcgaccgggataattcacctgagaggctggccagcacaggctgttgtgtcagctgggaacgaatgccatgtggacgcatctccagatggcatgtcctggcgagtagcagtaaccgcgcagcccaaccagattccctcgcacgtcagtctgcaactggcgtgggcgggtggaagaacgcagaagataaccctgccgtttcctggaaagggcgcagtgtttcttgattcggcaggcacgcgcctagcatctgatgcggagtttgacgtcaacaatctcctgggttcgcgcctcacactgatgccaggccgccatggtgtcacttggaaggtgtgtttgtcgttgaagtcaaaacgaggcggccaggagttggcaactcgtgtgttcagttatggtcgttcctgcgaggttcggctctttgagttcatgagaccgatccgacaaatgctggcctgcaccgaggatctggacgcgtacgttcagatagaagccttggagggcggctccctgcgtgcgaagctgctggtcagacgttatgccacacggctagaaatcgatagaggcaacggcagcgtgcactatccagcccatgcgctggtgcctgatgaagacgcgctcaagcagcttgatgtactcgcgctgtgcattactcaccccgaagacgggcccgaaactctcacgcgcgcccgatccaaagaagacagcctggagcgatggtggtttaaccccgagaccaaacaagaaggcgcatggctgatctatccggatgcccagtcgcgaaatgcgttcaggcccctcgcgtggagtacgcatgatcaaccaagcgcgcaacctgtcatccctcttgaagggttacgcgcagcactggctgctgagtcctcaggagcgcgcttcgctgcgttgacaactgcggtggacacgatgaccagtgatcctggccatgctgactggcggctgctggaagaactgcttatccatacttctcaccttccgctagcgggattggacatatggcgggttttcgcccgccgccccgccgccatgatcaccgccctggttcacctggaaggattcgccgagcacgtcgcacagcggatcaccgaagagcttcctttcgaatgggtcttagcctctccccaagactgggtcagcagcgtcgcaatactgaggaagtattaccatcaggatgacggcgatcgaggtgttcgcgcgttgaagcgaaacttggaggcgatcaaacaaagcatgagtatgtcgcaacctggcaccgtgcttggaatcgacttggcctgtcatgaagccatgagccttccgactcaggaaacaaagcttttactgaaccacaacgctgtgctcgatgaccatctccttcgagctttggtagaaattgagcacagcccgctccaatcactggtacgccaatctgaccgtggcgacatgtggcctaacgagcttcatcaggacatttctaaattcatcgggagcgcgtcaggcaagtcgatcctctccaagtttccaccggtattgggagatttcaagcggctgacaatcgcctttcctatgtgggtcggttacgaggtcacccgaggcgctgcccgcgactggttagcgcgaccagacaggctgcatgcacttcgaacctatcagagctttgatccggcatggttcgatgcggcctaccactattcgctcgttcacttcttcaaaccggcataa

SEQ ID NO: 29932 - DNA, 6336 bp, Pseudomonas endophytica
atggataagtatttttctgcgcttgtcgagcaggcgctgtcccgcaccacagaatccaccttaagtattttgagcattacagatccgggcttgcgtgagcaccttggagggctcatgcgagccgagtgtggcaaggagggctcattcctggcgccacccttgtttgagcagaccttcggctgggaagagtcgccttttacgatggcgcagttggcggctcaaaagcagctacttagcaaagagatcgtggcgtcgcttaatggtaaagctaacgggcgctaccgctttggatcgacttggaggccgttcacgcaccaattggcaagttggcactccctgctggaaaagaagcactcagtggtggtcaccagcggtactggctcgggtaagaccgagtgctttatggttccggtactcgatgatctctaccgggagtaccgcgatatcggcagtaagccgcttgtgggtgttcgagcactctttctctatccgcttaatgctctgatcaactcgcagcgtgagcgtctgaatgcctggacacagagctttggttccgggatacgttattgcttatataacggcaataccgaggagttgcaggccaaaaaacgcaccgagcagattgaacggcccaacgaaattctgtcgcgagagctgatgcgtgagcagccagccccgatcctggttaccaacggcaccatgcttgaatacatgatggtccgtcaggttgatgcacctatagtgcgcaaatcgagagagcagaagtcgctccgctggattgtcctggatgaggctcacacctatgtaggctcgcaggctgctgagctggcgctgcagttacgacgcgtgatgacagccttcggtgtcatgcctaaggatgtccgctttgttgcaacctcagcaactatcgccggcgatgacgctgccgagcaactgaaacagttcctctctgatctgtcaggggttccggtcactcagattgacgtctggggtggtaagcgggtcattcctgagcttgcatcgtgccggcagaaaccggttactttgcagcagctcgagtctatgccagctgcaaaccaagaggatccggagattcaccccgaccgttatgaagcgcttgtgcattcgcccatagctcatgagttgagaaacgttctggtaagcgctcccaaaccgttgaagctgaccgagatggccagccatatgagtcgatatcaggggcagtcgttaacacaggatgagattttgcgctggttggatctgtgctctggcactcgacccaatgagtctgagcctgcgttcttgaaactgcgggcccacttcttccagcgcaccacccacggtctttgggcttgcttcgataagcactgttcagccaaacatggtacgccgctacgggagaagtggccctttggttatgtctatgtgaaccaacgacaagcgtgctcctgtggcagccctgttttcgagttggttttctgcaatgactgcaatgagccccatctactggcgcgagatcatggcggaaagctaatccagtgggagagttcagctggggatgagttttcgctccaagctgaagcctcggttgaggaagatgcagatagtcctggtgggaatctgctaaccaagactcctttggtgctcggtaccgttaacagtgacggcccgtcgtatatccctgtcgagttcgataagcatgcagggtcttttatgggtgtctccggcgagcgtgtgccgctgcgcatgaacgacctcgatgtggtttgtagccggaaagactgcagctacaacggatatcaaggtgctttcccgttccgtcgtgcgatgttgggcggccctttttatgtagcgaacgctgtaccgacggttcttgagtattgccaagactatcaagatgacgagcaaaaaccggagtttggcccgcagtctttgccagggcgaggacggagactgattacctttacagatagccgccaaggtacggcgcgtatggcagtgcgtatgcagcaagaggccgagcgcagcaggttgcgtgggcttgttgttgagatcttgaactggcatcagaaaagccacagcaatgcccagacaccatcaagtagtgttgaaccagaggttctacagcaactaattgctaaagcaaaggaagatgtgaagctataccgcagcctaggtatcaaggaggaggtcagggttgctgaggacaaggtcgcgcgctttacggcgctgcttgctgcggccactgggttaaaggttcggccggagcttgtgtccttggcttggtcagagcttgtgaatgagctaaaacaacgggccgatcttcaagagaaaggccctatgctgcttgcgaacaagtatcagaagccggagatatttaaacagacggatggaccacaaaagctggctgagatgctgcttttccgtgagttcatgcgcaggcctaagcgccaaaacagtttggaaactcaagggctggtgaaggtcagttatcttgggttagaaaaaattcaagaagccccagcctattgggagcagaagggcctgaggccggacgattggcgcgacttcttgaaggtcgcgctggacttttatgtgcgcgaaagcagcttcatccaaatgactgaggagtggaaagactggattggtagccgtttctcttccaaaactttgcgcaaccccgaatctaaagaagctgacgataatcgagtgaaacgctggccgcaaattcgtaacggcaaccactcacaccgcttggctaagctactactgttgggggcaggtctgaatccctcaagctcatctgatgttgatttggtcaacgcctggttaagagacgcctggctacagttaaccaggcctggcgcggcgttgaagtctgatgagaatcggtactatttgcccagagagcacatgctttttttgttggttgatcgagcatttgtttgtccaattactaacaaactgcttgatacaaccttcaagggatttacgccttacctacctgcgcacatggacttttcgaagcttacagatgaaaagcgtaaaagttttgtttgcgagcaggttgagctacccagtatttgggagtttgatcgttcgcaggaagactatgcgccgggcctggcgaaaatcaggacccaggttgcggcagatgctcccatcaacgaattgcgtacgcggaatctttggacagatatcaatgacagggcagttgaaggcggcttttattaccgcactgctgagcactcggcgcagcagtcttccgagcgcctcggctcctatgaagacatgttcaaaaaggggcagatcaacgtcctaaattgttccactaccatggagatgggtgtagacattggcggcatctccgctgtggtgatgaacaacgtaccgccacatccggctaattatcttcagcgtgctggtcgggcaggccgcagcaaagagtccagagcactggcttatacactttgcaaaaataatccgcatgaccagcaggtttttgccaaccctagctggccatttgaaacaaaaatccctgcgcccgcggtagcgctaaactccgcacgtcttgtgcagcggcatgtgaattcaatagtgctgtctgacttcctctgcaatgtcgttggcccgactcaaactgagaagaccagtctcaacgctcagtggttctatgacgatacgaaaggcggctcgcagtgcgaccgctttcttgaacgtttggggctcgctgtttgcgacatggatgaggcgctttcgctattggtcaagggaaccgccttggcagggataacgcctgatcagctgcgcaggcgctcaatagatcagttaaaggcgttacaaggccgctggttggcgagttaccgcaatctgctttcagaagagcagcaggcaaaacctaacagcccttacctcaagcgccttcaggtcgagaaagcacgccattgcaatgagtacctgttgcgtgacctttctgctcgcaccttcctaccgggctacgggtttcctactgatgtagtcaacttcgataacttcactattgaggattatatccgtgagggaggagccgagaggaaggtaaagcgcgaccgtgatgataatgtgtcccggtataagggacttccttctcgcaacctggcgattgccattcgagagtatgcgccgggagccgagattgtattggacggacgagtctttaaatcagctggtgtttctttgcattggcacaatctaaacgctgataccaatgaagctcagaggatggacatcgcttggcgttgtgacgtctgcggcgagctcggctatgaggagggcttggtcaaaagtgatgagctgacgtgtaccaacgatgaatgcctcgccatcattaagtcggcaaatatccgcaaggtgctgcagccatctggttttattacagatgcatatcagtctgcgtcgaacgatatccagcatcaaaaatttgtacccgttgaaactgcatgggtttttgtgagggcggcgaaaaccccgctaccgaatccggcggtgggagcaatggcctatggcacggaaggccaggtttttcatcacagttccggcgagaacggtgctggttttgcactatgcatgagttgcggtcgcgcggcatcaatgctgtcagcagatgagttcccgccaagcctgtccccatccggcgaacactttccaccacggcctagcaaagctgataaagaccaggacaacaaaaggctgccttgccaaggcagcggtagcatcgttcccaatgtcagcttgggtgttacctcctttactgacgtgttcgagttgatgctgcatcatccagtaagtggagagtacatcgcagataacgaccaggggcgttgtgtcgcaatgactttggctgtggccatgcgttcagctcttgccgagatactaggggtttctgcctctgaacttggttatgcaacccgaccaagcaagctggaaaacggccagcccatcagaattttgcagctttatgacgtgatcagtggtggtgcaggcttcgcctcgagtgctcccttacatgtcgaaaatctgctgagcaggatggttaaaactttgcattgcgatcattgtgagagcggttgcagtgaatgcctattggactctcagacccggcatgatcatgacaggctggatcgaaaactggccaaggactggttgggcgatgacttcgcccactacgtcggcctttccatggaagataagctgtccttgccagatggaaaatatgcgcctggcagtatcgaaagcgttttgcgtcgcttgatcaatgaaggcgtggagaaggttacgctggtagctgcaggagatccgaatgaatgggatctacttgccccgcaattccgtaaggcaatccagcgttatttgaatattgatgaagtggcggtcgagcttcttgtgccggatggcatcaccgatgaagatcttttgcaggacctgcagcgcctttctttacttggtgtaagtgtcggctgctactcgtctgattacaaaaaccatttcctcgtacaggcaagcaaggcgggccagataattacgcttgcctcgcgctcagaattggcagctatgccaggtcgttggtggcatcagagtgatgcgctggtggtggtttcccagtctcaaccagcactcagttggaacgcatttgaccttacaatagttgggagtaaacccgccgacagtagcctaatcatagacttaccgattcaccaagaactcaacggtcctttactgacatttggcgatcgcttctgggcgcttctcgctgagaacgcgcaaattgcggacgtgctggaaactgcaaccatctgcagaatccggtactcggatcgatatatccaaaacccatccgtaatcgcgattctgggtactttgttcaagtttcttaaagggcgtattgctgatgatgccgagcttcaggtttctacgttgttcaagcttggaaagctgcaaggccgcaaggcttttgatgattggtccagaaaagacgatttcgaattcttcgtcagtaaatggttatcggcgatggccggtcaaaccgtaaatctcgtgcttgagacctcaaaccgtgacatcccccatcggcgccgacttgatttggagtttgaagatggcagaagcctaacggtgaggttcgaccaaggaattgcctattggcaggttcgttttcgctctcatgcagatatatggtttgactttgatctcgaggcccgtgatcaagtgatgcacatggctaaagtggttgaaacagctcaggtgcagaactcagagcagaagtggtcgacggatgtgcttgtggagctcaacggttaa

SEQ ID NO: 29933 - DNA, 3336 bp, Pseudomonas endophytica
atgcctcaatctgtattcaaattctctagctggctcggtacatttcttctgcgccgaggtgttcaggtccctgactatcgcggcttgtacgcctatcactgcagtcatgaagagtatctagacctgttgcaccagctcagggagttaggaaccttcgacaaggcagtaaatgacacagctgccagcgcctgtttggttcttttctgctcagaatggtaccggcgtgagtaccagcgcgatcatggctggagctgggaaccgatatggaagacgctggggttcagtctatcgccgggcgatctaggcaaaacgattccaaaagggttggagcactactggaagcggccgatgcacttctacgagtctgagcgtagggattttctcggctcattgttcagtgagggcgggctcccttttcaagtactacgtgaaggtggaagccgttttcacgcattgttcgaccgaatcctcaagcagtatgaccagtggcatattctgggctatagcacggcgcagcaagtagagcagcagttggagaaggcgaacttaccgaaggtattcgcctcgcagacttcggtggagctgattgcgcatatggccgatcagctggtgtccttggtgcgcgactatggcttggggcaggcagccgagcctgttgctcgcttggatgccatgaatccgaaatggcgtgagctgttcccactgccgctggataaccaaaccggcagtgagttgcttaacgggctgttgaagactgccacggtcgaggatggaaaacgtcgcaaagaatctagcggttgggcctgtcgacactttttgcacgaagcagaacccaatgtgctgaaggttcagatatcgctgccagcagaagtggttttccaattagctataccgccgtccaccacgcgcttcgaacttacgattttggaaggcggtgaggctattgctcgccttggccccggttatgcagttgtagacaagggtgccgcccggattaggttgcggcagcgtgaggtaatggggcggcgtggtgattgctctctgccactgagcttggtggctatggcgggtggcatggttgtcgcttcattacccattgagaatagcaccgtagcactaggagaggttcctgtgggctttgaaccggtgaatgaccgctggcagctatgtggtcaggcatcattcaatagcctcagtgaagatctattgcttgtgctaccgcccgacagcgctttgggccaggtagatgacccgggcgatgtcagcatcaccgagatatcttcggtgctagctctgcgtacattcaacgtacagggtaaagcggagttcaaagttgattgcgaagggctgtacagaattcgcacaggacactcagctggttcgggcctcggactggagctggcgggtagccagttaggctgggctacaaaacccgcacttacttttttaggtctgcccaaggtgcaatggcctggagctacagataagctgcaaacacaaggtggggatcttttcgttggcggcaagcaacccggtaacagctcattacaggaaatgcttggcgcccaatatgtagcagttcgcaaccgcggtggcgacacgttgttgcgtcgtaagatcggtatcctaccggctgacctccgtcttgaattgcgcagtggcgaaaggcctggtcagggcagcattctagtgcatacccagcagcgttgcttgttgagaatagtaggcgacggtcttcacactcagcagatcaagcgggaggatcatgtcgagctaaaactttcgacagagggtttgccgccgatcagggtccgtctttcagtcacgccaagcctattgtcagatccagttgagattgagctgcccttccccaactcgggctgtctggcgattgatggtagaggtaagcagctcaagcgtgatatcagtgttgatgatctgctcggcgggcgtatttatttgtttggtcgccatggcgcgcctaccaagttcgggcttgagttgactctcaagggtaataccgcaaagaacgcttcttacagttggtcttatacggctactgaaaagcctgtagatatcagcctgtttaacattcgtgagcagattgttgatctgctttcattgcagtctggcatcgatcaggccgtggaactgcgggtgtttggtaacggccaagacgccaatttccgagttcgcaagtacgcaacggagatggtgctggatcgcgatcgtcaggtgcttctcgcctccaaccttcaggattgcaataccgccttacctgagccgattttgatgttgctgcatgagccgatgcgtggtgccgttcacctcggttcgcgtttgagtgaaggtgttcccaccggagagtttgagctaccgggattggttgaaagaaacggtccttggctgttgttgcccaagcaaggatcacccgtgtcattcaggcccctgtttattgccggtggttgggaacctgtaccgcaaagcgacgacgtccatagtttgcagaaagctgttttgacctttgatcatgcttctcccttcagctcctttgcgcctgttctggattccatgtcagtgagccccatgcacagcggatggcaattctttagagcgctgtatgacggttatggttatcttcctttagcgacgtttgaggcttggagagcgctagtgggacacccccgtgcgttgtcgatggcgctgttcaagtttgaaatggaaacgaagtttcttagtagaattgagtccgagtttcccattttctgggagtttctcccggtcactgaaattcatttagctgccaggcgtttcggcgctttccttaaggttaagggcgttgctgatgaagccgtatctgcattggttggcagaatgttcgctagattaggggaggccttcccaacctatggggagagtgtgcagcgctatctttcaggaaaacctgttgggccggaaatccacatggatctcaaaacattcagggctgtaattcacggctggtatatccaattgatgcgagatcggagtgacgccacttggcctaaatatggtggcaagaggttggagcgctggcacaacaaacagagtgattcggtaatttcttttcggctagaaatggattatcgaaatgctgtggtctacctgcctgttttcgctgctgctatcgctagcggtgaagcacagttttccgatgttttcaaagatagtgtcgaggcaatatttttccttcggcaggttcgcgattttgattcgagttggtttaacagtatttaccaatattgtctgttgaacaatgtcatgggtatgcataaggcggtaccagtcaatggataa

SEQ ID NO: 29934 - DNA, 6264 bp, Pseudomonas extremaustralis 14-3 substr. 14-3b
atgcatttttttagggatttgattcagcaaagccttgaacgtacccgcgaggcgacgctgggtgttctgggcatcaatcatccgggccttcgtcagcatctgagtcaaagtatggtgaacgagcttggggccgacggttgtttcctggccccaccagtgttcgagcacacttttggctggaaggagtccaagctgcgcctgcaggatctgcaggatgagcagctactgtcatcctgcctgcttgatacattggagaatgcgccggcttaccagttcccgagaactgcacatccctacgttcaccaagtgcaggcttggcgtaccctgcgcgacgaaaaaccgcgctcggccgtcatcactaccggcaccggctcgggcaagaccgaatgtttcatggtgccgatcctagaagatctggttcgcgagcatgagtgcagtgcggcagccctggtgggcgtccgcgctctattcctctacccactcaatgccctgatcaactcccagcaggagcgccttgacgcctggactcgcaagtacagcgataacatccgcttctgcctttacaacggcaagaccgaagagcgcgccgacaaagtccgcaaggaacagcaacagaagcccaatcagatcctgtcgcgggaactgctacgcagggagcccgctcccatcctgatgaccaacgccactatgctggagtacatgctggtacgccaggtcgacagcccgattctggagatctcgaagcagcaacagtcactacgctggatcgtcctcgacgaggctcatacctacgtgggttcccaagcagccgaactgtccctattgcttcgccgggtagtccaggcttttggaatgcagtccgagcaaattcgtttcatcgctacctcggccactatagctggcgctgatgccgaagagcgactgaaacactatctggcaaaccttgcaggtgttgcacttgatcaggttgaggtcataggcggctcgcgcttttggccagatcttgcgttcgactcgccaggcgaagacatcgcccttacgaccatctgcgatatcgatccggacgccgaagtatctcctacgcgctttgaggcattgtgccagagcaacattgctcggcgcctgcgtcacgtcgtgatcaccgctctcacgccacttgaccttaacgacctgatagctgaggttgctgggcatttgcagggaggcacccggctcgaacagcagcgggaggtgctcgactggctcgacaccatgaccggtactcacccggataaaagccagcctccgtttctcaagcttcgggttcacctgttccagcgcatgcttcatggcctctgggcttgtgtcgacccacagtgcagagcgaaatccagtcatctgcaggactggttgttcggtaacgtatatgtgaaccagcgagcacgctgcgagtgccatgccccggtgtatgagttgggtttctgtgatgactgcaagacacctcaccttctggccgaggatcgcaacggtgagttgcaccagcctagtccctatgcgggtgacgagttcgctctcaaccacgaacagggcggcgaggactcacctgccgaagtggcaagaatcgacgccggcagtaaggggctgatcattgctgggatgcaggcagcacacgacccctatttctcgtacaacttggacctcgaaagtcagaagttgggtggcgtgaacgctacccgcaatatcggcatcgtgttggtagaggaggcaaactcctgctgcagcaattgcgatcactcatcatttggcaccaacgattttatacgcaaggcatacctcggtgcgcccttctatgttgccaacgccgtaccgacggttctggaattctgccccgatcctgacaaggaagattgcaatggccgttcccccgaggaactgccggggcgcggacgcaagctgatcaccttcactgacagccgccagggcacggcgcgaatggcagtcagaatgcagcaggaggcagagcgttcacggctacgggggctggtgttcgaaagtctgcgaaatgagcaagccaaggtcgacgccgctcccaaagacactcctagcggcagtcctgcagaaatgctcgttctagcagacagcctggaaaaacagggcttggccggtacggcggcagatctgcgtaaaaaagctgagcttttgcagagcggcgcctctctggtaagcccggccagagttattccctggcagcagatggcccaaaccattgcagcagcgaaggatattgaccaattcattttgcgctacaaccgctatgccaatccggcgttatttgatggctatgaaggcggtctgactatggcgcgtttactgctggcgcgcgaatacgcccggcggcccaagaatcaaaacagtacagaaacgctggggctagtcaaggttggctaccaggggttgaacaaggtttcggcgcctccgccgctgtgggtcgatactcgggccactctcgcagaaggcgatgctaatgatcccagaagctctctgacaccggaagactggcgcgatttcctgaaagtggccctcgatttctacgtccgggaaaacacgttcatcccaatggaaaccaaaatgcgtcgctggatgggcagccgcttcagcccaaaggcgctctattcgcctaagagggaggacgtgcaggaaagcaacaccatcagaaaatggccacagatcaagcctgggacgccgaatcgtctgatcaagctgctcgagctggcaaccggccttgatcgcaacctgagtgcggatgccgacaagatcaacagctggctagaggcggcatggacggcactagtcagtgcaggcattctggaggcctccgatactggccatcgtctgcgcctggaaactcttaccttctcgctgcctaccgagggctgggtctgcccgctgactcggcgtatcttcgacaccaccttccgtggtctgacgccctatctgccgcaaaaaatacagagccaggattaccgttgccaaaagatccagctaccagcttttagtagtctcaaggacgatggcagcccattgcgcaagcaaatgcagatccgtcaattggtcgcaaaagatccaataattgcccagttacgtcaggagtcactgtggactgatatcagcgaccgtacagtcgagggtggtttttactatcggacagctgaacactcggcccaacagtcggcaaaacggctggataactatgttgaggagttcaagcgtggcgacatcaacgcgctgaattgctccaccaccatggagatgggggtggatatcggcggcatttccgccgtggtgatgaataacctaccgccacatccagccaactatctgcagcgcgccggccgggccggacgacgcaaggaagcgcgggctattgcctatacgctttgcaaggccgacccacataatcagcgagccttcgccaatcctaagtggccgttcgtaaccgccattccggccccaatcattacgctcagctcagcgcgtattgtgcagcggcatgtcaactctatgttgctggcgttattcctgcgcatgcacagcagcaatgatggcgatcgtaccaagcttaccctgcactggtttttcgccccggacgactcgccctgccaacacttcaaggcctggctaacggcgagcgccgaggaatatggtagtccggtgaagcaactggtgcgtggcacctgtttggagggccgctcgctcagctcaatcactggtggagcccgactggcgttgcacgatctcgaggaacgctggttaggtgagtatcgtaatattaatcagaagcttcaggccgccagcgacgggccttacaagaaggcactggcactggaaaaacagcgccacgagaatgagtacctgcttcgctatctggcgtcctctgcattcctgcctggatatggctttcctacggatgtagtgagcctcaaaacttacaatgtcgaagacttcttgcatcaacatagaaaagaggatgctagtcgcgaagacagcatcttcgacaacaaggaaatgccatcacgcagcttgaatatcgcaattcgtgaatatgctcccggcgcacaggtagtgatcgatggacgcgtctatcgttccgccggtgtcagcctgcagtggcatgctgatggacaggtcaacgaggcacaaaagttcgatatcgcctggcgctgctcggagtgcggtagcactggggtgatcgaaaacgcctatgcaaacgacgcagggctgtgctgctcgcattgcacgacgccgattccatccagcgagcgccgcatggtgcttcgtccgggcggcttcgtaaccgacttttacgaggaaaccaccaacgacgtcacttcgcaaaagttcatccgcgtcgagcgaccgcgcatccagctgattggagaaagcattgcgctgcctgatgaacgctgcggctttgtgcgctttggtcatgaaggcagtgttttccatcactcatccggcgaacatgaaaaaggttatgccgtctgcatgacctgtggacgtgccgagtccatcctcgcctcgggcgaagtgcctaaggatttgcagcccgataaagcccaccgcccggttggcggagttgccggcagccgcaaggagagagattgttcgggcgaagcggtcaaggctggtctgcatcttggttatcagattcgcaccgatgtattggaaatattcctcaggaacccactcactggagaatggctacttgactcaatcaaggggcgtctgatcgccgcgactatcggcgtcgccatgcgcgatgtgatcgccgaccgactcggtattgccagcggagagatgggtttcagctatcgtttggatcgcgacagagacagcaggcaagggcgctccgtcatccagttgttcgatgaagtcagcggtggtgccggtttcgttctggccggcctgagcgatctcgctctgctactgaataaggcgctggagcgcctgcgctgcccagtcgactgcgagaatgtctgctcgcattgcctagccagccaagatagccgtgtcgagcgcgaggaactggaccgcaaactggcgctgcaatggctgagtgagtctcaactggttgaacaccttgggcttccagatgtattcgtaaacatccatggcgctcgccactgctccgttggcccgctgcgtgagctgagtttcgccgttagttcgttggatcgccgtgatcaaacaggatcgatcctagtgtgtctacacggcgaccatgtgaactgggatctcgaccatccacgttttagggagcaggtgcttacctgggcaatcgccgagcggctcaaagtcaggatcggcattaccgattccgctttgttgagtgccgagcaaaaggaaaccctagcattgcttgcacgtttgggcgttgagctactcgagctggatgctacaaatctgcaagctccccacctgattgcccagttgtcatctcaagcaggcgtcggaagcctgtatagcagcatgaacagtgttggagttcccgggggcgattggctacaaggtcattctgatgtggtctgggtcaccagcagactgatggcagcagtgccaggaaataccatcgacagcagtggctggaaccaacgcaagcagggagcgcgcattgttgaaatcacctcgcagctcgatggcccagtcaacactctgagaagacgcctaactaccctgatcgacgcccagatgccggagctggccaccctgattaccaatgatcaggcagtgtccatcagctactcggatcgctacctgaagtcgccgtggtctctgatgctgctaagcggcttcctggaactgttccgtagtgattatctgcaatcgttatcagtacaaactctggcgccgagcggtaaccagccaagttatctgctcagccatgattggatgcgggcggataatcagcaggccattctcgagctctggctcaagagccagtttgatatcgtcccgaacatcaacatcaacatcatgagcagcccccgtgacttgcttcactgccgggttatcacggtgagctgggcgtcgggtagggtcagcaagattttgctggatcagggtatgggctactggagaggccgcatgccatatagggatcaaatgaatttcgacttcggtacctcacaccacgaacaggccaggcagatgattgaaaaatattcaaatgcgcatatgcatcaggggggagagtggccgacttatatcagttgcgtcattgattga

SEQ ID NO: 29935 - DNA, 3300 bp, Pseudomonas extremaustralis 14-3 substr. 14-3b
atggaattgaacgcacctgccaccactgctgctaaggcatggctaagtgaactcctgttcatccggactatgtttaaaggtcctgacggtaagccactctacagctatcacgttactgagtctgagtatcggtcactaattgaaatgttgagcagctactttagaagaggctcagtacaaaactactcaactcacctggctgcttgcttttgcctgtttgtcagtgagcagtatcggcgcgactacaacagctcatggtcatggtcggggccggaaacaatacttgggatctccttgtccccgcagcagcatgccagcctgacaagtagcgggctggcgtactggagtagaccgatacgctttcgtgagaatagtcgcgactggctcggctctctatttgccgaaggcggccttccttggccactggtgcaaagtgagtcgcacggatttggacgggctgtgcgcagggggatcaagcacttctatcgcactgaaggtaaccgcagaacaacagcggatttgatggcggacttcgaaaatgagctaccgctcatcttccgcaacttggaaacgcgacggctgctggcgggcatcgttgatcagctcatgtatctggtcgagcactaccccttgaaggatcaacaggatccagccaactacctagataaggtcgcaccaggctggacggatgccttcccaattccgctggatgaaagcaactcccgcacgctgctcaatgattggctacgcgatgcaggacagaaacgtcaggagcgcaaggaggccttagagaaggccagggtcttcacttgcgagcattttctgtatggcacattgcctcagtggttgatccgcaccgaattgatcctgcctcaggaggcaacattcgtagtcgatccgacgagtctgggcagtacccgccttgagttggcttattacgaaggtgaaaggctcttggccagaggtcccgccgtttacggccagctcactgaacaaggcttcaaggtccgcttctccaaccctcaggtcacactcgaacgtcgcagacttgacgagccgctgagccttcggttgctggataacgggcgaatggttcattgccagttcttcgatggtagtgccctcgactaccacgacatacccttgattttcgagaatcgctccgaacgctggcaactggtcgcttcgtccagttgctcgctgtcatccggattggttcgactccgagtccccccgggctttgccaccaattgcgaaggtggcgctgcaaattttctgctcgaggatcaggagaacggcctctggctggaggcaaacgtcaacctatctctggtaaggggggatgaccactatcaggtcgagctgaatcaggcagacaacgatgacgctaaaccaactctcacgggtatatttgcactttacgaaagctctcctgcgatggtctaccttggctggcccaacctagaactgcctgaaggctaccctcatgccagagaggacttgcttgagttcgtcaatggcgagctactggaccgtcaacgtagcagccgttgtggctcagctcgttataccttacgcacccgctcgggcaagacactattgcagcgccgtttcggtgtcctacccagagatttcaatctttcgctattcccgggagtacgagaacagcctgcacgtctccagatcaaaggggttgcacaactagatttacacgtcgtcagcaatgctctggtagtggaacgggacgaaaattcactttacatgcgccaccaaggtgaggcccccccttcgacctttgttctcgaattaggccaaggactgccgtctctccagcttcacctgccctatccttaccagggggcacgcctgctggatcaatatggcaatccgtcgcgagccagggagttgatattggccgatctgatgggccatcgcatttcactgacctcaggtcttacccagggacagaacttccatatgcagctggagctgatatgcgcggaacagccgcatccgcagcggacatacagcatccgggtaggctcagcacctgtaatgctcaacctgttcagctacttaggcgacatgcagaacatgttgggggcagtggatgaacaggatgcctacatcagattttctctggaaaccgaacaaccgctgctgaagctcgatatacgccgctatggtggccagctgcagtgggagggacggcatgccttctacgtgagtggcgtttctaatacctccgtactggatggcgtgcaggctgaagccatgctcctatccgaccccaagcgtaccccgttgcaattgaccgagaggaccagcgaagccgttggcatcggcagctttgagataccgcaagccatgcagccccgtggaccgtggctgatctacccggcagaatcctcaagcattcgctttcgcccggctttatacgtggtacctgtcaatggcttggataccgccgctgaaatatgctcactgcaccgtgctgcagaggtttttcaccctgagcacaatccgcatgccatcgaccaacagattgcagccatggcgtacgatttcaaccacagcggctggcagtacttggctgacttgaagcagaactaccgccacctgccactctcttccttcgaaacctggaaggctctttcgcgcaatcaagaggcgttgagtttctcggtgtttcgccttgagatggatgagtcgttctgcgcacgcatccgcgatgaactctccgtcatctgggaaaccatcccgcttccactgtgggcacaggcctatcgactgttccacgactatatgcgactgaccggacttcctgacgcactggtcaatactctcgtctcgaagcgcgccgaggcactgcgttgcatcgtttccggcttcgattaccttggggactacctaagcactggcaattgcagctcattaaagaagctacctctggagcaggttctgccggcttggtatcagggcctaaggcacctgcatgaagccaatcggaactggcctaccttgctgggcagcgaactttccagctggattgacaggcagttgctgccgcctctggtgaaagctctttcgctggcggagttcaccgatgcagtggcctatctaccgatcttcatggcttttgtcaccgctggacgggccaaaatcaccgacttgccagcaacgccggcctatttgaaatttgctatccgtctggttgccgacttcgaccgccaaggctggttcataccggtacatgccttggtggtgtcctatttactcgcctcgcagaacgaggcataa

SEQ ID NO: 29936 - DNA, 6258 bp, Pseudomonas fluorescens
atgcatttttttagggacttgattcagcaaagccttgaacgtacccgcgaggcgacgctgggtgttctgggcatcaatcatccgggccttcgtcagcatctgagtcaaagtatggtgaacgagcttggggccgacggttgtttcctggccccaccagtgttcgagcacacttttggctggaaggagtccaagctgcgcctgcaggatctgcaggatgagcagctgctgtcatccagcctgcttgatacattggagaatgcgccggcttaccagttcccgagaactgcacatccctacgttcaccaagtgcaggcttggcgtaccctgcgcgacgaaaaaccgcgctcggccgtcatcactaccggcaccggctcgggcaagaccgaatgtttcatggtgccgatcctagaagatctggttcgcgagcatgagcgcagtgcggcagccctggtgggcgtccgcgctctgttcctctacccactcaatgccctgatcaactcccagcaggagcgcctcgacgcctggactcgcaagtacagcaataacatccgcttctgcctttacaacggcaagaccgaagagcgcgccgacaaagtccgcaaggaacagcaacagaagcccaatcagatcctgtcgcgggaactgctacgcggggagcccgctcccatcctgatgaccaacgccactatgctggagtacatgctggtacgtcaggtcgacagcccgattctggagatctcgaagcagcaacagtcactacgctggatcgtcctcgacgaggcacatacctacgtgggttcccaagcggccgaactgtccctattgctgcgccgggtagtccaggcttttggaatgcagtccgagcaaatccgtttcatcgctacctcggccaccatagctggcgctgatgccgaagagcgactgaaacactatctggcagaccttgcaggtgttgcacttgatcaggttgaggtcataggcggctcgcgcgtttggccagatcttgcgttcgactcgccaggcgaagacatcgaccttacgaccatctgcgatatcgagccggacgccgaagtatctcctacgcgctttgaggcattgtgccagagcaacattgctcggcgcctgcgtcacgtcgtgatcaccgctctcacgccacttgaccttaacgacctaatagctgaggtcgctgggcatttgcagggaggcacccggctcgaacagcagcgggaggtgctcgactggctcgacaccatgaccggtactcacccggataagagccagcctccgtttctcaagctgcgggttcacctgtaccagcgcatgcttcatggcctctgggcttgtgtcgacccacagtgcagagcgaaatccagtcatctgcaggactggttgttcggtaacgtatatgtgaaccagcgagcacgctgcgagtgccatgccccggtgtatgagttgggtttctgcgatgactgcaagacacctcaccttctggccgaggatcgcaacggtgagttgcaccagcctagtccctatgcgggtgacgagttcgctctcaaccacgaacagggcggcgaggactcacctgccgaagtggcaagaatcgacgccggcagtaaggggctgatcattgctgggatgcaggcagcacacgaaccctatttctcgtacaacttggacctcgaaagtcagaagttgggtggcgtgaacgctacccgcaatattggcatcgtgttggtagaggaggcgaactcctgctgcagcaattgcgatcactcatcatttggcaccaacgattttatacgcaaggcatacctcggtgcgcccttctatgttgccaacgccgtaccgacggttctggaattctgccccgatcctgacaaggaagattgcaatggccgttcccccgaggaactgccggggcgcggacgcaagctgatcaccttcactgacagccgccagggtacggcgcgaatggcagtcagaatgcagcaggaggcagagcgttcacggctacgggggctggtgttcgaaagtctgcgaaatgagcaagccaaggtcgacgccgctcccaaagacactcctagcggcagtcctgcagaaatgctcgttctggcagacagcctggataaacagggcttggccggtacggcggcagatctgcgaaaaaaagctgagcttttgcagagcggcgcctctctggtaagcccggccagagttattccctggcagcagatggcccaaaccattgcagcagccaaggatattgaccaattcattttgcgttacaaccgctatgccaatccggcgttatttgatggctatgaaggcggtctgactatggcgcgtttactgctggcgcgcgaatacgcccggcgacccaagaatcaaaacaatacagaaacgctggggctggtcaaggttggctaccaggggttggacaaggtttcggcgcctccgccgctgtgggtcgatactcgggccaccctcgcagaaggcgatgctaatgatcccagaagctctctgacaccggaagactggcgcgatttcctcaaagtggccctcgatttctacgtccgggaaaacaccttcatcccaatggaaaccaagatgcgtcgctggatgggcagccgcttcagccccaaggcgctctattcgcctaagagggaggacgtgcaggaaagcagcaccatcaaaaaatggccgcagatcaagcctgggacgccgcatcgtctgatcaagctgctcgagctggcaaccggccttgatcgcaacctgagtgcggatgccgacaagatcaacagctggctagaggcggcatggacggcactagtcagtgcaggcattctggaggcctccgatactggccatcgtctgcgcctggaaactcttaccttctcgctgcctaccgagggctgggtctgcccgttgactcggcgtatcttcgacaccaccttccgtggtctgacgccttatctgccgcaaaaaatacagagccaggattaccgttgccaaaagatccagctaccagcttttagtagtctcaaggacgatggcagcccattgcgcaagcaaatgcagatccgtcaattggtcgcaaaagatccaataattgcccagttacgtcaggagtcactgtggactgatatcagcgaccgtacagtcgagggtggtttttactatcggacagctgaacactcggcccaacagtcggcaaaacggctggatgactatgttgaggagttcaagcgtggcgacatcaacgcgctgaattgctccaccaccatggagatgggggtggatatcggcggcatttccgccgtggtgatgaataatctaccgccacacccagccaactatctgcagcgcgccggccgggccggacgacgcaaggaagcccgggctattgcctatacgctttgcaaggccgacccacacaatcagcgagccttcgccaatcctaagtggccgttcgtaaccgccattccggccccaatcattacgctcagctcagcgcgtattgtgcagcggcatgtcaactctatgttgctggcgttattcctgcgcatgcacagcagcaatgatggcgatcgtaccaagcttaccctgcactggtttttcgccccggacgactcgccctgccaacacttcacggcctggctaacggcgagcgccgaggaatatggtagtccggtgaagcaactggtgcgtggcacctgtttggagggccgctcgctcagctcaatcactggtggagcccgactggcgttgcacgatctcgaggaacgctggttgggtgagtatcgcaatattaatcagaagcttcaggccgccagcgacgggccttacaagaaggcactggcactggaaaaacagcgccacgagaatgagtacctgcttcgctatctggcgtcctctgcattcctgcctggatatggctttcctacggatgtagtgagcctcaaaacttacaatgtcgaagacttcttgcatcaacatagaaaagaggatgctagtcgcgaagacagcatcttcgacaacaaggaaatgccatcacgcagcttgaacatcgccattcgtgaatatgctcccggcgcacaggtagtgatcgatggacgcgtctatcgttccgccggtgtcagcctgcagtggcatgctgatggacaggtcaccgaggcacaaaagttcgatatcgcctggcgctgctcggagtgcggtagcactggggtgatcgaaaacgcctatgcaaacgacgctgggctgtgctgctcgcattgcacgacgccgattccatccagcgagcgccgcatggtgcttcgtccgggcggcttcgtaaccgacttttacgaggaaaccaccaacgacgtcacttcgcaaaagttcatccgcgtcgagcgaccgcgcatccagctgattggagaaagcattgcgctgcccgatgaacgctgcggctttgtgcgctttggtcatgaaggcagtgttttccatcactcatccggcgaacatgaaaaaggttatgccgtctgcatgacctgtggacgtgccgagtccatcctcgcctcgggcgaagtacctaaggatttgcagcccgataaagcccaccgcccggttggcggagttgccggcagccgcaaggagcgagactgttcgggcgaagcggtcaaggctggtctgcatcttggttatcagattcgcaccgatgtattggaaatattcctcaggaacccacttactggagaatggctacctgactcaatcaaggggcgtctgatcgccgcgactatcggcgtcgccatgcgcgatgtgatcgccgaccgacttggtattgccagcggagagatgggtttcagctatcgtttggatcgcgacagagacagcaggcaagggcgctccgtcatccagttgttcgatgaagtcagcggtggtgccggtttcgttctggccggcctgagcgatctcgctctgctactgaataaggcgctggagcgcctgcgctgcccagtcgactgcgagaatgtctgctcgcattgcctcgccagccaagatagccgtgtcgagcgcgaggaactggaccgcaaactggcgctgcaatggctgagtgagtctcaactggttgaacaccttgggcttccagatgtattcgtaagcatccatggcgctcgccactgctccgttggcccgctgcgtgagctgagtttcgccgttagttcgttggatcgccgtgatcaaacaggatcgatcctagtgtgtctacacggcgaccatgtgaactgggatctcgaccatccacgttttagggagcaggtgcttacctgggccatcgccgagcggctcaaagtcaggatcggcattaccgattccgctttgttgagtgccgagcaaaaggaaaccctagcactgcttgcacgtttgggcgttgagctactcgatctggatgctacaaatctgcaagctccccacctgattgcccagttgtcatctcaagcaggcgtcagaagcctgtatagcagcatgaacggtgttggagttcccggggccgattggctacaaggtcattctgatgtggtctgggtcaccagcagattgatggcagccgtgccaggaaataccatcgacagcagtggctggaaccaacacgcgcagggagcgcgcattgttgaaatcacctcgcagctcgatggcccagtcaacactctgagaagacgcctaattaccctgatcgacgcccagatgccggagctggccaccctgattaccaatgatcaggcagtgtccatcagctactcggatcgctacttgaagtcgccgtggtctctgatgctgctaagcggcttcctggaactgttccgtagtgattatctgcaatcgttatcagtacaaactctggcgccgagcggtaaccagccaagttatctgctcagccatgattggatgcgggcggataatcagcaggccattctcgagctctggctcaagagtcagtttgatatcgtcccgaacatcaacatcatgagcagcccccgtgacttgcttcactgccgggttatcacggtgagctgggcgtcgggtaggatcagcaagattttgctggatcagggtatgggctactggagaggccgcatgccatatagggatcaaatgaatttcgactttggtacctcacaccacgaacaggccaggcagatgattgaaaaatattcaaatgcgcatatgcatcaggggggagagtggccgacttatatcagttgcgtcattgattga

SEQ ID NO: 29937 - DNA, 3300 bp, Pseudomonas fluorescens
atggaactgaacgcacctgccaccactgctgctaaggcatggctgagtgaactcctgttcatccggactatgttcaaaggtcctgacgggaaaccactctacagctatcacgttactgaggctgagtatcggtcattaattgagatgttgagcagctactttagaagaggctcagtacaaaattattcaacgcacctggctgcctgcttttgcctgtttgtcagtgagcagtatcggcgtgactacaacagctcatggtcatggtcggggccggaaacattactagggatctccttgtccccgcagcagcatgccagccttacaagtagcgggctggcgtactggagtagaccgatacgctttcgtgagaatagtcgcgactggctcggctctctatttgccgaaggcggcctgccttggccactggtgcaaagtgagtcgcacggatttggacgggctgtgcgcagggggatcaagcacttctatcgcactgaaggtaaccgcagaacaacagcggatttgatggcggacttcgaaaatgagctaccgctcatcttccgcaacttggaaacgcgacggctgctggcgggcatcgttgatcagctcatgtatctggtcgagcactaccccctgaaggatcaacaggatccagccaactacctagataaggtcgcaccaggctggacggatgccttcccaattccgctggatgaaagcaacgcccgcacgctgctcaatgattggctacgcgatgcaggacagaaacgtcaggagcggaaggaggccttagagaaggccagggtcttcacttgcgagcattttctgcatggcacattgcctcagtggttgatccgcactgaattgatcctgcctcaggaggcaacattcgtagtcgatccgacgagtctgggcagtacccgacttgagttggcttattacgaaggtgaaaggctcttggccagaggtcccgccgtttacggccagctcactgaacaaggcttcaaggtccgcttctccaaccctcaggtcacactcgagcgtcgcagacttgacgagccgctgagccttcggttgctggataacgggcgaatggtgcattgccagttcttcgatggcagtgccctcgactaccacgacatacccttgattttcgagaatcgctccgaacgctggcaactggtcgcttcgtccagttgctcgctgtcatccggattggttcgactccgagtccccccgggctttgccaccaattgcgaaggtagcgctgcaaattttctgctcgaggatcaggagaacggcctctggctggaggcaaacgtcaacctatctctggcaaggggggacgaccactatcaggtcgagctgaatcaggcagacaacgatgacgctaaaccaactctcacgggaatatttgcactttacgaaagctctcctgcgatggtctaccttggctggcccaacctagaactgcctgaaggctaccctcatgccagagaggacttgcttgagttcgtcaatggcgagccactggaccgtcaacgtagcagccgttgtggttcagctcgttataccttacgcacccgctcgggcaagacactattgcagcgccgtttcggtgtcctacccagagatttcaatctttcgctattcccgggagtacgagaacagcctgcacgtctccagatcaaaagggttgcacaactagatttacacgtcgtcagcaatgctctggtagtggaacgggacgaaaattcactttacatgcgccaccaaggtgaggctcccccttcgacctttgttctcgaattaggccaaggactgccgtctctccagcttcacctgccctatccctaccagggggcacgcctgctggatcaatatggcaatccgtcgcgagccagggagttgatcttggccgatctgatgggccatcgcatttcactgacctcaggtcttacccagggacagagcttccatatgcagctggagctgatatgcgcggagcagccgcatccgcagcggacatacagcatccgggttggctcagcacctgtaatgctcaacctgttcagctacttaggcgacatgcagaacatgttgggggcagtggatgaacaggatgcctacatcagattttctctggaaaccgaacaaccgctgctgaagctcgatatacgccgctatggtggccagctgcagtgggagggacggcatgccttctatgtgagtggcgtttctaatacctccgtactggatggcgtgcaggctgaagccatgctcctatccgaccccaagcgtaccccgttgcaattgaccgagcggaccagcgaagccgttggcatcggcagctttgagataccgcaagccatgcagtcccgtggaccgtggctgatctacccggcagaatcctcaggcattcgctttcgcccggctttatacgtggtacctgtcaatggcttggataccgccgctgaaatatgctcactgcaccgtgctgcagaggtttttcaccctgagcacaatccgcatgccatcgaccaacagattgcagccatggcgtacgatttcaaccacagcggctggcagtacttggctgacttgaagcagaactaccgccacctgccactctcttccttcgaaacctggaaggctctttcgcgcaatcaggaggcgttgagtttctcggtgtttcgccttgagatggatgagtcgttctgcgcacgcatccgcgatgaactctccgtcatctgggaaaccatcccgcttccactgtgggcacaggcctatcgactgttccacgactatatgcgactgaccggacttcctgacgcactggtcaatactctcgtctcgaagcgcgccgaggcactgcgttgcatcgtttccgggttcgattaccttggggactacctgagcactggcaattgcagctcattaaagaagctacctctggagcaggttctgccggcttggtatcagggcctaaggcacctgcatgaagccaatcggaactggcctactttgctaggcagcgaactttccagctggattgacaggcagttgctgccgcctctggtgaaagctctttcgctggcggagttcaccgatgcagtggcctatctaccgatcttcatggcttttgtcaccgctggacgggccaaaatcaccgacttgccagcaacgccggcctatttgaaatttgctatacgtctggttgccgacttcgaccgccaaggctggttcataccggtacatgccttggtggtgtcctatttactcgcctcgcagaacgaggcataa

SEQ ID NO: 29938 - DNA, 6198 bp, Pseudomonas fluorescens
atgctctataaaaaaaattatttcagttcattagtacacaacctgactcagcgcagcgagcgtgcggcgcttggcttgctggggatcggtaatgcgcctttgcgtcagtttctgcatgaccgtttgacagcgacgccgggcaccgaaggagcactgctggctgacccggttttcgagccgactttcggctggcaggaaagccaggaaaccatgtcgtcactggctggcggcccatttctgaatcgtaagttggcgcaggtaatggctgcgccgcccaaggagttggcagaggaatataccttcccgtctgatcggcacccgtttgaacatcagttgagtgcatgggaggtgctgaaccatccaaagccgcagtcactggtggtgaccagcggcaccggctctggcaagactgagtgctttctggtgccagtgctcaatcagcttgctaatgaggtcgacactgatgtcgatcctgaaggcattcgtgcgctattcatctatccgctcaatgccctgatcaactcccagcaaagtcgtctggatgcctggacggatggttttggcggcaagattcgccactgcctctacacgggtgcattagaaaacgagcgcaaggcgatagaccagaagtacaaaggtcaggtgatcgatcgcaccaaattgcgcgatagcccaccgcagatcctggtcacgaacgcaacgatgctggagtacatgctgattcgcaaagaggatgcgccgctgctgcagaagtcggaaggtaagttgcgctggattattcttgacgaggcccacagttacatcggttcccaagcggctgaaatggctctcttgttgcgccgggtaatgctagcgttcaaggtcaaaccggaagacgttcgatttgtcgcaacatcggccacctttggttcggatgagcagaccattgaaaacttgcggagttttctggcagacattggtggcatttcagtggatcaggttcacgtcgtacagggacggcgcgagattccggagctaccggcactgcccgtgaataaagtagatgacaccccgcaaggcattgcagacatcgaccccgaccacgaagtttctgcacaacgctatgtgcgtctggcagcaagcccaacagccgtcagtctgcgtgacgcctttgtgccgggcggtgaaacacgaccgcaaacccttaaagcccttcaggaaatatcggggttgcccctgggcgtgctgctggcctggctcgatttgatgactggcaccaagaatgctgagggacttgctttcctacctctgcgtggtcacctgttccatggcgtgatcccaatcattcgcgcttgcatcgacaagaactgcaagcacaagtctggatctgcacttggcaatcaggactggccgtttggcatggtctacaccgatgaacgcacacattgtgattgcaaagctccactaatgcctctggtgaagtgcgaggagtgtaccgagctgttcttgcaggggtatcagagcgaaagagaccggctggtagatcagtcctttaatcaggacgatgaattttccatgaattcggaacccatggatgcagaaagtggagacgacgcggataccgacgatggtggcgaagcaatgcgtaccccggtgttgataacgaatcgtcctggtgaggattgttacaccgagcatctggatcgcagcaaccagaagtttatcaatgcgccaatcgatgacagcattgaagtgaccgtattccgtagcttggtcaacgagtgcccgtgctgcaacaacaaaagcaaaacacgcagcattatgcgagctcaccgcataggtgcaccgtttactctgggcaccgtcatcggtgtgttgttggagtactgccccgaggataaaactccccaaggcaagccgttccaaggccgcaagatgatttcattcactgacagccgacaggggacagctcggatcgcggtcaagttgcagcaggactcagagcgcaaccgtatacgcggactggtctaccagcacctgataggctcgcagtccgtcaatacgctgactgatgacgaacagggcgatctcgccgagctggaagtgaacactaatcgcactaaattcgagcagaagttgttcgacatgctcattgctcagcgcgataactcaggtcctgcggaaattagctggaaggccatggtcagccagctttcaagcattcctgaggtggaaattggcatcctcgattattaccgcaatctggcaccgcacgtttttggcgagcgcgacagcgtggcattggccggcatgctcatagcgcgtgaattctatcgtcgcccgaaacgcgccaacagcctggaaaccatggggctggtgcaagtgacttacccgaagttggaccatgtaaccagcacacctttggcatggcccaagggtaaaggcgaggactcatggcgaagctatctgaaggtgctcatggacttctatgttcgtgaaaacaccattctgaatattgacaagcgttggcagtcgctcatcggtgccaaaatccaaccgaagtggctggtgccgtcggccaccgaaaacaagccgggccgccgttttgtccgctggccttctgtcaacaagggctccagcgtgcagtcgcggcccatccttatgctttgcaaggcatttggctggtcagtgcagacgcacgagcaggagatcgacttcattttgcaggacgcctggcgagtgctgactcaggaagtcagactgctgaccaacaaggctgatggctatcaactcgatctggaggatctgagctttcgtctgccggagacggtctatttctgtgcggtaacgcgccgcttcattgatacccctttcgagggattgagcccttatacgccgcgtaacgaccgctatcatgtcgccttagtgaagccttacacgctgccgagaccgccacaatctctgatcgacatgcgtggcgacgagggcttgcgggcgctacgggattggagtgaaagcgaaccggagatcgtccggctccgccaagaaggcttgtggtctgacgttgctgacctggtagtcgagggcggccactattttcgttctgccgagcactcggctcaacagccgaagaagaagctcgaccgctacgaggctgactttaagcaaggtaagctgaatctgttgagctgttccactaccatggaaatgggtgtggacatcggcggtatcacggtagttgcaatgagtaatgtaccgccgcacccggcaaactacctgcagcgcgctggccgcgctggtcgtcgtcgcgaaggtcgttcgatggctgtaaccgtctgcaagaacacgccgcatgatcaggcggtgttccgcaatccgctctggccgttcactaccggcatgcgtatgcccaaggtttcgctgcaaagccccgcgctgattcagcgtcacgtcaattcctggctgctttcttactggctgaaaaatatcgctggcgctttggaaatcaaatccatgactgtgggtgccttctttctgaatggggatcttcccgtctccctggtcgagagattctgcgcatgggttgacggtgagtctcatggcgcttgtgctgcggtcaacgaggcggttgccagcatcacccggcgcagcgtgttgtcttcaatgccggtgtccggcttactgaacgatgcattaaaaaccttgcgcgaaatccagcagaaatgggtcggcgagcacgcgatcagtaaggctcaattggatgggattggtaacaaaacggctgccgcttatcgtgcgatgtccgcgcaactggctcgagttgagaaggagtacctgctgagtgaactggctggccgccggttcctgccgggatacggattcccgaccgacatcgtaagcttcgacaaccagtgcatgcaaaacttcaggtcaaacgaaggtggcgcaggccgcgaggataaccggggacgctaccgagacctggcatcccgcgaccggattacgggccttcgtgagtatggcccgggtgcagagttagtcatggatggtcttgtatacaagtcaggggggattactctcaactggcatgcgccagcctccgaggagaacgtcaaagagctgcaactgataaagaaagcctggaagtgtggtgcctgtggggccagcggaacggggctcaaccccgggctcagtctgaactgtccggaatgtggcgctgaagtcgataagggcaacatccgtgagtaccttgttccgtctgggtttgccgtagatttctttgcagagccacataccgccattgagtcattggcgtatgtgccggtcaaaaagccgctgctgaacgtccccgcgagctggattgccttgtcgaaccctgcattaggccagttccgaagcagccatcaggcacacctgtttcattacacctcaggggctggcggcaacggctttgcaatctgcctcgaatgcggtcgagcagaaccgatgctggaggttgatgatagttcggactcgactgcggccaatgagcagcgccttgcgcataccttccgtagtgggcaaacgcaccgacgcctgcgcggcggcaagaatgactcgggcgaaaacgtctgcccgggcagttataactcatggaaaatcaaacaggctatccatctgggcaacgatagtattaccgatgccctggagctgatcctgctcaaccctgatagcggtgagccgctcaaggatgtggacaccggctactccatcgccattgccttgcgtgatgcgattgccgaggagctgtgcgtgcaggcagatgaactcggctgcgactgcgagaatatccagatcgacggacgctgggccagcgcgattcgtgtgttcgatcagcgtagtggaggctacgcgacccaggcggtgggcttattgaataagcgaagcctgtgggagcgcgtgattgatcgactggactgtgactgcagtcacgcttgccagtgctgcctattgagcttcgatacccgctttgaggcagaccgtctggatcgtcatgaagcgctgaaatggatcaacaagaactggctgatgaagctggacttgccggtcgagttgaaggtgtttggtgcgaatacgtgccccgagatcgttacactatatgaggctattgagcgtgagcttgcggctgacaatttgcccaagacactctcgatttacctgccggcgccagccgcagaatgggatttggctatcgctcgaaaactgcgtcaccgacttctggcttgggagggggctggtcatcacattgcgttgcgcctgacagaaaacaccttcaatgacctgccctctgatcaaaaagagtggctgcatcgcctagcagtgaacaacatcaagatcgaagtcgaacagtcgttgttggatgtcagcgtgcttacgctaaatgcggtcctgtccagccagaaacagcatatcgcctgggctagcaatgacgagagactgctagcacctaacaaggattggaacccagtcgctgctggatcgtgcatcgtgtacggggtattgccagcccttgcgcaagcacgattgatcaccgctcaggatttaaaccagacatcggtgccgggaatcgtaaaactcgagttgggaagcgagctggatggctccctgaccggctttgcaaaacggttctgggatgccgttgagccaaaggccggcctgcttgactttgcattgagcggccaagacccgattgaagccgtatcgtactccgatcgctatgtatgcaacccactcaccgcttgcatcctcatcaacatcctgtacgagctgaaacagcgcagcggcgaggagttctcggtcaagatttgtgggcgtaagtacctgcgtgagtcaagccgtacctcctggaaatgttggcatgactggctgagtagcgacgatcgtgacagggctattcgcaaagcgattgaatattgcgggctgtccggtgaagtcctgagccagccggcgctcgcgcattaccgtcagttgcgtataacgcttgtatccggccgatgtctgaccgttcagtttgaccagggcctctccttttgggaggccgcgcgcagcgaaaatgcttactcaacccggttcgattttgaggcaggggatatggggagcgagctcatggagaagataaaaactccgatcagtgcagctgctgatgtcagaacgcaactgttcctctccttggacaagtag

SEQ ID NO: 29939 - DNA, 3090 bp, Pseudomonas fluorescens
atgtcccatgagcaaaccagtcgccacgtactggcgggccatcgccaatggcagctgaccaccgaaatcaggggggagggcaagcgctatatcgggcaggttgccattaatggtggactacctatgcgtctgctcgagaccgctcaaggtagcttgtcccgtcttctgcgtatggtgctggagcaaacgcttcgatgcaatctgcaccaggacgatttattggacgctatcaaaacacaagcggcattgcttccggtgagctatcgccaggatctcatttaccaattgctccgcgatctggtgtggggcgtattgcagctacgcgcgcaatatgggcttcaccacgagccggatcctctcttgaaacttcagcagcaatgccctgactgggaaatgcggttcccgctggctttggatagtgcggttgctaccacactgatcaaggggcttgtcgccagcgtggcgtctatcagcgcgcaaaagagtcgcgtaccgtttcaaattgttcgtggtttgcggttcccgtccgatgatggaatgcccgtgtttgaaatggcatttgaaatgcaggctcagacaacgactcaagaactggctgacgctgtaggtattactgccgacaagctgcctcatcaattccggttgctgctgttggtcgcgggcaaggaacacttggtaggtgaggcactgcgtcgcggaggtggctatcaactggttgcacgcaaaggcctatcgctgcaaaacctccatgcgggagcacagctcatccttagccgcaatggtcaggcaatacatacagctcacctgccagggggagagccgatcagcttcgacgaacccttgctgtttgaagacgcccgaccgtttgccagccttgtcgggcagggcagtgccactctcaaaggggaccgtgcgctagcccttatccccgaaaatgcatttttctacgcgcaaggcgacgacgccgtcgttatgcatgaaggcatgccgggtgatcaagtcttgctgatcatctctcagggtaagacgcagttcacctatcgcaagcagtcctactacgtcacagtgaatcctaatgccgccccccgagccgatgcctactggcaaggacaaacgctggacgcgggctctgtgccgggtctcatgtttcgtggtaatccttctctgcgtgttcttcaggctgggggcagcttttcctatgctcctgtcaacgagctctatattcgatccaatggcatcgatacaccgttcactcaggcgaaagccccaggtctgtgctggctaagctggtcccggggtgggcaacgtctgctgcgttcccgtgccgtcgttttacccgtcagtgcatctatcagctataccccgagcgcggatccagccaaaggctgcattcttctggaaaactggcctgatctccatgtcacctgcgacagtccggacatcaccctatcccgcacctatgaagacaaaacgaatgtcctgacggtacaaagcaaggctgctgcgccagcgacctccgttcagctactcatacagtggccggagggagagcagaagctgactctaccattccccgggcacggggctgttctgctggatgccaggcaagtaccaatccgcgaaggagcgagtctgtcggttgaggagctgatgggctgtcgggcaatcctgatgtctcccactggtgccgatgcttggcaggtacggttgactgcgcacagcccagatcagccaaatgcgcttgtgcgtgaaattcgctatacaggcacccgtgaaatacgtctgtttgaactgatcaatcccatccagcaaatgctgtcatgccactctgggctcgatatgagcgtgacgatgcagttcgttcattcccatcgagttcgagggacctatcacgtcggtcgctattccacagtcgctcgcctgcatggcaatgcgcagttcgtttcgctcaacgatggacggcacgatttgctgctcgaccgggaggacgcggaaggtttgctgatggcgctacccctggcattgccgaatcgtgatcccgagccgttatcgttgcacttgtccgagcaggtattcaccggcagttggaggctaaatcttcccgataacgtcgccagtccatggctgatctatgccagtgccgagagtaactatcgttgccagccgtgtatcgcacctgcacagggaattgctctggcgaaagtttttacaccactgcaaaacgctctctgcgaagcggatcatgagactcgcatggttctgttgaccaaacgactggaacagatggcgacgaccccgatgcatgaggattgggtgttacttgaggcgctactcgataagctgcagcatctcccgttgcctagccttgatctgtatcaggtactgatccgtacacccgctgcgctagtgatggtcacgttattgctggatggctttgccgccaatatggtggagcgcatgccgctagagcttccctttgaatggctgttgatttcccctatgcaatggcttcaggcatttgaagtgctgaaaaatacgctggtgaccgaccctaggttgctgccgatcatccgcaaggatattcagcgcaaaagccagtacctgccgcgttggcagcccgcactgaagttcatcttcgatcagggtattcatcaccaccttgatggaaatattccagacgcccggctctttctcaatgacccgaaaatgctgacggagctgtggctagaccgactgttcgatgggcctgattgtgaaatgcaggatttttttcaccgcaattatgcagacgaccaaccgtggccgaagctgcctccaaatgtgatgtcggacttcctgcgaacagacaatggcaagctccttatgaagcgcacacgattgagcgcggatgacgtgaaaatacctgcgacgatactgccgttcatggttggttttgatgcatgcgcagggaaaagtgacttctggcagggcgattcctcacgcctttttgccctgcgcaccgctcgccaattcgataccgcgtggtttgactccgcttacgagttaagcctggccatggcccacactgcctctctgaatttgaagaactaa

SEQ ID NO: 29940 - DNA, 6198 bp, Pseudomonas fluorescens
atgctctataaaaaaaactatttcagttcattggtacacagtctgacacagcgcagcgagcgtgcggcgcttggcttgctgggtatcggtaatgcgcctttgcgtcagtttctgcatgaccgtttgacagcgccaccgggcaccgaaggagcactgctggctgacccggttttcgagccgactttcggctggcaggaaagccaggaaaccatgtcgtcattggccggcggcccattcctgaatcgtaagttggcgcaggtaatggctgcgccgcccaaggagttggcagaggagtatgccttcccttctgatcgacacccgtttgaacatcagttgagtgcatgggaggtgctgaaccatccaaaaccgcaatcactggtggtgaccagcggcaccggctccggcaagactgagtgctttcttgtgcctgtgctcaatcagcttgctaatgaagttgacgctaccgtcgaccctgaaggcatccgtgcgctattcatatatccgctcaatgccctgatcaactcccagcaaagccgtctggatgcctggacggatggtttcgacggcaagatacgccactgtctctacacgggtgctttggaaaacgagcgcaaggcgacagaccagaagtacaaaggtcaggtgatcgatcgcaccagattgcgcgatagtccaccgcagatcctggtcactaacgcaaccatgctggagtacatgctgattcgtaaagaggatgcgccgctgcttcagaagtcggaaggcaagttgcgctggattattcttgacgaggcccacagttacatcggttcccaagcggctgaaatggctctcttgttgcgccgggtaatgctagcgttcaaggtcaaaccggaagacgttcgattcgttgcaacatccgccacctttggttcggatgagcagaccattgaaaacttgcgcagttttctggcagacatcggtggcatttcagtggatcaggttcacgtcgtacaggggcgacgcgagattccggtgctaccggtactggccgcgaataaagtagatgacttcccgcaaggcattgcagacatcgaccccgaccacgaagtttctgcacaacgctatttgcgtctggcagcaagcccaatagccgtcagtctgcgtgacgcctttgtgccgggcggtgaaacacggccgaaaacccttacagcccttcaggaaatatcggggttgcccctgagcgtgctgctggcttggctcgatttgatgactggcaccaagaatgctgagggacttgctttcctacctcttcgtggtcacctgttccatggtgtgatcccaatcatccgcgcctgcatcgacaaaaactgcaagctcaaaccgggaacggcactcggcagtcagggctggccgtttggcatggtctacaccgatgaccgcacacattgtgattgcaaagctccactaatgcctctggtgaagtgcgaagagtgtacagagctgttcttacagggatatcagaacgaaagagatcggttggtagatcattcctttaatcaggacgacgaattctccatgaattcggaacccatggatgcagagggtggggacgacttggaagccgacgatggcggcgaagcaatgcgtaccccggtattgataacgaatcgtccgggtgaggattgctacaccgaacatttggatcgcagcaaccagaagtttatcaatgcgccaatcgatgacagcattgaagtgaccttattccgtagcttggtcaacgagtgcccgtgctgcaacaacaaaagcaaatcgcgcagcattatgcgcgctcaccgcattggtgcaccgtttactctgggcaccgtcatcggtgttttgctggagtactgccccgaggataaaactccccaaggcaagccgttccaaggccgcaagatgatttcattcactgacagccgacaggggacagctcggatcgcggtcaagctgcagcaggactcagagcgcaaccgtatacgcggactggtctaccagcacctgataggctcgcagtccgtcaatacgctgactgatgacgaacagagcgatctcgctgagctggaagtgaacactaatcgcactaaattcgagcagaagttgttcgacatgctcattgctcagcgtgataactcaggtcctgcggaaatcagctggaagaccatggtcagccagctttcaagcattcctgaggtggaaattggcatcctcgattattaccgcaatctggcgccgcacgtttttggcgagcgcgacagcgtggcattggccggcatgctcatggcacgtgaattctatcgtcgccccaaacgcgctaacagcctcgaaaccatggggctggtgcaagtgacttacccgaagttggaccatgtaactagcactcctttggcatggcccaagggtaaaggcgtggactcatggcgtagctatctgaaagtgctcatggacttctatgttcgtgaaaacaccatcctgaatattgacaagcgttggcagtcgctcatcggtgccaaaatccaaccgaagtggctggtgccgtcggccgccgaaaacaagctgggccgccgttttgtccgctggccttctgtcaacaagggcaccagcgtgcagtcgcgccccatccttatgctctgcaaggcatttggctggtcagtgcagacgcacgagcaggagatcgacttcatcttgcaggacgcctggcgagtgctgactcaggaagtcagactgctgaccaacaaggctgatggctatcaactcgatcttgaggatctgagctttcgtctgccggagacggtctatttctgtgcggtaacgcgccgcttcattgatacccctttcgagggattgagcccttatacgccgcgtaacgaccgctatcatgtcgccttagtgaagccttacacgctgccgagaccgccacagtctttgatcgacatgcgcggcgacgagggattaagggcgctgcgggactggagcgaaagcgaaccggagatcgtccagctccgccaagaaggcttgtggtctgacgttgctgatctggtagtcgagggcggccactattttcgttctgccgagcactcggctcaacagccgaagaagaagctcgaccgctacgaagctgacttcaagctaggcaagctgaacctgttgagctgttccactaccatggaaatgggtgtggacattggcggtatcacggtagttgcaatgaataatgtaccgccgcatccggcaaactacctgcagcgcgctggccgcgctggtcgtcgtcgcgaaggtcgttcgatggctgtgaccgtctgcaagaacacaccgcatgatcaggcggtgttccgcaatccgctctggccgttcactgccggcatgcgtatgcccaaggtttcgctgcaaagccccgcgctgattcagcgtcacgtcaattcctggctgctttcttactggttgaaaaatatcgctggtgctttggaaatcaaatccatgaccgtgggtgccttctttctgaatggggatcttcccgtttccctggccgagagattccgcgcatgggttgacggtgagtctcatggcgcttgcgctgcggtcaccgaggcggttgccagcatcactcggcgcagcgtgttgtcttcaatgcctgtgtccggtttgctgaacgatgcattgaaaaccttgtgcgaaatccagcagaaatgggttggcgaacacgcgatcagtaaggctcaattggatgggattggtaataaaacggctgccgcttatcgggcgatgtctgcgcaactggctcgaatcgagaaggagtacctgctgagtgagctggctggccgccggttcctgccgggatacggattcccgaccgacatcgtgagcttcgacaaccagtgcatgcaaaacttcaggtcaaacgaaggaggcgcaggtcgcgaggataacaggggacgctaccgagacctggcatcccgcgaccggattacgggccttcgcgagtatggcccgggtgcagagctggtcatggatggcctggtgtacaagtcaggggggattactctcaactggcacgcgccagcctccgaggaaaacgtcaaagagctgcaactgataaagaaagcctggaagtgtggtgcttgtggggccagcggaacggggctcaaccccgggctcaatctgaactgtctggaatgtggcgctgaagtcgataagggcaacatccgtgagtaccttgttccgtctgggtttgccgtagatttttttgcagagccacatactgccattgagtcattggcgtatgtgccggtcaaaaagccgctgctgaacgtccctgcgagctggattgccttgtcgaaccctgcattaggccagttccgaagcagccatcaggcacacttgtttcattacacctctggggctggcggtaacggctttgcaatctgccttgaatgcggtcgagcagaaccgatgctggaggttgatgatagctcggactcgactgcgaccaatgagcagcgccttgcgcataccttccgtagtgggcaaacgcaccgacgcctgcgcggcggcaagaatgactcgggcgaaaacgtctgcccaggcagctataactcatggaaaatcaaacaggctatccacctgggtaacgacagcattaccgatgccctggagctgatcttgctcaaccccgatagcggcgagccgctcaaagatgaggacacaggctattccatcgctattgctctgcgtgatgcaattgctgagcaactgtgcgtacagccagacgagcttggctgcgactgcgagaacatccagatcgacgggcgttgggccagcgtgattcgtgtgttcgatcagcgcagcggaggttacgcgacccaagcagtgggtttgctgaatgagcgagacatgtgggagcgtgtgattgaccgactcgactgcaattgcagtcacgcttgccagtgctgcctattgagcttcgatactcgctttgaagcagaccgtctggatcgtcatgaagctctgaagtggatcaacaaggattggctgatgaagctggacctgccggtcgagctgaaggtgtttggcgtggatacacgacccgagatcgtcacactgtatgaggcaattgagcgggagctggcggctgataatctgaccaagacgctttcgatttacttgccggcacctgccgcagagtgggatctggctatcgcacgaaaactgcgtcaccaacttctggcttgggagggggcaggtcaccacattgcattgcgcctgacagaaagtaccttcagcgcgctgccctttgatcagaaagagtggctgcaccgactgactgtgaacaacatcaaagtcgaagtagaacaggtgctgttggacgtcggcgtgctgacgctgaatgcggtcctgtccagccagaaacagcatatcgcttgggctagcaatgacgagagactgctggcacctaacaaggattggaaccccgtcgctgctggatcgtgcatcgtgtacgggttgttgccagcccttgcgcaagcacgactgatcaccgctcaggatttaaaccagacatcagcgccgggaatcgtaaaagtcgagctgggaagcgagctggatggctcgctgagtgactttgcaaaacggttctgggatgcagttgagccaaaggccgggctgcttgactttgcattgagcggccaagacccgattgaaaccgtgtcgtactccgatcgctatgtatgcaacccattcaccgcctgcgtcctcgtcaacatcctgtacgagctgaaacagcgcagcggcgaggagttctcggtgaagattttggggcgtaagtaccttcgtgagtcaagccgtacttcctggaagtgttggcatgactggctgagtagcgacgatcgtgacagagctgttcgcaaggcgattgaatattgtgggttgtctggtgaagttctgagccagcctgtgcttgctcattatcgtcaattgcgtgttgggcttgcgtccggtcgaagcttgaccattcaatttgaccagggcctctctttctgggaagcggcgcgtagcgaaaatgcttactcgacccggttcgatttcgaggcaggggatctggggtgcgagctcatggagaagatcaaaacccctatcggtgccgctgctgacgacagaacgcaactgttcctctcattggacaaatag

SEQ ID NO: 29941 - DNA, 3090 bp, Pseudomonas fluorescens
atgtcccatgagcaaaccagtcgccacgtactggcgggccatcgccaatggcagctgaccaccgaaatcaggggggagggcaagcgctatattggacaggtcgccattaacggcggcctacccatgcgcctgctcgagtccgctcaaggtagcttgtcccgtcttctgcgtatggtgttggagcaaacgcttcgatgcaatctgcaccaggacgacttgttggatgctatcaagacgcaggcggcattgcttccggtaagctatcgtcaggacctcatttaccaattgctccgcgatctggtgtggggcgtattgcagctacgcgcgcagtacgggcttcagcatgagcccgatccgctcttgaagcttcaccagcaatgccctgactgggaaatgcggttcccgctggctttggatagcgccgttgctaccacgctaatcaaggggcttgtcgccagcgtggcgtctatcagcgcgcaaaacagtcgcgtaccgtttcagattgtccgtggtttgcgatttccgtccgatgacggaatgcccgtgtttgaaatggcatttgagatgcaggctcaggcatcgactcaagaactggctgacgccgtaggaattgctgccgataagttgcctcaccagttccggttgctgctgttggttgcgggcaaggaacacctaataggtgaagccctgcttcgcggaggcggctatcaattggttgcacgcaaggggctttcactgcaaaacctccatgcgggagcgcagctgatccttagccgcaacggtcaggcgatacatacggctcatctgccagggggggagccaatcagcttcgatgagcccttgctatttgaagacgcccaaccgttcgccagtcttatcgggcagggcagcgccacgctcaaaggggacagagcgatagccgtcatccccgaaaacgcgttttattactcggaaggcgacgacgccatcgttctgcatgaaggcatgcctggtgatcaggtcatgctaatcatctctcagggtaagacgcagttcacctatcgcaagcagtcctatcacgtcaccgtgagccctaatgcggcaccccggggtgatgcttattggcaagggcagactctggacgcgagctccgtgccggggctgctgttccgtggcaatcctcgcctgcgtgtccaacaggcgggtggcagctttacctatgctcccgtcaatgagctctatattcgaactaatggcatagacacaccgttcactcaggcgaaagctccgggcctatgctggcttagctggtcccgaggtgggcagcgtcttttacgttcacgtgccgtcgttttgcctgccaatgcatccattagctataccccgagcgcagatcctgccaagggctgcattcttctggaaaactggcctgatatccatgtcacctgcgccagtccggatatcacgctgtctcgtgcctatgaagacaaaacgaatgtcctgacggtacaaagcaaggctgcggcgccggctacctcggttcagctactaattcaatggccggaaggagagcagaagctatccctgccgttcccggggcaaggggccgttcttctggatgccaggcaagagtctatccgggaaggagcaaatctgtcggttgaggagctaatgggctgtcgggcaatcctgatgtctcccactggcgccgacgcttggcaagtacggttgactgcgcacagcacagaccaacctagcgcgcttacacgcgaaattcgctattcaggcactcgtgaaatacgtttgtttgaactgatcaatcccatccagcaaatgctgtcatgccatcccgggctcgacatgagcgtgacgatgcagttcgtccatgctcatcgagttcgagggacctttcacgtcggtcgttactccaccgttgctcgcctacacagtaattcgcagttcgtttcgctcaatgatggacggcgcgatttgttgctggagcgagaggacgcagagggcttactaatggcgctccccctcgcgttaccgaatcgtgaccccgagccgttatcgttgcacttatccgagcaggtattcaccggtagttgggggctaaaccttcccgataacgtcgccagcccatggctgatctacgccagcgctgagagtaactaccgttgccgcccgtgcgtcgcacctccgcaaggggacgccctggcgaaagggtttacaccactacaagaggctctttgcgaagcggattacaacaatcgcatggttctgctgatcagccgactggaacagatggcgttgaccccgatggataaggattgggtgttacttgaggcgttactggataaattgcaacacctaccattgcctagccttgatctgtatcaagcgctgatccgcacgccttctgcgctggttatggtcacgcttttgctggatggctttgccgccaacatggtagagcgcatgccgcttgagctcccctttgaatggctgttgatttctccttcccaatggcttcatgcatttgaggtattgaaagaggggctggtgaccgacactgcgctgctgccaatcatccgtaaggacattcagcgcaaaagccagtacctgccgcgctggcagcccgctctgaaattcatctttgatcagggtattcatcgtcacttcgacggcaatatccaggatgctcgcctttttctcaacaacccacagatgttgacggaactgtggcttggtcggctgcttgatgggccggactgtgaaatgcagcagttttttcatcgcaattatgcagacgatcaaccgtggccgacgctgcctggaaacttgatgaaggagtttatgcgcaccgacaacggcaagctcctcctgaagcgcgtacggctcagcgcggatgacgtaaaaatgccggcgacgatgctgccgttcatggtgggatttgatgcgtgcgccggaaaaagtgagttctggcaaggggactcctcgcgcctttttgccctgcgcgccgctcgccaattcgatgccgcctggtttgactccgcttacgagttgagcctggctatggcccacactgcctctctgaatttgaagaactaa

SEQ ID NO: 29942 - DNA, 6300 bp, Pseudomonas fluorescens WH6
atgcgtaacttcactgatcttgtcgagcaaacccttaaccgtacgcgtgaggcgaccttgggtgttctgggcattaatgatggcgggctgcggcgtcacttacaccagagcctgagttccgagctcggggcggagggctgcctgcttgcgcctcccgtgttcgagcataccttcggctggcacgaatccaatttgcagttgcaggatcttcaagcagaaaaactcctcagcccagaactccttgaaaccttggcgggagcatcggcgtacgcctttcccaaaactgcgcggccctatatccaccaggtacagtcctggcgttccctgctcaacgaaaaaccacgatcggccattgtcaccacgggcaccgggtctggtaagaccgaatgtttcatggtgccgattctggaggacttgatccgtgagcatcagcatacaaaacaggcgctggtcggtgtgcgggcgctttttctataccctctcaacgccctgatcaactcgcagcaggagcgcctgaacgcctggactcggcgcttcggcagcaacatccgtttttgcctgtacaacggcaaaacaccggacaaagcttcgtatgttcgcaatgaacaaaagctcaagcataaccagattctatccagggagctgctgcgccgtgagcccgcgccaattcttatgaccaacgcgaccatgctcgagtacatgctggtgcgtcaggtcgatagtccgattcttgaaatatctcggctgagtcagtcgctacgctggatcgtcctcgatgaggcacacacctatgtcggctcgcaagctgcggaattgtccatgctgttgcgcagggtggtgcatgctttcgggcgcagtccagagcagctgaggtttgttgctacttccgcaactattgctggtgctgaggccaccgaccgcctgcgccgttacctggcgcgtttggctggggttgcggaagagcaagtggatgttatcgatggctctcgtaagtggcccgatttgcctgacgttggccgccagcaagctttgagtcttgccaccctgcagtccatgcatccgacggaagaagtgtccagtgagcgctaccaggcgctgtgtgctcatccgatagccaggcaattacgccacgccgtggtgagcgcagggaaaccgctcgggttgaacgacctcgtcggcgaagtttccgcgcatttcgagagcagtactcccgccgcacagcaacgagaggcattgcagtggcttgatgttttgaccggcactcgcccagccgtaaatcagccgccgtttctcaagttacgtattcatatgtttcagcggatgctgcacgggttgtggtcatgtgtcgatccgaactgcaccagcaagtccgaccatctccagcattggccgttcggcaatgtttatgtctcgcaaaaggcacgctgcgagtgcgaggcgccggtgtacgagatcggcttttgtgaggaatgcaaagcgcctcacctgctggctgaagaccgtaacggggagttgctgcaaccgcgcgccttcgccggggacgagtttgcgctgaatcatgacgacgccgatgaaggcgaggcggggagcaacggcccttcgaaaagatcgcgcactcctacccaacgcctggtgatagccggcggcaccagtgtcaatgggccgttccagcgcctgtcccttgatctcgtgacccagaaactaggctcggtaaacgcgcaacgctccctagacattgcaatcgccgccgaaggccgtgaagacagcgtcaatggtcccgaacattttgcctgctgcagcgcctgcgagcatgcagtgttcggttccagccgttttctacgccgtgcctatcttggtgcgccgttctatgtggccaacgccgtgcctaccttgctggagttttgcccggatccggaaaagggcgacacggagggacgctccccagaagagctgccgggccgtggtcgcaaactaatcacctttaccgatagccgccaaggcacggcacgcatggcggtgcgcatgcaacaggaagccgagcgttcgcggttgcgcggcctggtattcgaaactctgagaaacgctcaggccaaggctgactcgcaaccgcagaacgcgcccatcggcagcccggagcagttcctcgccagcgcagcggcgctggatgtgatcggcatggtggtggaggctgccaaacttcgccagaccgcagcagatatgcaagctggagttttcgctgcaccagccgctgtttcgctgacctggtctgagatcctgcaagtactggcggcagccaaggatatcgatccctttatcatcaggtacaaccgccagtctaacccggcattgttcgatggtcatgaaggtggtctcaccatggcgcgcctgttgatgagtcgcgagttctccagaagaccgaaattccaaaacagctccgagacacttgggctgatccaggtcggttacaccggcctggacaaggtcacgctcaccccgccgctctggactgctaccccagcttatgtcgtcagtggcccggcacaggaaccacgcaccgccttgacgctgcaagattggcgcgactttttgcatgtggcgctggacttttttgtgcgggaaaacactttcatctcgatggaaaataagatgcggcgctggatgggcagccgtttcagccctaaagcactgtatgcgccgaccagcgatgtgcaggaaagcagcaccatcaaaaagtggccgcaagtaaaacttcatagcgcgcaccggctggtcaagcttctggaagttgcaaccgggctcgaccgtcgcaacccgggcgatgccgccactataaccggctggctggaaggagcatggggtgcccttatcggtgctcatatcctcgaatcgtcagacaccggctaccgcctgaaactcgagacgctcaacttctcgctaccgaccaaggcatgggtttgccccgttacccatcggctaatggaaacgacgttccgcgggctcaccccttatttgcctcgaaccataggcgcgcaggactatcactgcacccgcgtcaacctgccaagctttgctgcgctgagcccggatgccggctcggagccgaagcagcagcaagttcgcaagctggtcaatgccgacgccaccgtcgcagacctccgccagcaagggctgtggaacgacatctgcgaccgcaccctggaggggggcttttactaccgcgtcgccgaacactccgcgcaacagtccgcagagttactagacaaatatgtcgagcagttcaagcgtggtgacatcaacgtgttgaactgttcaaccaccatggagatgggcgtcgacattggcggtatctccgcagtggtgatgaacaacctgccaccgcatccagccaattacttgcagcgagctggccgcgccgggcggcgtaacgaggcacgtgccatcgcatataccttgtgcaaggccgacccgcataaccaacgcgcgtttgccaaccccaagtggccgttcgttacggccattccggcgcctactatcaccttgagctcgacgcgcatcgtgcagcgccatgtcaactcgctgttgctgggtatttttctgcgggcgcacactagctccgacggtgaccgcactaagctgaccttgcattggttcttcggctcggacagctcgccttgccagaacatggcggggtggctgcaagcttgtccggacgaattcgcacctgccgtgcgtcagctggtggcgggtaccagcctcgcagggcgcgccatgaactacgtggtcgagagcaccctcagcgcgctcaaggctttggagcagcgctgggtggacgagtaccgcaatctcgacgagaaagtccagggtgccaaggacgaggcctataagcgtgcgttggccttggagaagcggcgccatgagggtgagtacttgctgcgcgacctcgcttcgcgagcgtttttgccaggttatggttttccgaccgatgtggtcaccctcaagacctacaacattgaagacttcgtgcagaagcgcaacgagcaacaaggtagtcgcgaagacagcctggccagcagccgcgaaatgccctctcgcggcctgaacattgccattcgcgaatatgcaccgggtgcgcaaattgttatcgacgggcgagtgtttcgctcggctggcgtcagcctgcaatggcacgccaatggtgagatcaatgaagcacagaaattcgacctagcctggcggtgcccggagtgcggcaacagcggcatgatcgaaaacgcctatgccaacagcgacaatgtgcgctgcatccattgcagtacctcgatccctgccgagctacgtcgccgcgtgctgcgccccgccggcttcgtcaccgatttctatgaagagaccaccaacgacgtcacctcgcagaaattcatccgcgtcgaggaaccgcgtattcagctgaatggggagagcagtgccttgcccgatcctcgctgcgggttcttccgcttcggccacgacggcacggtcttccatcactcgtccggtgagcacgagcagggttacgcagtgtgcttgagttgcgggcgggcagaatcgatgctcccaggagcggaagtacctcccggcttgcgcgccgatcagcagcatcgcccagtcggcggggtggctggcagccgtaaggacaaggactgctccggcgagggggtgacccatcaagtgcacctcggctaccagatccacaccgacgttctggagctttatctgcgtaacccgttaacggggcagtggctgtccgactcatccgatggtcgagttatcgccgcgactctgggcgcggcgctgcgagacgtcatcgccgaccagctcggcattgtcagtaccgaaatgggcttcagccaccgggtcgaccgcgaccgcgaaactcgtcagggccgggcggtaattcagttgtacgacgaggtcagcggcggcgcgggctttgtcctggaaggcctcggcgacatcaccagcctgttggccaaagccatgcagcgtctacattgcccggccgattgcgaaacggtgtgttcgcactgtctcgctggccaggacagccgggtcgagcgcgaggagctcgatcgacgcctcgccctgcagtggttaatcgacgccgccttcgtcgaccatctgggcctgcccgcagttttcgatgaaatacccggggcacgatactgcccggtcgggccgctgcgttatctggccagtgcccagaacagccatgagcaggccgcggcaccaactcggctgctcctgtgtttgcagggcgacccgcaggactgggatctggaccacccgcgcttcaggcagcaagtgctaacctgggcaatcgccgatggcttgaaggttacccttggcattgcgccggactgtgcgctgagttccgatcaaaagaacgtgctgctgcaactggttcggatgggcatagaactaggcgaactgccaaagcgcggcgcctcgaccaccgcgctactgctcgcacagctagacaccggtaacctttgtcgaagtgtttacgcgagcgaggagtcagcggcgctaccaggtgccggttggctgaatggcaaaggggacatcacttgggtcgccacttgtgcagtgccggggctgcaaggccagtcgctcgacaccagttcatggcagagcgacacccaggcagctcgaatcgttgaagtcaccggtgagctggatgggccggtcaataccttgagcaaacgactggcgaccttgatcgataccaaaatgccggagctggcccaactgctggagaccgatcaggccgtgaccattagctactccgatcgctatttgaaatcgccctggtcgctgatgctcttcaccggcttcgtcaagctattcgagggggcggaactcaagacgatctccgtggaaaccctaagcgtaggcggaggccaacccagctcccacatgagccacgattggcaacgggcggaggatcagaaagcgatcatggctgagtggttggcagagcagcttgggatcgagccgcagatctcgctcgagcgtaatagtcgagacatattgcacggcaggtccttgagcgtaacctggcgttcagggcgggtcagccagattttgctggatcaggggatgggttattggcgcccgcgcatgccttaccgtgatgagttagattttgacttccaggcgtctgcaccgcggcaattggaggacattggagagaaatattccagggcgcagatgcagcagggtgggcagtggccgacgtatattagctgcatcaatgagatgtag

SEQ ID NO: 29943 - DNA, 1905 bp, Pseudomonas fluorescens WH6
gtgctgaccggtgtttacgcgctatttgagtgctcgccatctacggtttatctaggctggccgacattggagttgcctgagggcagtccctaccgtagggatgagctaatggagtacgccaacggcaggctacttgaccggcgcaatgctccagcttttgacgcgataaattacaccgtgcgcagccgaaaaggggaaacactgctgcggcgtcggtttggcgtgttgccccggggtttcgagctggggcttatacctgcgtacggtcggcgccccgctcggttgctggtcaagaatgccgaagacttagcgctgcaggtggcgggtgaagggctggtgtgcacgcgtagcgagggcggctaccagatggatttgagcgctcagcactgcccgcaagcttttactttgctgatcggccccgcaacagatcccgtgcagctgcgcttgccgtttccttaccaaggcgcccgcttgctcgatgtcaacggccaacctgtctcggtcaaggctttgaatctcgcggagctggtcgggcatcgccttcagctgagttccggcttgcctcaggggcagctgttttatctacagttcgaactgatgtgccgggaacggtcccgccctaaaagagtgttcgcacttcgcgtcggccagatgcctaccgtccttaatctcttcagctatgtcgccgacctacaaaccatgctggccgccgtcgatgagcaggacgcgtatgttcacttgaccatcgaaaccgaacagccattgatgcagctggacatcaggaggtacggcggcagggtggtgatggaagaagccacagccttctacatttgcggcgtagaaagtaccaacatcctcgatggtgcccgagccgaagcaatgctgttatccgaccctcgacaatcgccattgcagctgattgaaaaaactagtgaaggggtagggacgggttgctttgctatacctcagccgatgctcactgacggcccttggttgatttaccctggcaaggagtcgcctatccaattccggcctcaactatatctgcctgcctgtatgagcgtccctatcgatgtacaggtggggtcgctgcaccatgcagcacggatgtttcatccggtccaccaccccgaagttatcgaagagcagataacagcgatggcggcagactttggccacagtggttggcaatacctggctgatttgaaacgccagtatgctcacctgccattgtcttcgttcgaagcctggaaagccttggcccgaaatcctcaagcactagggttggcggttttccggttggagatggacgaagcattttgcgctcgcatcgccgatgagctggcgctcatgtgggaaactgtacccttacccatgtgggcccatgcccaccaggtctttgcccaaggtatcaggctgacaggcctgcctgcggagttggtcgaccggctggtgaaagaccgcgctattgtacttcgctacatcgtttccggttttgactatgtgggcaattatctcggcactggagattgcaccgagctgaagcgcctgccagccgaagagattctaccaatgtggtatcaggatttgcgtcggcttcatgcggctaactcagattggccaaacgtgctcggagaggcgttggcgacttgggtcggggcgcgacagttgccgcaacgcgtcaagtcaatgtcgttgaccgagtacacggatgccgttacctacctaccgatctttatggcctatgtgaccgcaggtaaagcctcagtaaaagatctcggtattccaaccgcctacttcaagttcgccgcgcgctggctggctgattttgatcggcacggttggttcaatccggtccatgcgttcaccgtctcttatttgcttgcaacccatatcgatagctaa

SEQ ID NO: 29944 - DNA, 6336 bp, Pseudomonas psychrophila
atggataagtatttctcttcgcttgtcgagcaggcgctgtcccgcaccacagaatcaaccttaagtgttttgagcattacagatccgggcttgcgtgagcaccttggagggctcatgcgagccgagtgtggcaaggagggctcattcctggccccgcccttgtttgagcagaccttcggctgggaggagtcgccttttacgatggcgcagttggcggctcaaaagcagctacttagcaaagagatcgtggcgtcgcttgatggtaaagccaacgggcgctaccgctttggatcgacttggaggccgttcacgcaccaattggccagttggcactccctgctggaaaagaagcactcagtagtggtcaccagcggtactggctcgggtaagaccgagtgctttatggttccggtactcgatgatctctaccgggagtaccgcgatatcggcagcaagccgcttgtgggtgttcgagcactctttctctatccgcttaatgctctgatcaactcgcagcgtgagcgtctgaatgcctggacacagagctttggttccgggatacgttattgcttatataacggcaataccgaggagttgcaggccaaaaaacgcaccgagcagattgaacggcccaacgaaattctgtcgcgagagctgatgcgtgagcagccagccccgatcctggttaccaacggcaccatgcttgaatacatgatggtccgtcaggtcgatgcacctatagtgcgcaaatcgagagagcagaagtcgctccgctggattgtcctagatgaagctcacacctatgtaggatcgcaggctgctgagctggcgctacagttacgacgcgtgatgacagccttcggtgtcatgcctaaggatgtccgctttgttgcgacctcagcaactatcgccggcgatgacgctgccgagcaactgaaacagttcctctctgatctgtcaggggttccggtcactcagattgacgtctggggtggtaagcgggtcattcctgagcttgcatcgtgccggcagaaaccggttactttgcagcagctcgagtctatgccagctgcaaaccaagaggatccggagattcaccccgaccgttatgaagcgcttgtgcattcgcccatagctcatgaattgagaaacgttctggtgagcgctcccaaaccgttgaagctgaccgagatggccagccatatgagtcgacatcaggggcagtcgttaacacaggatgagattttgcgctggttggatctgtgctctggcactcgccccaatgagtctgagcctgcgttcttgaaactgcgggcccacttcttccagcgcaccacccacggtctttgggcttgcttcgataagtactgttcagccaaacatggtacgccgctacaggagaagtggccctttggttatgtctatgtgaaccagcgacaagcgtgctcctgtggcagccctgttttcgagttggttttctgcaatgactgcaatgagccccatctactggcgcgagatcatggcggaaagctaatccagtgggagagttcagctggggatgagttttcgctccaagctgaagcctcggttgaggaagatgcagatagtcctggtgggaacctgctaaccaacactcctttggtgctcggtactgttaacagtgacggcccgtcgtatatccctgtcgagttcgataagcatgcagggtcttttatgggtgtctccggcgagcgtgtgccgctgcgcatgaacgacctcgatgtggtttgtagccggaaagactgcagctacagcggatatcaaggtgctttcccgttccgtcgtgcgatgttgggcggccctttttatgtagcgaacgctgtaccgacggttcttgagtattgccaagactatcaagatgacgagcaaaaaccggagtttggcccgcagtctttgccagggcgaggacggagactgattacctttacagatagccgccaaggtacggcgcgtatggcagtgcgtatgcagcaagaggccgagcgcagcaggttgcgtgggctcgttgtagagattttgaactggcatcagaaaagccacagcaatgcccagacactatcaagtagtgttggaccagaggttctgcagcaactaattgctaaagcaaaggaagatgtgacgctataccgcagcctaggtatcaaggaggaggtcagggttgctgaggacaaggtagcgcgctttacggcgctgcttgctgcggccactgggttaaaggttcggccggagcttgtgtccttggcttggtcagagcttgtgaatgagctaaaacaacgggccgatcttcaagagaaaggccctatgctgcttgcgaacaagtatcagaagccggagatatttaaagagacggatggaccacaaaagctggctgagatgctgcttttccgtgagttcatgcgcaggcctaagcgccaaaacagtttggaaactcaagggctggtgaaggtcagttatcttgggttagaaaaaattcaagaagccccagcctattgggagcagaagggcctgaggccggacgattggcgcgacttcttgaaggtcgcgctggacttttatgtgcgcgaaaacagcttcatccaaatgactgaggagtggaaagactggattggtagccgtttctcttccaaaactttgcgcaaccccgaatctaaagaagctgacgataatcgagtgaaacgctggccgcaaattcgtaacggcaaccactcacaccgcttggctaagctactactgttgggggcaggtctgaatccctcaagctcatctgatgttgacttggtcaacgcctggttacgagacgcctggctacagttaaccaggcctggcgcggcgttgaagtctgatgagaatcggtactatttgcccagagagcacatgctttttttgttggttgatcgagcatttgtttgtccaattactaacaagctgcttgatacaaccttcaagggatttacgccttacctacctgcgcacatggacttttcgaagcttacagatgaaaagcgtaaaagttttgtttgcgagcaggttgagctacccagtatttgggagtttgatcgttcgcaggaagactatgcgccgggcctggcgaaaatcaggacccaggttgcggcagatgctcccatcaacgaattgcgtacgcggaatctttggacagatatcaatgacagggcagttgaaggcggcttttattaccgcactgctgagcactcggcgcagcagtcttccgagcgcctcggctcctatgaagacatgttcaaaaaggggcagatcaacgtcctgaattgttccactaccatggagatgggtgtagacattggcggcatctccgctgtggtgatgaacaacgtgccgccacatccggctaattatcttcagcgtgcaggtcgggcaggccgcagcaaagagtccagagcactggcttatacactttgcaaaaataatccgcatgaccagcaggtttttgccaaccctagctggccatttgaaacaaaaatccctgcgcccgcggtagcgctaaactccgcacgtcttgtacagcggcatgtgaattcaatggtgctgtctgacttcctctgcaatgtcgttggcccgactcaaactgagaagaccagtctcaacgctcagtggttctatgacgatacgaaaggcggctcgcagtgcgaccgctttcttgaacgtttggggctcgctgtttgcgacatggatgaggcgctttcgctattggtcaagggaaccgccttggcagggataacgcctgatcagctgcgcaggcgctcaatggatcagttaaaggcgttacaaggccgctggttggggagttaccgctatctgctttcagaagagcagcaggcaaaacctaacagcccttacctcaagcgtcttcaggtcgagaaagcacgccattgcaatgagtacctgttgcgtgacctttctgctcgcaccttcctaccgggctatgggtttcctactgatgtagtcaacttcgataacttcactattgaggattatatccgtgagggaggagccgagaggaaggtaaagcgcgaccgtgaggataatgtgtcccggtataagggacttccttctcgcaacctggcgattgccatacgagagtatgcgccgggagccgagattgtattggacggacgagtctttaaatcagctggtgtttctttgcattggcacaatctaaacgctgataccaatgaagctcagaggatggatatcgcttggcgttgtgacgtctgcggcgagctcggctatgaggagggcttggtcaaaagtgatgagctgacgtgtaccaacgatgagtgcctcgccatcattaagtcggcaaatatccgcaaggtgctgcagccatctggttttattacagatgcatatcagtctgcgtcgaacgatatccagcatcaaaaatttgtacccgtcgaaactgcatgggtctttgtgagggctgcgaaaaccccgctaccgaatccggcggtgggagcaatggcctatggcacggaaggccaggtttttcatcacagttccggcgagaacggtgctggttttgcactatgcatgagttgcggtcgcgcggcatcaatgctgtcagcagatgagttcccgcaaagcctgtccccatccggcgaacactttccaccccggcctagcaaagctgataaagaccagaacaacaaaaggctgccttgccaaggcagcggtagtatcgttcccaatgtcagcttgggtgttacctcctttactgacgtgttcgagttgatgctgcaccatccagtaagtggagagtacatcgcagataacgaccaagggcgttgtatcgcaatgactttggctgtggccatgcgttcagctcttgccgagatactaggggtttctgcctctgaacttggttatgcaacccgaccaagcaagctggaaaacggccagcccatcagaattctgcagctttatgacgtgatcagtggtggtgcaggcttcgcctcgagcgctcccttgcatgtcgaaaatctgctgagcaggatggttaaaactctgcactgcgatcattgcgagagcggttgcagtgaatgcctattggactctcagacccggcatgatcatgacaagctggatcgaaaactggccaaggactggttgggcgatgacttcgcccactacgtcggcctttccattgaagacaagctgtccttgccagatggaaaatatgcgcctggcagtatcgaaagcgttttgcgtcgcttgatcaatgaaggcgtggagaaagttacgctggtagctgcaggagatccgaatgaatgggatctacttgccccgcaattccgtaaggcaatccagcgttatttgaatattgatgaagtggccgtcgagcttcttgtgccgaatggcataaccgatgaagatcttttgcaggatctgcagcgcctttctctacttggtgtaagtgtcggctgctactcgtctgattacaaaaatcatttcctcgtacaggcaagcagggcgggcgagataattacgcttgcctcgcgctcagaactggcagctgtgccaggtcgttggtggcatcagagtgatgcgctggtggtggtttcacggtctcaacctgcaatcagttggaatgcatttgaccttacaagagctgggagtaagcccgccggcagtagcctaatcatagacttaccgattcaccaagaactcaacggtcctttactgacatttggcgatcgcttctggtcgcttctcgctgagaacgcgcaaattgcggacgtgctggaaactgcaaccatctgcagaatccggtactcggatcgatatatccaaaacccatccgtaatcgcgattctgggtactttgttcaagtttcttaaagggcgtattgctgatgatgccgagcttcaggtttctacgttgttcaagctcggaaagctgcaaggccgcaaggcttttgatgattggtccagaaaagacgacttcgaattcttcgtcagtaaatggttatcggcgatggccggtcagaccgtaaatctcgtgcttgagacctcaaaccgtgatatcccccatcggcgccgacttgatttggaatttgaagatggcagaagcctaacggtgaggttcgaccaaggaattgcctattggcaggttcgttttcgctctcatgcagacatgtggtttgactttgatctcgaggcccgtgatcaagtgatgcacatggctaaagtggttgaaacagctcaggtgcagaactcagagcagaagtggtcgacggatgtgcttgtggagctcaacggttaa

SEQ ID NO: 29945 - DNA, 3336 bp, Pseudomonas psychrophila
atgcctcaatctgtattcaaattctctagctggctcggtacatttcttctacgccgaggtgttcaggcacctgactatcgcggcttgtacgcctatcactgcagtcatgaagagtacctagacctgttgcaacagctcagggatttagaaaccttcgacaaggcagtaaatgacacagctgccagcgcctgtttggttcttttctgctcagaatggtaccggcgtgagtaccagcgcgatcatggctggagctgggaaccgatatggaagacgctggggttcagtctatcgccgggcgatctcggcaaaacgattccaaaagggttggagcactactggaagcggccgatgcacttctacgagtctgagcgtagggattttctcggctcattgttcagtgagggcgggctgccttttcaagtactacgtgaaggtggaagccgttttcacgcattgttcgaccgaatcctcaagcagtatgaccagtggcatattctgggctatagcacggcacagcaagtagagcagcagttggagaaggcgaacttaccgaaggtatttgcctcgcagacttcggtggagctgattgcgcatatggccgatcagctggtgtccttggtgcgcgactatggcttggtgcaggcagccgagcctgttgctcgcttggataccatgaatccgaaatggcgtgagctgttcccactaccgctggataaccaaaccggcagtgagttgcttaacgggctgctgaataccgccacggtagaggatggaaaacgtcgcaaagaatctggcggttgggcctgtcgacactttttgcacgaagcagaacccaatgtgctaaaggtgcaggtatcgctgccggcagaagtggttttccaattagctatacaaccgtctaccactcgtttcgaacttacgattttggaaggcggtgaggctgttgctcgacttggccccggttatgctgttgtagacaagggtgccgcccggattaggttgcggcagcgtgaggtaatggggcgccgtggtgattgctctctgtcactgagcttggtggctatggcggggggcatggttatcgcttcattacccattgagaatagcaccgtagcgctaggagaggttcctgtgggctttgaaccggtgaatgaccgctggcagctatgtggtcaggcatcattcgatagcctcagtgaagaactattgcttgtgctaccgcccgacagcgcattgggccaggtagacgccccgggcgatgtcagcatcaccgagatatcttcggtactagctctgcgtgcattcaaagtacagggtaaagcggagttcaaagttgattgcgaagggctttacagaattcgcacaggacactcagctggttcgggcctcggactggagctggcgggtagccagttaggctgggctacaaaacccgcacttacttttttaggtctgcccaaggtgcaatggcctggagctacaggtgagctgcaaacacaaggtggcgatcttttcgttggcggcaagcaacccggtagcagcttattacaggaaatgcttggcgcccaatatgtagcagttcgcaaccgcagtggcgacacgttgttgcgtcgtaagatcggtatcctaccggctgacttccgtcttgaattgcgcagtggcgaaaggcctggtcagggcagcattctagtgcatacccagcagcgttgcttgttgagaatagtaggcgacggtcttcacactcagcagatcaagcgggaggatcatgtcgagctaaaactctcgacagagggtttgccgccggtcaggatccgtctttcagtcacgcccagcctattgtcagatccagttgagattgagctgcccttccccaactcgggctgtctggcgattgatggtagaggtaagcaactcaagcgtgatatcagtgttgatgatctgctaggcgcgcgtatttatttgtttggtcgccacggcgcgcctaccaagttcgggcttgagttgactctcaaggggaataccgcaaagaatgcttcttacagttggtcttatacggctactgaaaagcctgtagatatcagcctgtttaacattcgtgagcagattgttgatctgctttcattgcagtctggcatcgatcaggtcgtggaattgcgggtgtttggtaacggccaagacgccaatttccgagttcgcaagtacgcaacggagatggtgctggatcgtgatcgtcaggtgcttcgcgcctccaatcttcaggatggcaataccgccttacctgagccgattttgatgttgctgcatgagccgatgcgcggtgccgttcacctcggttcgcgttttagcgaaggtgttcccaccggcgagtttgagctaccgggattggttgaaagaaacggtccttggcttttgttgcccaggcaaggatcacccgtgtcattcaggcccctgtttattgccggtggttgggagcctgtaccgcaaagcgacgacgcccacagtttgcagaaagctgttttgacctttgatcatgcttctcccgtcagctcctttgcgcctgttctagattccatgtcagtgaaccccatgcacagcggatggcaattttttagagcgctgtatgacggctacggttatcttcctttagcgacgtttgaggcttggagagcgctcgtgggacacccccgtgcgttgtcgatggcgctgttcaagtttgaaatggaaccgaagtttcttagtagaattgagtccgagttccccattttctgggagtttctccccgtcactgaaattcatctagctgccaagcgtttcggcgcttttcttaaggttaagggcgttgctgatgaagccgtatctgcattggttggcagaatgttcgccagattaggggaggccttcccaacctatggggagagtgtgcagcgatatctttcaggaaaacctgtggggccggaaatccacatggatctcaaaacattcagggctgtaattcacggctggtatatccaattgatgcgagatcggagtgacgccacttggcctaaatatggtggcaagaggttggagcgctggcacaacaaacagagtgattcggtaatttcttttcggctagaaatggattaccgaaatgctgtggtctacctgcctgttttcgctgctgctatcgctagtggtgaagcacagttttccgatgttttcgaggatagtgtcgaggcgatatttttccttcggcaggttcgcgattttgattcgagttggtttaacagcatttaccaatattgtctgttgaacaatgtcatgggtatgcataaggcggcaccagtcaatggataa

SEQ ID NO: 29946 - DNA, 6255 bp, Pseudomonas putida TRO1
atgcgctttttcaggaatctgatcgagcaaagccttgagcgcacccgtgaggcaacgctcggggtcttgggcatcaatcatccgggcctacgtcgtcacctgaacgaaagcatggtgaacacattgggggctgagggctgcttccttgccccgccggtattcgagcatacctttggctggcaggaagccgagctgcgcctgcaggatctgccgtcagagggcttgctgtcgcccagcctgctcgacacactggcatgtgcgccagcctaccgattcccgaaaacggcacacccctatgtccaccagctacaagcctggcgcactctactcgacgaaacaccacactcggcggtcatcaccaccggcaccggttcgggcaagaccgaatgctttatggtgccgatccttgaggatctgatccgggagcaagagcgaaacgaggcagccctagtgggagttcgcgctctattcttatacccgctaaatgccctgatcaactcccaacaggagcgtctcgacgcctggactcgaaaatacggcagcaacatccgtttctgcctgtacaacggcaagactgaagagcgcgccgacaaggtccgcaaggagcagcaaaagaagctcaaccagatcctgtcgcgggaacttttgcgcaaggagcctgcaccgattctgatgaccaacgccaccatgctggagtacatgctggtgcgtcaggtcgacaactcgattctggagatttccaggcagcagaaatcgttacgctggatcgtcctcgacgaggcacacacctatgtgggctcccaggcggccgaaatgtctctgttgttgcgcagggtggtccaggccttcggccggcaatccgagcagattcgcttcatcgccacatcggcgaccatcgccggggccgatgcggaagatcgactgaaacgctatttggccaacctggcgggcgtcccgcttgaccaggtagaagtaattggtggatcgcgtgtctggcccgaccttgagtttgattcgccaggcaacaatatcgccttgcaggctatcagggacattgagccggaaacggcagtgtccgctgcacgcttcaaggccctatgcgatagcaccaccgctaggagcctgcgccatgcagtagtcagctccggcaaacccctagatcttgatgacctgattagcgcagtttctaaccaattgcagggaggcagccccctcgagcagcagcaggaggtgctcgactggctcgataccatgaccggtactcatccggccgagcagcagctgccgttccttaagctgcgagcccacttgttccagcgtatgctgcatggcctctggtcctgcgtcgacccacagtgcagtgccaaatctgctcatctgcaggactggcccttcggtaacgtctatgtgacccagcgtgcgcgctgcgagtgcaatgccccagtgtacgagctgggcttctgcgacgactgcaagacgccgcacctgctggcagaagatcgcaatggcgaactgcaccagcccagcccctacgccggcgatgagttcgccctcaatcacgaaatcggtggcgaagacgcgccagtcgaactgctgacggcgaatgccatgagcacgcgtttgatcattgccgcattgccggcggcgcatggcccctatttctcgatcagcctcgatctggaaagccagaagctgggagcagtgaatgctacccgcaacatcggcattatgctcactgaggaaaaggactgctgttgcagcctctgcgacaactcgtcatttggcaccaacgacttcctgagaaaggcctaccttggtgcaccgttctacatcgccaacgccgttccgaccgttcttgagttctgtcctgatcctgacaaggaagactgcgaaggccgctcacccgaagagctaccgggacgcgggcgcaagctgatcaccttcaccgacagccgccagggcaccgcacgcattgcggtgaggatgcaacaggaagcggagcgctcccggctacgcgggctggtatttgaaacactgaggaatgcgcaggccaaggccgatgccgctccgagggacattcccaacggcagtccagccgaactgctcactctggctgaaaatctggaaaaacaaggcttggctggcatggcggcagtactgcgcaaccaggctgaacttttgcagagcggcgctgcgcctaccaatcaggccgagaccattccttggccgcagatggccgacaccatcgcggcagccagggatatcgacaagttcatcctgcgctacaaccgctatgccaatccggcgctgttcgatggcagtgaaggtggtctgactatggcgcgcctgctgctggcccgcgagttctcccggcgccccaagaaccagaacagcacggaaacactgggactgatcaaggtcggctaccaggggctggagaaggtgtcgacggctccaccgctgtgggtcgatacccgcgccattcccgccctgggcgctgcaaatgattccagaagtgctctgacgctggacgactggcgcgacttcctcaaggtggcactcgacttctacgtccgcgagaacaccttcatcccgatggaaaacaagatgcgccgctggatgggtagccgcttcagtcccaaagcgctttactcgcccaagagcgacgtgcaggaaagcagcaccatcaggaagtggccgcagatcaagacgggcacgccccaccgcctgatcaagctgctcgaactggcaaccggcctgaatcgcgccatgaatgcggatgcagacaagatcaacagctggctcgaagcagcgtggctggcgctggtcaatgccggcattctggagtcctccgacaccggccatcgattgcgcctggaaaccctcaccttctcgttgcctaacgagggctgggtctgccccttgacccggcgcattttcgataccaccttccgtggtttgacaccctatctgccgcaaaaactgctgagccaggactaccgctgccaaaagatccagcttcccgccctgagtacactgatgccggacggctccccggtacccaagcaggtacagatccgtcagttggtcgcaagagatcccgtcattgcccagctgcgccagggtagcctgtggacggatatcagcgaccgcacggtcgagggtggcttctactaccgaaccgcagaacactcggcgcagcagtcggcaaaacggctggatgactatgtcgaggatttcaagcgcggcgatatcaacgtgctgaactgctccaccaccatggagatgggcgtggatatcggcggcatctctgccgtggtgatgaacaacctgccgccacatccggccaactatctgcagcgcgccggtcgagcagggcgacgcagcgaggctcgggccatcgcctatacgttgtgcaaggccgatccgcataaccagcgcgccttcgccaatcccaaatggccgttcgtgactgctattccggcaccgagcatcaccctcaactctgcgcggatcgtgcagcggcacgtcaactcgctgttactggcgctattcctgcgcatgcacagcagcaatgatggcgaccgtaccaagctgaccctgcactggttctttgctccagacgactcacccgttcagcagttcatggcctggctcgcggcaagccccaatgaatttgaccgtgccgtaaagcagctggtgcgcggcacctgcctggaaggtcgctcgctcagctcgatcaccggcgaaactcggctggcattgcgcgacctcgaggagcgctggctgggcgagtatcgcaatatcaaccacaagctgcaggccgccagcgacgggccatacaagaaggccctggcgctggagaagcagcgccacgaaaacgagtacctgctccgctatctagcgtcgtctgcattcctgccgggctatggcttcccgactgacgtggtgagcctcaagacctacaacgtcgaggacttcctgcatcagcagcagaaaagcgatgccagtcgcgaggacagcatcttcgacaacaaggaaatgccctcgcgcagcctgaacatcgccattcgcgaatatgctcccggcgctcaggtggtgatcgatggccgcgtataccgctctgccggtgtcagcctgcagtggcatgccgacgggcaggtcaacgaagcacagaaattcgacatcgcctggcgctgccctgaatgcggcaacacgggagtgatcgaaaacgcctatgccaacaacgaggggctgtcctgctcgcattgcacgactcccattccacccagcgagcgccgcatggtgctgcgtccgggtggcttcgtgaccgacttctacgaggaaaccaccaacgacgtcacttcgcagaagttcatccgcgtcgagcgaccgcgcatccagctgaatggcgaaagcatcgccctacccgaccagcgctgcggcttcatgcgcttcggccatgacggcagcgtctttcatcattcgtccggcgaacatgaaatgggttatgccgtctgcatgacctgtggacgcgcggaatccatgcttgcctcgggcgaagtgcccagagatctgcaacccgataaagctcatcgcccggttggtggactggccggcagccgcaaggaacgcgactgttcgggcgaagcggtcaaggccagcctgcacttgggctaccagatccgtaccgatgtgctggaggtcttcctcaggaatccacttacaggtgaatggcttcccgacactcccgagggccgtctgattgcgacaacgctcggcgttgccatgcgcgacgtgatcgccgaccggctcggtatcgccagcagcgaaatgggcttcagccatcgcctcgaccgcgaccgtgacacccggcaaggccgctcggtcattcagctgttcgatgaagtcagcgggggggccggattcgtgctggctggcctgagcgatatcgcattgctgctgggcaaggctctggatcggctgcagtgcccggccaactgcgagaatgtctgctcgcactgcctggccagccaggacagccgtgtcgagcgtgaagagctggatcgcaagctggcactgcggtggctgtacgaatcccggctggttgagcatctggggctgcccgatacatttgctggcttgcatggcgcacgctattgctcggttggcccactgcgcgaactgagtgccgccatcaacttgctggatcgccgagatccgacagcagcgattctgctgtgcctccacggcgactgtgcggattgggatctcgaccatcctcgtttccgggaacaggtgctgacctgggccattgccgaacgactcaaggtccgcctcggtattgctgggtcggcacggttgaacgcggagcaaaaagaaaccctggcactacttgcccgtctgggcgttgagctagtcgagttgcaaaccggaacgttgcaagctccttatctggttgcccaagtgtcatcccaggctggcgcccggagcctttacagcaacatgaacaacgtcggagtgcccggagccgattggctaaaaggacatgccgatgtggtctgggctaccagcaaactgatgcctgcgattgcgggcaacagcatcaactgcagcgactggagccagcctccgcaaggcgcgcgcatcgtcgaagtcacttctcagctcgacggccccgtcaacactctgaaaaaacgcatcgccacgttaatcgacgaccagatgccggagttggcctctttgctcgccaatgatcaggccgtctccgtaagctactcggatcgctacctgaagtcgccctggtcgctgatgctcctgagcagcttcctggaacttttccggaatgatcagctgcagtcgctagccgtgcagactctggcgccgagcggtagccagccaagctatcttctcagccatgactggatgcgcgtagacgatcaagaggcgattctcgagctctggctgaagagtcagttcgatatcgctccgcgcatccacgttatgaacagcccccgcgatctgctgcactgcagagtcatcactgtgaactggatgtcgggcaagatcagcaagatcctgctggatcagggcatgggctactggcgtggacggatgccgtacagggatcagatgggctttgacttcaacgcttcccctcacgaacaggctttgcagatggtcgaaaaactttcatccgctcacatgcagcaaagtggggagtggccgacttatataagttgctcaatgaactaa

SEQ ID NO: 29947 - DNA, 3132 bp, Pseudomonas putida TRO1
gtgggcaaccccttgcatgccattcatctgggggcctgtttctgccttttcgtcagtgaacaatatcgccgaaactacaacagcttatggtcctggtccggggccgagacggaactagggatttcgctgaccccgcaacagcatgcagcgctgaccaacgatgggctggcctattggaagagaccgatacgtttccgggacagtggccgagactggctgggttcgctgttcaccgagggcggcctgccctggccgctggtgcaaagcgagtcacatggtttcgggcgggctgtacgccggggcatcaaacacttctaccggaccgagggcaatcgtaggaccacggctgatctgatggccgacttcgaggagggccttccgaccgctttccgcaacctggaaacgcgccggctgctggcaggcatcgtcgaccagctcatgtatctggttgagcactatcccctcaaggatcaccacgacccagtcagccacctcgaccagcaggctcccggctggacggatgccttcccgatcccgctggatgaaagtaatgcccgcacgctgctcaacgactggctacgcgatgccggccagaaacgtcaggagcgcaaggaggctctcgagaagaggcaggcgtttatctgcgagcactttctgcatggctcgctcccccaatggtcaatacgcaccgatctgacccttccacccgaagaaacatttgcggtagatccgacgactctgggcagcacccgcctggagctagcctattacgaaggtgaccggctactggcccgtggtggttccgtttatggccagctcaccgtagagggtatcaaggtccgtttcgcaaaccctcaggtcaccgtggagcggcgcgcgctcgaggagccactgagcctgcgcctgctggaaaacggccgcacggtccattgcctgttcttcgacggtagcgcactcgattaccgggaggctcccctggttttcgagaatcgctccgagcgctggcaactggtggccacctccagttgctcggtggtctccggactggctcggcttcgtattcctgaggattttttcatcaccagtgaaggtgccgcgccagacactctagcacaggacgcggagaatggtcgctggctggagatactctcagacctgtctctggccaagggggccgaccactaccagatagagctgaatcgagcaggcggcgacgacctgaaacccaccctgacgggcgttttcgcactctacgaaagctccccctcgatcgtcttcctgggctggccacgccttgagctgcccgaaggctacccccacccccgggatgagctggtcgagttcgttaacggcgagctgctggaccgccagcgcaacagcagctatggcctcgcccgctacaccctgcgcaaccgctctggcaaaacgctgctgcagcgccgcttcggcgtcctacccaaggagttcagcctttccctgttccttggactgggacagcagtccgcacgcctcctacccaaaggcgcgcagctgcttgatctgcaggtcgtcagcaaaagcctggcagtggagcaatccgaacatgctctgcacttgcgccaccatgaggagaatccccccacgaccttcattctggaggccggccaggacctgcctcccattcagctccgtctaccctacccctaccagggggcacatcttctggaccagtacggcaatccgtcgcggacccgcgagctgacactggtcgagctgatcggctaccgcatcgcgctgacctccggtcttccacagggccagacattccacatggagctggagctgatctgtacggagcaaccgcacccgaaacgcgccttcagcatccgggtaggcacggcgcctgtcatgctcaacctgttcagctacctgagcgacatgcagaacatgcttagcgcagttgacgaacaggatgcctatatcaggctttccctggaaaccgagcaaccactgctgaaactcgatatccgccgctatggcgggcaactccagtgggagggacggtatgccttctatatctgcaatacttctaatgccgcaatgctggatggcgttcaggccgaggcaatgctgctgtccgatcccaagcgcacgccgctgcatctgaccgaaaagaccagcgagacggtgggcaccggatgcttcgatattccgcaaaaaatgcaatttcaggggccatggctgatctatccgggcgaacagtcgagcgttcgcttccgtccgggcctgtatatcacgccggacaacattttcgactccgagtcggaggtgtgctcgctgcaccgcgccgccgagcttttccaccctcagcacaatccgcatgtcatcgagcagcagattgccgccatggcggccaacttcaaccacagtggctggcagtatctggccgacctgaagcagcactaccgccacctgccgctgtcgtcattcgaaacctggaaagtcctgtcgcgcaatcgggaggcgctgagctttgcggtattccggctggaaatggatgagtggttctgcgcacgcatacgcgacgagcttgctgtcatctgggaggccgtcccgcttccgctatgggtacaggcctaccgactcttccacgacagcatgcgcctgaccgggcttcctgaaacgctggtcaacaatctcgtctcgaaccggaccaacgtgctgcgctgcatcgtttccgggttcgactacctgggcgactatctgagcaccggcaatcgcaggtcgctgaccaagctgccaccggaaagtgttctgcctatctggtaccaggatctgcggcgtcttcacgagtccaatcggaactggcccaccctgctcggcagcgagctttccagatgggttgacaggcagcggctcccccctctggtgaaagccctttcgctggtggagttcaccgacgccgtggcctacctgccgatcttcatggccttcgtcaccgccggcaaagctagaatcaccgacctcccggcgacaccggcctatctgaaatttgccattcgcctggtttccgattttgaccgtcagggctggtttataccggtgcacgccctgatggtgtcctatctgctcgcctcgcaggatgaggcataa

SEQ ID NO: 29948 - DNA, 5913 bp, Pseudomonas sp. HPB0071
atgagtaagtatttttccacgctagtagaccaggcgctttcacgtacgaccgaatctaccctaagcatcttaagtattactcatccggggctgcgccagcacctgacgggtctgatgcgtgcggagtgcggaacagagggctcgtttctagcaccgcccttgtttgaacaaacctttggttgggaggagtcagcgctgtccatgacagagcttgccacccacgaaaagctgctcagtccagaaatcgtcgcctcgttagatggcaaggctaacggccgctatcgctttggggctgattggaaaccctttacccaccagctggcgagctggagggcgttactagacaagaaacgatcagttgtggtgaccagcggtaccggttcaggtaagactgaatgctttatggttccggtattagatgatctctaccgggagtatcataagggcggtaaaaagcccctcgtaggcgtgcgggcattgtttctctatcccctcaacgccttgatcaactctcagcgtgagcgtttatacgcgtggacgcaaggctttggctcaggtattcgctactgtctttacaacggaaacaccgaagagctaagggcaaaagtgcgtagcgagcaagcgctaaagcctaatgagatcctgtctcgtgaattgatgcgagaagagcctgctcccattttggtaaccaacggtacaatgcttgagtacatgatggtgcgtcaggtcgatgcgcctattgtacgaatttccaaagcacaaaaatcgctgcgctggatcgttttggacgaggctcacacctatgtaggctcacaggcggccgagctggccttgcaactcaggcgagtgatgaccgcttttggggttacacctcaagaggttcgatttgttgcaacctcagccaccattgcgggcgccgaggcagcggagcagctcaagcaattcttgtctgatctctcgggggtaccggtcacgcagattgatgtcttaggcggccagcgcatcgttcctacccttgccccctgccagcagacgcctgtctcgcttgaggtactggaggcgatgtctgaagcagacggagctgactctgacatccatgctaaacgctatgaggcgcttgtgcactcgccacaggctcgcacgctacgcgacctgttggtaaacaccggcaaaccgctaaagctaactgaaataacccaccaaatgaaccagcgcaccgacgggtcgctgacccagggtgatgtgttgcgttggctggatctgtgttcaggtacccggccgtccgctaaagatgccgcttttcttaagcttcgtgcacacttctttcagcgtactactcatgggctctgggcatgctttgacaaatactgctcagccaaacgagaaacgacactaacggaaaactggccttttggttatgtttacgtaagccagcggcagacctgtacctgtggaagtccggtgtttgaactggctttttgtaacgactgcaatgagcctcatctcctagcccgggacaagagcggcaaactcatccagtgggagagctccggtggcgatgagttctcgctacaagctgaaatacctggagaagaggacacctcttcaaacgatagcgcttcgcttcctatcaaaactcctctggttattgcgtcagccgacaacgccggagacgcttacgtcagcgctgactttgacaagatgacaggggtagcctctggcgtttcccctacgcttgtgcgcttggcggttaataacactgaggcgcagtgcagtaatcatcattgtcgattcagtggctatgcggagagctttccctttcgccgcgctatgttgggcggaccgttctatgtagccaacgccgtacctacggttcttgagtactgccaggattatcaggacgatgagtccgcatccgactacgggccgcaatcgctgccgggacgggggcgaaggctcattacgtttaccgatagccgccagggcacagcacgcatggccgttcggatgcagcaagaggctgaacgtagtcgattgcgcggtctggtggtagaaattctaagctggaatcagcgcagccaaggtaataatcaattgattggcgccagtatgagcgctgagcaacgcgaaaagcttgaaaaaattatagcgatagaaaaaaacaccttagccggctaccgtgatattggcatgtctgctcagtttattaccgacgctgaagcaaagatagcagcgctagaaggtcagctgtctgtctctagcggcaaaaaagctaaccctaccttggtctccctaccatggcctgatctggcgaacgaacttaaacaaaaggcagatcttaagggctcaatgctgctctataaccagtatcaaaagcctgaaattttcaaagaaaccgatggcccttacaagctagctgaaatgctgctgtttcgcgagtttatgcgccgtcctaagcggcagaatagcctagaaacacaagggcttgtaaaggtcggctatgtgggcctggataaaatccacgaaacgcctacttattgggaagaaaaggggctaaccctcaaggactggctggacttcttaaaggttgcgctggatttctacgtgcgcgagaacagctttatccagattgatgagggctggctccagtggattggcagtaggttttcagccaaaaccttacgtaatccagagtcaaaagagtccgacgagatccgggttaagcgttggccgcagattcgaggcggtaattactcgcagcggctaatcaagctgttgctgatggcagccgatctaaaccctaggaatccctctgatgttgatagagttaacagctggttaaaggccgcttggaagcagctgaccaaacccggcgccacgctaaagtctgacgaaaaccgctattacctgcccagggaacatatagagttctccttagtgcacaaggcgtttatctgtcctattactaataagttgctagatactacgtttaagggatttacgccctatctacccacgcatctcaactttgatcggatcagcaatgagcagcgggagagctttgtcgctcaacctgtcgaattaccaagcgtctgggaattcgatcgctcccaagaggactatctacctggtctagccttaatccgagaggaggtaagacaaaatgctcaggtaaaagagctgcggtcgagaaacctctggacggacatcaacgacagagcggtagaaggagggttctattaccggactgctgagcactctgcgcagcagtcgtctgagcggcttggctcctatgaaggcatgttcaagaaagggcaaattaacgtattaaactgctctaccaccatggagatgggagtagatatcggcggtatctcagctgttgtgatgaataacgttccgccgcatccagccaactacttacagcgcgctggccgtgcggggcgaagcaaagaatctcgagcgctcgcctacaccctgtgcaaacataacccccacgaccagcaagtgtttgccaaccccagctggccgtttgagaccaagataccggcaccggcagtggctttgaactctgagcggctcgtgcagcgccatgtgaattcgcttcttctggccgatttcttgtgtaacgttgtcggctccactcagacagagaaaaccaatcttaatacccagtggttttatagtgatgagagcggacagtcgctatgcgcgcgttttttagagcggctggcgcgggtcaaactcgacatcgacgatgcacttgagcgcctcgttataagaacagcgctggcaggtcttcctgctgagaagttgcgtcggcagtcaattgcccaattaaagccgctgcaagaccgctggttggatagctatcgctacctacttgctgaagaaaagcaggcaaaggcccaaagtccgtaccttaagcgcattcagatcgaaaagtcccgtcactgtaacgagtatctcctacgtgacctctccgctcgaacgtttttacccggctatggctttcctacagatgttgtcaattttgataactttacaatcgaagactaccttcgtgaccggaatgctgaaagtcagctaaagcgcgaccgcgaagataatgtgtcgcgctataaagggcttccctctcgaaatctttccattgccattcgtgaatatgcacccggtgccgagattgtgttggatggtcgtgtgttcaaatctgctggcgtctccctgcactggcataatgtgaatgcaaatactaatgaagcacaaaaaatggacattgcctggcgctgcgatgtctgcggtgagttagggtatgaagaaggcctggttaagacgggtgcgttaacctgcaccaataatgactgtcaggccattattaagcctgaaaatcgtctaagcgttcttcagccctcggggtttgtcacagatgcctatcagaccgcctctaacaacatccagcaccagaagtttattcctgtcgaaacggcctgggtatttgttaacgcagagaaaaagcctctacccaatcccaaggtaggccttatggcttacggtacaagcggtcaggtctttcaccatagtgctggagagcatggcgcaggcttcgcgctttgtatgagctgcggacgtgctgagtccatgctaccggagggcatattcccgcagggcttgtcacctgagggcactcattatccgcctagacctactaaagaagataaagaccagaacaacaaacgcttggcctgccagggcagcggtagccttatgtctaacgtaacgttgggcgcaacggcgtttactgacgtgtttgagcttaccttgcaccaccccttgcgtggtgaatacctagtagataccgaacaggggcggaccattgcgatgacgctggctgttgccttgcgcctatcgctggcctcaatcctaggtgtgtcagcctccgagcttggttatgcgacgcgcccgaccaagcttgcaaatgggcagtctgtacgcgtggtgcagctgtacgacataattagcggaggggcaggctttgcaaccagcgcggcccgccatgtcgaggaagtgttgagaggcatggttgaaaagcttgcctgtgctcactgtgagtcaggctgcagcgaatgcctcctcgactctcaaacacggcatgatcatgacaagctggatcgacagcttgcgcttgagtggctgggcagggactttgtccaccatgttggcttggcagacgaagataagctttcgtttaccgatggccgctatgagccaggcagccttgaggaggctttgaggcggcttatcaatgagggggccaagaaactcgtcttgtttacctcctcggagacagccgaatgggacctggctgcgccgcaatttcgtaaggcactggtcaattacgtatctttggacgatgtagaggtcgtgcttgtaattccggagggcgaccttgagccagaaatccgccaggatttgcagcgcttagctgctcttggcataaaactatgctctgccaatgctaagccaaacagtgtaattgctgcccaagtggtgcttcctaatggcattactacactaggtacagctagtacgacggcaactgtgcccggcagccgctggcatcagaatgaccagttggtggtccgctcccatttgcagccggctattaacctgacggctgttaccgttcctgccactatagacgtcgtgtctcaagcaaataatattgcagacatccagatacatgatgaactcaacggcccatttgttgagtttggcaagcggttctggagtcatctatgcaagggaaatgagcaactaagtagcagtgttgatacaggcataatctcgcggctcacgtatacggatcgatatattcaaaatccggcagcagtagtgatcttagggaaggtctga

SEQ ID NO: 29949 - DNA, 3351 bp, Pseudomonas sp. HPB0071
ttgttaaagtcgagtggatcttccgtttttaaatgcgcagcctggctcaattcctttctgcaacgtcgtggtttacagactgctgatgggcgtggcctctatgagtatcactgcagctacgccgagtaccttgaccttaaacaggtattaaaggctgccgcgggctctaatgggagcgttagggatctggctgcatgcgcctgtctcgtgctctttggctctgagtggtatcgccgtgaataccagagcagttgcggatggagctgggaacctatctggactgcgctagagtttaggctatccgcggcggagttaagcacggccatccccaaagggctagaaggctactggaagcggcctatccattcgtttatagagtctgagcgccgagattttctaggctccttgtttagcgaaggcgggctcccattccaggtgttacgagaggagggcagccgcttccaagtcctctttgatcgaattctaaagcattacgatcagtgccatttgatgggctttactactctgcaacaggcgcggcagcaccttgagaaaaccacgctaccccaagcattctcttcgcctacgtctgtagaactgattgctcatatgaccgatcagctggttgcgctggtacgcgactatacgctgaccgagaccaatgagccggttgcgcggttggatgctatgaatcccaagtggcgagagctgtttccactgccgctcgacaaccagaccggaaatgaactgctaaacgggctcttgaaaaccgcaacggaagaaggcaaaaaacagcgtaaaccggctaatggctgggcttgcagacacttctgggacgaaggcctgccggatgttttaaaggtgcaactctcaatgcctgccgaggtggcgtttcgactagaggtgcctgcgtctaccacacggtttgagctcgagatctttgagggcgaaaaagccattgcctcaataggttctggctatgccaccgtcgataatggtttggctcgtataaggcttcgtcagcgggaggtcatagcgcgccggcaggactgtactgcccaactgcacctggtggcgctggcgggtggattggtgatggcaagtctgcctattgaggcaagctctgtcgcgctaggagacgcaccattggggtttgagcagggagatggacgctggcagctctgcggccaggcctcatttacaactgccaaggctgacctcatgttagtgatgccccagggagcctccattagcgtagtcgagggcaccggtgaagcttccatagccgaagcctcagccatctgtgggctgccaacagtaagagcccaagggcgagcccagctgcaggtccaatgtgaggagtcctatcgcatacgtcttggtcataccgcaggttctggtctggatcttgagctaaccgggtccctgctgtactggcctacaaggcctgctttaagctttattggcctgccaagagtacgttggcccgcaggctcgggcgagcagcaacagcagggaagcgagctatacattgcgggaaaaaaaccaggcagcggtatattgcaagacatgcttggcgcccattatgtgtcggtccgcaatcacgccggtgacaccttgctgcgtcgcaaagctggtattctaccggccgattttcgccttgaattacgaagcggtgaagcccctgggcagggcagcgtcttgatctatacgcagcaaaactgcttgtttcaaatagacgatgcctctgtgcaggtcaagaaattcaagcatagcgatcataccgaactcaaactgtcagccggtgcctttccacctgtaaaggtgcggttgctggtcacacctagcctgctggccgatcccgtggagatcgagctgccatttcctaatgcaggttttctcgctataggcgcctctggcaaacccttgaagcgtaacttctgcattgaggagctactgggcgcccgattgtatttgtttggtcggggcggagtacctacgcgctacggcttggaactagcgcttaaaggtaacactgcacgaaatgcccgttacacctggtcctataccgcgtctgataagccgcttgagataagtttgttcaacctcaaagagcaaattatcgatcttttgtcgctgcactcagggatcgaccaagccgttgaactcaggatttttggtagtggttatgatgagtgctttcgcatacgcaactattcaaccgatatgcgcttggatcgggagcgccaggtggtgtactcctcaaccctaaatgacagtggtgtggcgctgcctgaacctgaattgatgctgttacatgatccgtttcgcagctcagtttccttgcgctcacgcacaagtgaaggcgtgcccacgggcgaatttgagctgcctgcgctcattgagcgcgatggaccctggctgatggtgccaaaggcgggttcatcagtagccttccgtcccttgtttatcgcaggagggtgggagcccgtatccgctttcgacgacgtccaaagcctgcaaaaagcggtgctcacgttcgaccataccgctgtggtcagctcgtttacacctgtgctaaacgccatggccattaatccaatgcacagcggttggcagtttttgcgcgcgctgtatgagggctatggttatctgcctctggcgacctttgaagtctggaaagcgctagtgtccaacacgcgagcccttgccatggcgctgttcaagtttgaaatgaacacggtttttttaggacgccttgaggcggaatttcctttgttatgggagtgtttgccggtaaaggacattaaacaagccgctagccgctttgccgacgtgcttgctgaaaaaggggttgatccaaacgcagtgaataacttgatggacaacctgctctcgcggcttgagcaaatctatcccacgtatggaaaaaatgtgcagggttatctgctcaatcgcccggtcgggcaagacattcagatccctccagccctttttagaaacatcgtggtcggctggtaccaagagcttatccgtgagcgaagtgaggcagagtggcctagctttggtggccagccactggagcgttggcataacacgcaagcggactcggtactcgcgtttacgcctgaaatggactttcgtaaggccgttgtctacctgccaatctttgccgctgcagttgccagtggtagagctcgatttgatgaggtatttgcggatcatgccgaggcgatcttttttctgcgccagatccgcgattttgactcgaactggttcaactcgctttatcaatattgcttgctgaacaatgttatgaacccggataaggcggtgctggtaaatgagtaa

SEQ ID NO: 29950 - DNA, 5313 bp, Pseudomonas stutzeri KOS6
atgctctatcagaagaactatttctccgccctcaccgacaacctgagcacccgcagcgagcgtgccgcccagggcctgctcagcctcggcaacccgcagctgcgccagtttctacatgaccagctgaccgccgcccccggcacgccgggcgcctggctggccgatccggtcttcgagccgaccttcggctggcaggaaagtgctgaaaccatgggttcactggccggcggcaacctgctgcactggcgccttgccgatacgatggcacacccgcccaaaaaggaagacggagaagaccttatagatccttttccagaagaccgtagattgtttacgcatcagttagcagcgtgggagatcctcaaccgtgcggagccgcaatcgcttgtggtgaccagcggcaccggctcaggcaagaccgaatgcttcctggtgccggtcctcaaccagttggccaaggccatcgacgcgggcgaagacccggaaggcgttcgcgccctgttcatctacccgctgaacgcgctgatcaactcgcaacagaaccgcctggatgcctggacccacggattcggcggacagattcgccattgtctatacaccggtgccctggagaacgaacgcaggaatagagaccagcagtacgatggccaggtgatcgaccgcaagagcctgcgcgccagcccgccgcaactgctggtgactaacgcgaccatgctggagtacatgctcatccgtaaggatgatgagccgatcctgcagaagtcggccggcaggctgcgctggatcattcttgacgaggcgcacacccacatcggctcccaggccgcggagatggcgctgctgctgcgccgggtaatgctggccttccaggtcaagccgcaggatgtgcgcttcgtggcaacctcggccaccttcggctcggatacccagaccatcgagagcctgcgcaccttcctcgccgatatcggcggagtggatccgcagcaggtgcatgtcgtgcagggtcatcgggatatcccggcgctgctgaacgccaccccggatgccgagcaggacacccctgaagccatcggcgccatcgaggcggaccgggagcagtcagcgctgcgctaccagcgcctcgaggccagcccgaccgctcggcggctgcgcgccctgttcatgcctgatggccaggtgaaaccacaaagcctgcaagggctgatccgtgagtccggtctaccctccgcgcaggtgctcgcctggctggatctgctgtccggcaccaagagtgccgaagggctgtccttcctgccgctgcgcgcacacctgttccataacgtgattccggcaatccgcgcctgcgtggaccgccactgcagccacaaggttggctccgcgctggagcatgccgactggccgtttggcatggtttacctggaagagcgaactcactgccgctgcggcgcgccgctgatgccgctggtgtcctgcgaggagtgcaacgagagcttcctgcaggcggcgactaccaaccacgggagacttatcgatcagtcgcaacaacaggtcgatgagttctctcttgacgaggagcctacggataccgatgaccaagctgatgacattgcattactcagccgtgtcctgattaccaatcgtcctaccaactacagctatcccgagtttctggatcgtgacagccaaaggttgaagcacgacggccctaaggatggctacctagagctacaagtttttcgcagccaaaagaacgaatgcccctgctgtggcgccaacatccaaggccgcagcctgctgcgcccggcgcgcatcggcacgcccttcaccctgagcacggtgatcggcaccctgctggagttctgcccgccggatccgatgccgaccggcaagccgttccagggccgcaagctgatctccttcaccgacagccgccagggtacggcgcggattgcggtcaagctgcagcaggactccgagcgcaaccggattcgcggacttgtataccagcacttactgcactcgcagccagccaacccactctcacctacccagcaagacaaactgagagctcttgaagcaaagaaggcctgcgacagtctcgacgattcagaagaaatgctgcttgacgtgctgaaagataagcaagctatagcgttatcgggcatggaaatcagctggaccgatatggccaactatctggccggaaccccagagctgcagatgggcatgctcgattattacaacaatctcgcgccgaacaccttcggcaagcaggacagtgtggccctggccaacatgctgctggcccgcgagttctatcgccgtccgaaacgcgccaacagcctggaaaccttgggccttgtgcaggtgtgctaccccaagctggccagcatcaccagcaagcccatggcctggcctgcacacctggatgtcgagtcctggcgcatctacctgaaggtgctgatggactttttcgtccgcgaaaacaccatcctgaacatcgataaacgctggcagtcgctgatcggcgcgcgtatcagccccaaatgggctgtgccgccggtcctggggaaaaaacctgaaaagctgcaaagtcgctttgcccgctggcctacggtcaacaccgtcaatggcatccagtcgcgggccatcctgctgctctgcaaggcattcaactggtcgaccgcggcccaccaagaccacatcgactcgatcctgagcgaagcatggcgcgtgctgcagggaaaactgctgacctcattcggcgatagctaccaactcgatctcaaggatctgagcttccggctgcccgaaacggtctatctgtgcccggtatcgcggcgcttcatcgacaccccgttcgagcaactcagcccctacacgccacgtaccgaccgcgacatggtcgtcaaggtgaggccctacaccctgccgcgtccgcccgaggcgctcctgcatgtgccgggtgatgagggcctgctggcggtccgcgactggctgaacagcgagccgcagatccagcagttgcgcaaggatgcactctggtcggacatcatggaccgggtcatcgagggtggtcactacttccgcgctgccgagcattctgcgcagcagtcgcagcagaagctaaagggctacgagaagctctttgaaaaaggcaagctcaacctgctgagctgctcgaccaccatggaaatgggcgtggatatcggcggtatcagcgtggtggcgatgaacaacgtacccccgcacccggccaactacctgcagcgcgccgggcgcgccgggcgccgccgcgagggacgctcgctggccctggccgtctgcaagaacaccccgcacgaccagagcgtgttcaacaacccgctctggccgttcaatacgcccatgcgcatgcccaaggtgtccctgcagagccccgatctggtacagcgccacgtcaatgcctggctgctgtcgcactggctcaagcacgtggtcgccgcccaggaaatcaaatcgatgaccgccggtgccttcttcctagacggcaaactgcctatgtcgctggccgcgcgtttctgcctgtggtgcgacaaccaggcggtcgataccgaaacgctggtgggacaggccctcaaggacatcacccgccgcagcatccttgataccgccccgcagcccaagctgttcgagcacgccagccgccgcatgaaagagatcatgcaggcatggcagcaggaatactcggccagcgaagcccaactgcagcagattgccgacaagaaggccgctgcctaccgagccatggatgcacagctcagccgcatcgccaaggagtacctgctcagcgagctggccgaccggcgcttcctgccgggctacggcttcccgaccgacattgtcagcttcgataaccgctgcatgcagaccttgaagcgggaggacggcgaccagcgcgaggacaaccgcgcccgctaccgctcactggcttcccgcgaccgtatcaccggcctgcgcgaatatgcgccgggtgccgagctggtcatggacgggctggtttacaaatcctctggcatcacgctgaactggcacgcgcctgcgtctgccgaaaacgtcaaggagcttcagctgttcaagaaggcctggcgctgtgggcaatgcggtgccagtgactcggccatcaatcccggactggagatcaactgccaggaatgcggcgcgccgatcgagcgcgacaacatccgtgaatacctggtgcctgcaggctttgccgtggacttcttcgacgagccgcacaatgacatcagccgcctgcagtatgtgccggtcaaagcgccatggctgaacgtacctgctagctgggtctgcctggccaacccagcgctcggccagttccgtgccagccagcaggcgcacctgttcaactacacctcgggtgccaatcagcaaggctttgccatctgcctggagtgcggcaaggctgagcccatgctgagctatcccgatgcatccgcccctgccaatgaacagtatctgccggctattttccgccagaaggcacagcaccgccgcctgcgcggtggcaaaagcaatgaacaaggcgacgggacaaacatctgccccggcagccacaacagctggaagatcaaacagaacgtccaccttggccatgacagcctgaccgatgcgctggaactggtgctgcgcaaccctaccagcggcgaactgctcaacgacgatatcaccgcctactcgattgccgtggcgctgcgcgaggcgattgccgccgatctgggcatacaaaccgaagagctgggctgcgcaagccatccgatcaaggtcgatggccagccaacccgcgccatccaggtgttcgacctgcgcagcggtggctacaccacccaggccgcggagcggctgaatgaagccagcctgtggcgaaaggtcatcgctcgtctggacagctgcaactgctcgcatgcctgccagaactgcctactcagtttcgatacccgcttcgaggccgagcgcctcaatcgtcacgtcgcgctggagtggatcaatcagacttggcttgccggcctggcgctgcccgccgagctcgctgtctttggtccgaaaagccaggcagaaatcgccactctacaggaagcggtcgaaagagcgattactagggacgacaacgcgaagaccgtagccatttacttcactgcacccgccgaagagtgggatcttgctgtcgcacgccgcctgaggcatcaactgcatagctgggaaagcgtcggacacctagtgcaattacatttactggaaagtaccgtttccagcctg

SEQ ID NO: 29951 - DNA, 3423 bp, Pseudomonas stutzeri KOS6
ttgagattgaaaaaaggacacgatccaaggacagcctttgaggcagctcactcgttcacaaaaaaggaattatgtgtgccgcttgtccaatggatttcagattttttatctaggcgtggactgcaagagccggatggtcgtcccctattcgcctataagacctcatcagaagaattcgagacactgcgccagctcttgcatgggctcaacctagggcaacacgcgcaccccgaatatgctcaggcctggctactttttgcggccgaatggtggaagcgcgaatatccagggggagcatggcgctggggaccactgtgcgaggcagccggccagagaaaggtagctcatgagaagacccgcagcctggtaattgatgggcgtcgtcagtggcgtctgcaaaccactataaaaagtgaaggcaaacgtttcatcggcctggtcgcggtgaatggcggcctgcccatgcgccttgtcgagtcggcacagggcgggttatcccgcctgctacgcatggtcactgagcaggcactggaataccgcctgcaggatgagcatctgcgccaggccatcgaggcccaggccgagcttttgcccgcctgctaccagcaggcgccggtctacgaactgctcgacagcttggtcaaggcggtgctgcacatccgcaaggcctatgccctgcagggcgcccaagacccaatcgcccggctgcaggaagagtgccctcactgggaagagctcttccccatcgccctcgattcccaggccgccgccagcctgatcaagggtctggtccgggatacagtcagcatcacgccccagtcgcggcggcctcctttccagatccagcgcggcctgcgcttcagttccgatggctccatacccgtctacgagctgtccttcgtgatgcaggctcaggccaggcgcgatcaggttgccgaggcgctggggatggccgtggatgcgctgccgccacacttccagctcctgctgcgcatcggcgagcgggaatacctggtcggcgaagccctgcttagagacgaggaataccagctgatcgccaggccgctgccggccatccacagcctgcacaatgccgcgcagctgatcgtcagccgctggggcgccaccctgcacattgccaacctaccgggcggcgaagccttgagccatgacgagccgctgatcttcgagaatacctacccctttgcccgcctgctcgcccagggcgatgcgctggtcaagggcgagtcggcactggcggccatgccggcaagaaccatcgtgtatgccgaagaaggcgaggctcgcgagctgcatgactgcctggccgacgggcaaatgctgatggaacttcccgccggtaccacccggctcacgtacaaacaacagcccttcgttgtcaccatcagcgccagcgctacccgccacccggaagcctactggcatggcaacagtctggaggcgctctccgtgccggggctgctgttccgtggcacgccgcgcctacgcattgagcagggaacgggcttttccagctatgcgcccgcccatgagctgtttgtccgcacgcagggcaaggagctgccgctcgcccaagcccgggcgccggggctgtgccggctgatctggcgcaaggatggccagcgcctgctgaacacccgcgccgtgcttctcccggacgaagcctccatcacctacgcgccgggcgccactaccctcgagggcagcattcgccttcaccactggcctgatgtgcccgtgcgctgcgagagcgaacagatcgcgctggagcgccgccatgatggaacaggcctgaccctgcggctgaagagcaccggcagccggccggccaccacggttccgctgtgcctgcagtggcccgacggcgagcagaagctcactctgcccttccccggctatggcgtcacgctgctgcgcaacgacactcctctcaagctgaatcaggccctgaccatcgaagagctgatcggatgccgtgcggtattgatgtcgacacagggcgccgagaactggcagattcgcctgacctccggcggcaccgactcacgctccaccctgtcgcaggaaattcgctacaccgggatccgcgaaatccgtctgttcgagctgattccggcaatccagcagatgatgtcctgccaccccggactcgatcataccgtgcagctggagctgatccacgcccaccagacccacgcccgcctgcaggtgggccgctactcgacgcgcatccgcctgcacagccaaaaagaaatggcctccctgagcgatggcgctcgtgatctcctgcccgagcagccccaggccgagggcctgatactggccctgcctctggccgagccggaacatgacccagtcagcctgccgctgcatttctccgagcaggtgttcaccggcaactggctggtcagcctgccgaccgatgcggttggtccctggctgctgtacacccccgacgactccaaactgcacagccgtccgaccgtcgtgccgccgaccgtgagacaactgtcgaagcccctgaccccgctgcgcgacgcgctctgcgaagccgatggtgaagagcgcatgcgcctgctccgagccgcgctgcgcgccatggccgcggatccagaagccgaggactggcagacgctggagctgctgctggaccggctgcaccatctgccgctggccagcttggatatctgccaggcactgatccgcgagccgcaggcgctggccatggccaccctgcggctggacgatttctccagccgcctggccgagcgcctgccctgcgagctgcccttcgagtggctgctgattgccccggagcactggttcgacacctttgcgacattgcgccaacagctggccgccgacaatccccggctactgtcgctgatccgcaccgacatccagagtaagagccagttcctgtctcgctggcagcccgcgctgcgctttatcttcgatcagggcctgcaccactccttcgatctgcaaagcccggatgtggggttcttcctgaaaaacccggcgatgctcaccgcctcctggcagtcgcacctgtttgatggcgagcactcggccatgcagcagatgttccggcggaaccctgccgaaacccatcaataccccggcagcggcaatacggatataggagccttcctgaaaacgccccacgggcaaatgctcctccgctgcagcaagctccctgccaacgacttcaagttggccacggtcatgctgcccttcatggccgccttcgatacctacgctggccgcgggcagcaatggcaagccgacccggcacgcctgttcagcctcagagacgctcgccagttcgataccgtctggttcgactccgcctatcaactcggcctggccatggcgcaagccgcctcgatgcagaagtga

SEQ ID NO: 29952 - DNA, 6207 bp, Pseudomonas stutzeri NF13
atgctctatcagaagaactatttctccgctcttaccagcaacctgagtacccgcagcgagcgcgccgcccagggcctgctcagtctaggcaatccgcagctgcggcagttcctgcatgatcagctgaccgccgcccccggtactccgggcgcctggctggccgacccggtcttcgaaccgaccttcggctggcaggaaagctctgaaaccatgagttcgctggccggcggtaacctactacaccgacgccttgccgaagccatggcggccccgcccaagaagccccatgatcttgcagaggaatatgccttccccagcaatcgccatcctttcacccaccagttggcggcctgggagattctcaaccgtcccgagccgcaatcactggtggtgaccagcggcaccggctcgggcaaaaccgagtgtttcctggtaccggtcctcagccagctggccaaggaaatcgacgctggcgaagacccggagggtgtccgcgccctgttcatctaccctttaaacgccctgatcaactcgcaacagaaccgcctggatgcctggacccacggattcggcggacagattcgccattgtctatacaccggtgccctggagaacgaacgcaggaatagagaccagcagtacgatggccaggtgatcgaccgcaagagcctgcgcgccagcccgccgcaactgctggtgaccaacgcgaccatgctggagtacatgctcatccgcaaggatgacgagccgatcctgcagaagtcggccggcaagctgcgctggatcattctggacgaggcgcacacccacatcggctcccaggccgcggagatggcgctgctgctgcgccgggtgatgctggccttccaagtcaagccacaggatgtgcgcttcgtggcgacctcggccaccttcggctcggatactcagaccatcgagagcctgcgtaccttcctcgccgatatcggcggagtggatccgcagcaggtgcatgtcgtgcagggacatcgggatatcccggcgctgctgaacgccaccccggttgccgagcaggacacccctgaagccatctgtgccatcgaggcggaccaggaacagtcgacgctgcgctaccagcgcttggaagctagccccaccgctcggcggctgcgcgccctgttcatgcctgatggccaggtgaaaccacaaagcctgcaagggctgatccgtgagtccggtctaccctcggcgcaggtgctcgcctggctggatctgctgtccggcaccaagagtgccgagggcctgtccttcctgccgctgcgcgcacacctgttccataacgtgattccggcaatccgcgcctgcgtggaccgccactgcagccacaaggccggcaccgcgctggagcatgccgactggccgtttggcatggtttacctggaagagcgaactcactgccgctgcggcgcgccgctaatgccgctggtgtcctgcgaggagtgcaacgagagcttcctgcaggcggggactaagggtagcagcgagctggtcgacccgactcagcaacaggtcgacgagttcgccctcgacgaagattctgcgggggccgaggatcaggccgaagatactgtgtcatctatccagatcctgatcactaatcgcgccgtcaagaattacagtggcgacttcctcgatcgcaccacccagcgactgacccccaatcgtcccgcggatggcggtatcgagctgcagctcttccgcaccatcaagaacgaatgcccttgctgtggcgccaatatccagggccgcagcctgctacgtccggcgcgcatcggcacgcctttcaccctgagcacggtgatcggcaccctgctggaattctgcccaccagatccgatgcctaccggcaagcctttccagggccgcaagctgatttccttcaccgacagtcgccagggcacggcgcgtattgccatcaagctgcagcaggactccgagcgcaaccggatccgcgggctgatatatcagcgtttgctgcaggcacaaccgatcgatggactgtccgcagaggacttgcaggatctgcaagacctacaaacagcaacgcaactgagtcgtatcgagcagaaacacctgcagtctttgctcgacaggcaggctgaagctacaaagggagcggaaataagctggacagatatggccaaccatctggccggcaccccagagctgcagatgggcatgctcgattactacaacaacctcgcgccgaataccttcggcaagcaggacagtgtcgccctggccagcatgctgctggcgcgcgagttctatcgccgcccgaagcgcgccaacagcttggaaaccctgggcctggtacaggtctgctatcccaagctggccaacgtcaccggcaaacccatggcctggcccgcgcacctggatgccgagtcttggcgtacctacctgaaagtgctgctggacttcttcgtccgcgaaaacaccatcctgaacatcaacgagcgctggcagtcactgatcggcgcacgcattcgccccaaatgggtagttgcgccggtcttgggggaaaagcctgaaaagctgcagagccgctttgtccgctggccggcggtcaacaccgtcaatggcatccagtcgcgggccattctgctgctctgcaaggcattcaactggtcgaccgcgatccatcaggatcagatcgactcgatcctgagtgaggcttggcgggtactgacccagcaggcaaagctgttgattacgtcaggcgacggctatcagctcgacctcaaggacctgagtttccggctgcccgaaacggtctatctgtgcccggtatcgcggcgcttcatcgacaccccgttcgagcaactcagtccctatacgccacgtaccgaccgcgagatggtcgtcaaggtgacgccctacaccctgccgcggccgcccgaggcgctcctgcatgtgccgggtgatgagggcctgctggcgatccgcgactggctgaacagcgagccgcagatccagcagctgcgcaatgacgcgctctggtcggacgtcatggaccgggtcatcgaggggggccactacttccgtgccgccgagcactcggcgcagcagccgaagagcaaactagacagctacgaaggcaagttcaagaccggcaagctgaacctgctgagctgctcgaccaccatggaaatgggcgtggacatcggcggcatcagcgtggtggcgatgaacaacgtccccccgcacccagccaactacctgcagcgcgccggccgcgccgggcgccgccgcgagggacgctcgctagccctggccgtctgcaagaacaccccgcacgaccagagcgtgttcaacaacccgctctggccgttcaacacgcccatgcgcatgcccaaggtgtccctgcagagccccgatctggttcagcgccacgtcaatgcctggctgctgtcgcactggctcaagcacgtggttgctgcccaggaaatcaagtcgatgaccgctggcgccttcttcctcgacggcgaactgcctatgtcactggccgcccgtttttgcctgtggtgcgacaaccagagggtcgataccgaggcgttggttgaacagtcgctcaaggacatcacccgacgcagcatcctcgatactgccccgcagcccgagctgttcaagcacgccagcagccgcatagccgagatcatgcaggcatggcggcaggagcattcggccagccacacccaactgcagcagattaccgacaagaaggccgccgcctaccgcgctatggaggcacagctcagccgtatcgagaaggagtacctgctcagcgaactggctgacaggcgcttcctgccgggctacggcttcccgaccgacatcgtcagcttcgataaccgctgcatgcagaccttgaagcgggaggacggcgaccagcgcgaggacaaccgcgcccgctaccgctcgctggcttcccgcgaccgtatcaccggcctacgcgaatatgcgccgggtgccgagctggtcatggacgggctggtttacaaatcctctggtatcacgctgaactggcacgcgcctgcgtctgccgaaaacgtcaaagagttgcagctgttcaagaaagcctggcgctgtgggcaatgcggtgccagtgactcggccatcaatcccggactggagatcaactgccaggaatgcggcgcgccgatcgagcgcgacaacattcgtgaatacctggtgcctgcaggctttgccgtggacttcttcgacgagccgcacaacgacatcagccgcctgcagtatgtaccggtcaaagcgccatggctgaacgtgcctgccaactggatctgtctggccaatccggcgctcggccagttccgcgccagccagcaggcgcacctgttcaactacacctcgggtgccaatcagcaaggctttgccatctgcctggagtgcggcaaggctgagcccatgctgagctatcccgatgcatccgcccctgccaatgaacagtatctgccggctattttccgccagaaggcacagcaccgccgcctgcgcggtggcaaaagcaatgaacaaggcgacgggacaaacatctgccccggcagccacaacagctggaagatcaaacagaacgtccaccttggccatgacagcctgaccgatgcgctggaactggtgctgcgcaaccctaccagcggcgaactgctcaacgacgatatcaccgcctactcgattgccgtggcgctgcgcgaggctattgccgccgatctgggcatacaaaccgaagagctgggctgcgcaagccatccgatcaaggtcgatagccagccaacccgcgccatccaggtgttcgacctgcgcagcggtggctacaccacccaggccgcggagcggctgaatgaagccagcctgtggcgaaaggtcatcgctcgtctggacagctgcaactgctcgcatgcctgccagaactgcctactcagtttcgatacccgcttcgaggccgagcgcctcaatcgtcacgtcgcgctggagtggatcaatcagacttggcttgccggcctggcgctgcccgccgagctcgctgtctttggtccgaaaagccaggcagaaatcgccactctacaggaagcggtcgaaagagcgattactagggacgacaacgcgaagaccgtagccatttacttcactgcacccgccgaagagtgggatcttgctgtcgcacgccgcctgaggcatcaactgcatagctgggaaagcgtcggacacctagtgcaattacatttactggaaagtaccgtttccagcctgccaagagaccaaaaggaatggttggcaaagctagccttcaacggagtacagatatgcctacacaattccataccggatctcggggcgctggcactcaatgtctcactgcaaggcccacaaggctgcattgcctgggctagcgacaatacgaacctggccgcacctggccacacatgggatctagcggaggccggtgcacggatcatccgaggcaccccctccgacctcaaggcagagcgcatcttgaatgctgccgatctcatgccggccccaccccctggcttgatcaagatcgagatcggcaatcagctggatggctcgctcgacaactttgctcgtcggttctgggagcacctaggtactgaggccaatggcctgattaatgatgccctcacaggcaaggatccaattacagagctggtttacagcgaccgttacgtatgcagcccgctagttgtgaatctgctggtcagcgtgatccacgagctcggacggctgagtgatgcagatttcgctatccgaatcctaggccgacaatatcagcgggaagacaatcgctcgccttggcagtgccggcatgactggcactcagctcgcgagcgcgatgaggccctccgccaggctctggcgtactgcggccgcgagggagaggtgctaagcctgcctaccttgccgcactaccgccggctacagcttaagctgcgctccggtaatcaactgaccgtccagtttgatcaggggctttcgtattgggaagccgagcgcagcgaaaagtcttaccagctcaggttcgactttacatcacgcgagcttggagaagaaatcatggagcgcatcagttgtaaagtttcggcggctggggaggaaaacactcagatattcctctcttcctcttga

SEQ ID NO: 29953 - DNA, 3084 bp, Pseudomonas stutzeri NF13
ttgccccaggataagacccgcagactggtcatcgacggacgccacctatggcgtctgcagaccgccatcaagaatgaaggcaagcgcttcatcggcctggtcgcagtgaatggcggcctgcccatgcgcctggtcgagtcggcgcagggcgggctgtccggcctgctgcgcatggtcaccgagcaggcgctgcgctacgagctgcaggatgagcagctgcgtcaggctatcgaggcccaagccgagctcttgcccgcctgctaccagcaggcgccggtctacgagctgctcgacaatctggtcaaggcggtgctgcacatccgcaagacctatgccctgcagggcgcccaagacccaatcgcccggctgcaggaagagtgccctcactgggaagatctcttccccatcgccctcgattctcaggccgccgccagcctgatcaaaggcctggtccgggatacagtcagcatcacgccccagtcgcggcggcctcctttccagatccagcgcggtctgcgcttcagctccgatggctcaatgcccgtctacgagctgacattcgcgatgcaggctcaggcccgacgcgaccaggtggccgaagcactggggatggccatggaggcgctgccgccacacttccagctgctgctgcgcatcggcgagcgggaatacctggtcggcgaagctctgctcaaagacgaggaataccagctgatcgccaggccgctgccggccatccacagcctgcacaatgccgcgcagctgatcgtcagccgctggggcgccaccctgcacattgccaacctaccgggcggcgaagccttgagccatgacgagccgctgatcttcgagaatacctatccctttgcccgcctgctcgcgcagggcgatgcgctggtcaagggcgagtcggcactggcggccatgccggcgagaaccatcgtgtatgccgaagaaggcgaggctcgcgagctgcatgactgcctggccgacgggcaaatgctgatggaacttcccgccggtaccacccggctcacgtacaaacaacagcccttcgttgtcaccatcagcgccagcgctacccgccacccggaagcctactggcatggcaacagtctggaggcgctctccgtgccggggctgctgttccgtggcacgccgcgcctacgcattgagcagggaacgggcttttccagctatgcgcccgcccatgagctgtttgtccgcactcaaggcagggagctgccgctcgcccaagcccgggcgccggggctgtgccggctgatctggcgcaaggatggccagcgcctgctgaacacccgcgccgtgcttctcccggacgaagcctccatcacctacgcgccgggcgccagcaccctcgagggcagcattcgcctgcaccactggcctgatgtgccggtgcgctgcgagagcgaacaggtcgcgctggagcgccgccatgataggacaggcctgctcctgcggctgaagagcaacggcagccggccggccaccacggttccgctgtgtctgcagtggcccgacggcgagcagaggctcactctgcccttccccggctatggcgtcacgctgctgcgcaacgacactcctctcaagctgaatcaggccctgaccatcgaagagctgatcggatgccgtgcggtattgatgtcggcacagggcgccgagaactggcagattcgcctgacgtccagcggcgccgatgcccgctccaccctctctcaggaaattcgctacaccgggattcgtgaaatccgcctgttcgagctgatcccggcgatacagcagatgttgtcctgccacccggggctcgatcatgtcgtgcagctagagttgattcatgcccaccagacccacgctcgcctacaggtgggccgctactcgacgcgcatccgcctgcacagccagcgcgagatggcgtcactgaacgatagcggctccgacgttctgcttgagcagccgcatgccgagggtctgatattgggcctgccactggcagaaccggaacatgacccggtcagcctgccgctgcatttttccgaacaggtgttcaccggcagctggctggtcagcctgccagacgatgccgtcggcccttggttgctgtacacctctgccgagtcaccgctacacagccgtgcgaccatcgtgccaccgaccgcgagccaactgtcgaagcccctgaccccgctgcgcaaggcgctctgcgaagccaatggcgaagagcgcatgtgccagctccgggctgcgctacacaccatggcagcagacccggaagccgaggactggcagacactagagctgctgctggaccggctgcaccacctgccactggccagcctggacatctgccaggcactaatccgcgagccgcaggctctggccacggcaacgctgctgctggacgatttctccagccggctggcagagcgcctgccctgcgagctgcccttcgagtggctgctgatcgcgccaaagcactggttcgacactttcgcgacactgcgccagcagctggcagccgacaatccccgcctgctatcggtgatccgcaacgacatccagagcaagagccagttcctgtcacgctggcagccggcgctgcgctttatcttcgatcagggcttgcaccactcgttcgatctacaaagcccagatgtggcgttcttcctgagaaatccggcgatgctcaccgactcctggttgtctcaactgctggatggcgagcactcggccatgcagcagatgttccgacgcaatcccgctgaaacccatcaatatcctggcagtggcaatacggatataggggaattcctgaaaacaccccacgggcaaatgctcctccgccactgcaagctccccgccaacgacttcaagctgaccacagtcatgctgcccttcatggccgccttcgatacctactccggccatggacagcagtggcaagccgatccggcacgcctgttcagcctaagaaacgctcgccagttcgatacggtctggtttgactccgcctatcaactcggcctggccatggcgcaagccgcctcgatgcagaagtga

SEQ ID NO: 29954 - DNA, 4347 bp, Pseudomonas syringae pv. maculicola
atggcttattttgaatcgctgatcactgaactcaagacccggagcactcgggcgatccagagtctcctctcgctcgaaagcaaacctcttcgcgactttttgagcgagaagctggccgcaacacccggagcaaaagatgctctgctggccgatcctgtgtttgagcccaccttcggatggctcaagagcggcgcaaccttacagtccttgtcgggcgggctgctcagctcccaactggtaaagtgcatgcagcggccgcccgcggtctttgccgatgaatatacgtttccaggcgataggcagatattcacccaccagctggaagcatgggagatcctaggtcaagaaaaaccagcatcccttgttgtcaccagcggcacggggtcgggcaaatccgaatgttttctcgtcccaattctgaacagtctggctcgtgatatcgaacgcaggggcaggctgcagggtgttcaagccctttttatctacccgcttaacgcgctcatcaacagccagcagaatcgtctggacgcctggacagacgggtttaacggtgatctgcgctactgcctttataccggtgctctagagaacgaagtcaaaagcacagcaaaacagtctgcgggccatgtggcagatcgtacctcccttcgcgccagtgctcctccggttctcgtcaccaacgcaaccatgcttgagtacatgctggttcgtaaggaagatgcccccattcttgagcagtccaaggggcagcttcgctggatcgttctggacgaagcacacacttatgttggctcgcaagccgccgaaatggcgctcctgctacgtcgggtcatgctcgcattcgacgtagatccgcgtgacgtccgtttcatcgcgacatccgcaacgtttggttcggataaaaagaccgtcgagtcgctgcagtccttccttgctgacatggccggcattgaacctgaccagatccatgtcgttcatggttcccggcacgttcccgacattgcgccgctacagacgcaacattcctcgaataagtccacagatgagctgatggaaatagggaacggtcaggagatcagtagagagcggtatcacgcgcttacgcagcatccaatggcacgccaaatccgaactgcattcctgaaaccagggggtactcgcgtaaacacgcttgcagatcttcatcgctcgctaaatggagatgtaagccccgctgatatcctgaacatgctggacatactttcaggtacgcgaagtggtaccacggatgatgacccgttcttccttcctctgcgcgtacatctgtttcataacgtgttgtcgggcattaaggtctgcatcgaccccaaatgcgctcacaagcttcagactgtcttggacactcccgaatggccttacggaatggtctacaccgccgagcggttgagctgcgactgtggctgtccgttgattggcctgctcagttgcaacgattgcaaccagccatttttgcttgcgcatcgacgtggcaatctttcactaacagctgctgacgatcattcggaagatgagttttccatcaacctcgatgcagaagtcgagttggatggggatgagacctccggcgccacttcggacgtgcatatgctgatcgtcaaccgtatcgctggcgttcagacagaacggctttggttcaatctcacgaagaagcaggtggaaggccacgcgtccacactcgattccatcgagatgagggtcttcaatcagatacagcgcgaccaatgcccttgttgtgcgcaggagtcagcttcaggccgacaatttcgcagagcgtcaattggcaccccgttcatgctgagcaccgttatctcgacggtgctggagttctgccccgaagacaaaattgatcctctcaacaaacccttccgcggtcggagaatgatttcgtttaccgacagcagacaaggcactgcccgcatcgcggtgaagctacagcaggactcggaacggaaccgaatccgcagtctggtgtaccactcgctgctaggcgcgacgccatcagcatcgctgtccgaagaagacgagcaggatttgcacgattatctggacgaagagcgcgcaggtaccatccgaccacgtgatgttcgccggctgcaggagttgaaggatcgcaaggccagtctgtccaaaggcgttgaactgccttggacagagatggtgagcagcttgaccaccaacaaggatttgcagaagggattgctgcgctactacagcacactgtcgaagatcgcatttcctgaaaccagcggtgcgagaacccttgcaggggtgatgcttgcgagggaatttgttcgtcgccccaaacgacagaacaacctggaaaccatgggcttggtagagatcacctacccagcccttgcgcacgtcgtcaaagcccccctggagtggcccacaggcaatattgtgagctggcgagcctacctcaagattctgctcgacttttatgttcgtgagaacagcttcctgcaccttgatcaggaatggcaacgtttcatcggtgcaaagatcagccctaaatggctcctcgcgccaacctccaaggaaaaaaacacctctaggatcaagacttggccacaggttaatccaggttctaagcgccaatcgcgaccaatccagctcctctgcaatgcgttcagctgggacgcgcaagataatcaggacaagatcaaccaccttcttcaagaggcctggattgccctgacgacgacttcgacgattctgcgaagcagtgaaacaggctatcaactgcaccttgagtctctccattttcgactgagctcagacgtgtttctgtgccccatcacccgtcgactcctggacacctcgttcagcaacctctccccttactcagcgcctggcgggcagaatcctttgcggccgatacggcctgtctcgatgcctcgataccctcaggcgtttggcggggatgtggatgcttcagagaaaatcctcaacgcccgcgcctggctaaactcagaaccaaaagtgatcggactgcgcgatgagggtctttggtcggacttgcatgaccggattatcgaaggggcgtcttacttccgtactgcggagcactctgcccaacaacccaaagccaagctcaagtcctacgagactcagttccgttcaggtcacatcaatctgttgagctgctcgaccaccatggagatgggtatcgacatcagcggtatcacggccgtcgcgatgaacaacgtaccgccccagacggcaaactacttgcagcgggcaggccgggcgggacgacgcggggaaggacgcgcggttgcgttaaccatttgccgcaagacaccccacgaccagcacgtgttcgccaagccccggtggccgttcgatacaaacatgatcattccggccgtctcactgcgaagcccagatctggtcgcgcgccacgtcaactcctaccttttgtcttactggctcaagacagtattggggcgagaggagctcaaaagcatgactataggccccttctgcatcgaggaaggtggcgattccctggcgggtcgattcgaagcttggtgcacgaataccgcgggcattttgccggctgtcatcaaagggattgagaagctggttcaccgcagcccgctcgtggacatgaactctgaaacgctaactcgccacaccgcagccgcaatgcgagatgtcgcgcagagctggagggaggattacaacaacgccagtcaggagctcggctacttcaaaggctgctcagaaaagaagagcgcggcattgcgtgcgctgaatgctcagctggagcggatcaccggtgagtacctgttgagtgagctggcaactcgccggttcctgccaggttacggttttcccacagacatcgtcagctttaacaacatcatcagacagcccccggacaaagcgcgagaatactcgcgcgaagataaccgcgggcgctacctagatctcgcgacacgagaccgtgtaaccgggctgagagaatatgcacctggcgccgaagttgtcatggacggttgggtttatgagtcgcggggtatctcactcaattggaggcttcccgcgtccgaagaaatcctgcgtgaagcgcagcttttcaagtatgcgtggcgttgctcccattgcggcgcaagcgggagtacctttgcgcaacaaccgggcgactgcgggcagtgtggaagtcccttggacgagcaggaagatgttctgcgctatctggtgccttcagggttcgcggtggacttctacggtaaggatccgcacacagatatcagtaagcctacctatatccccgtccagcgcccttggctacggtga

SEQ ID NO: 29955 - DNA, 2385 bp, Pseudomonas syringae pv. maculicola
atggccgtgcagaacgttcagcttcccgatgattgccatatgtcttttgcacagttgcagctcagccggtatggagaaacactccacaccgccatgctccccggcggcgaaagactggaagaaaacgccccgtgggtattcgaaaacgcattccctgttgctaggttgctgaaggttggcagcttacgtattggcgcaccctccgccctcgtctgcatccctgacgccgcatttttcttcagtgaggaaggtgaatgcgagtccagactcagccccttggctggcagatcgctgaagctgctcacttctggcacctctcgaatgtcctacaagggggatgtgtatcgtatccactgcggcgttcaaggcaacgaaagtgagctgctgcagtggcgcggccgaattctcgacgttcacgcggaacctgcatttgtatatgcaggcatgccaacactccaccgcgttcacaaggacggcacctcctcgcgcgtaaccgatggagaaatagtgtggagcacagtcgctggcgaagaacgcgtcgtttcggacgcacgcccggcactggggatgggtacgttgtcatggaagctggatggggaaactcagatccgacagacagcagtatgcctgcccaataatgccgtgatcgaatccgaggcgggttcatctgcttcgaccggactaattcacctgagaggctggccagcacaggcggttatatcggcagggaacgaatgccatgtcgacgccgttccagatggcatgtcctggcgagtggcagtgaccgcgcaacccaaccagattccctcgcacttcagtctgcaactggcgtgggcgggtggaagaacgcagaagataaccctgccgtttcctggaaaaggcgccgtatttcttgattcggcaggcacgcgcctggcgcctgatgcggagttggaagtcaacaacctcatgggctcccgcctcacactcatgccaggccgacatggtgtcgcttggaaggtgtgtttgtcgttgaagtcaaaacgaggcggccaggaattggcaactcgtgtgttcagttatggacgctcctgcgaggtacgcctctttgagttcatgagaccgatccaacagatgctggcttgcaccgaagacctggatgcgtacgttcaggtagaagccctggagggcggctccctgcgtgcgaagctgttggtcagacgttatgccacacggctagaagtcgatagaagcagcggcagcgtgcactatccagcacatgcactggcgcctgatgaggatgcgttgaagctgcttgatgtattcgcgctgtgcattactcatccagaacaagggcccgaaacccttacgcgagcccgatccaaagaagacagcctagaacgatggtggtttaacccccagaccaaacaagaaggcgcatggctgatctatccggatacccagtcgcgaaatgcgttcaggcccctcgcctggagtacgcatgatcaaccaaccgggcaacccgtgatcgctcatgaagggttacgcgcagcactggctatcgagtcctcaggagcgcgcttcgctgcgttgacaagtgccgtggacacgatgaccagtagtcctggccatgctgactggcggctgctggaagaattgcttatccatacttctcacctcccgctagcgggtttggatatatggcgggttttcgctcgcagccccgcagccatgatcactgccctgcttcacctggaaggattcgccgagcacgtcgcacagaggatcaccgaagagcttccattcgaatgggtcttagcctctccccaagactgggtcagcagcgtcgcaatactgaggcgttattactatcaggacgacggcgatcgaggcgttcgcgctctgaagcgaagcctggaggcgatcaaacaaagcatgagtatgtcgcaacctggcaccgtgcttggaatcgacttggcctgtcatgaagccatgagccttccgactcaggaaacaaggcttttactaaaccataacgctgtgctcgacgaccatctcttccgtgccttggtagcaattgagcacggcccgctccaatcactggtacgtcagtctgaccgtggcgacatgtggcctaacgagcttcatcaggacatttccaaattcatcggaagcgcgtcaggcaaatcgatcctctccaggtttccaccggtactgggagatttcaagaggctgacaatcgcctttcccatgtgggtcggttacgaggtcacccggggagctgcccgcgactggttagcgcaaccagacaggctgcatgcacttcgaacctatcagagctttgatcctgcatggttcgatgcggcctaccacttctcgctcgttcacttcttcaaaccggcataa

SEQ ID NO: 29956 - DNA, 6321 bp, Raoultella planticola ATCC 33531
atgactacacgctatttttcttcgctgattgaacagtcgttatctcgttcgacggaagctacgctgagcattatgggcgtaaccaacccgtatcttcgcgagcaccttacgcagcagatggcggctgaatgtggaaaggatggaacatttctggcttctcccgtatttgaacaaacatttggctggaaagagtcaaatttcacgatgagggatcttgccacaaagcaaacgttactgagtaaggaggttgttgattctctcgataacgaagaaaacggacgctatcgttttggctcaacctggaaacctttcacacatcagttagccagctggcaggcattactggataaaaaacattcggtggttgtgaccagcggcacgggatcgggtaaaacagagtgttttatggttccggtgcttgaggatctttatcgtgaactacgggacaacgggaaaaacccacttataggcgttagagcccttttcctttatcccctgaatgccctgatcaattcacagcgtgaacgtttagatgcctggacccaaggttttggaaccgggattcggtactgtctgtataacggtaatactgaagagctgcatgcctcagtaaaaagtgagcagacaaaccggccaaacgaagtgctttcgcgtgagaaaatgcgtgaggaacctgcgcctattctggtcacaaacggtaccatgctggaatacatgatggtgcgtcaggttgatgcacctatcattcagaaatcaaaagcggaaaaatcattacgctggatcgttctggacgaagcccatacctacgtaggatctcaggctgctgaactggctttacaactccgtcgtgtcatgacggcgtttggcgttacgcctgatgatgttcgctttgttgcaacatcggcgactattgctggaagtgatgctgaaaaacagctgaaaaaattcttgtctgagttgtccggtgtgccacaggaacgtattgatgttctgggaggtagccgtgtcattcctgacctggcgccgtgccagcatctttctctatccctggatgagcttgagcatatccctgattctgatggggagggtattagccttgagcgctacaccgcgctcacccactctccgcaagcgcgtcatctccgcgaaatgcttgtgagtcaacccagaccgatgactcttgatacgctcacccggcgattgaatgagctaacaaaacatcaatacactcagcaggatattttgcgctggctcgatctctgtaccggtacgcttcccaatgcgcaggaaccggcatttctgaaagtcagagcgcatattttccagcgtaatacccaagggatatgggcctgcgtagataaacattgctcagctaaacacaatactgcgcttgagaaggggtggccttttggcaatgtatatgtgaatcagcggcaaaactgcgagtgtggcagccctgtttatgaactcgcgttctgcaatgagtgtaatgaaccgcatttacttgcccgtgacaaaaaaggaaagcttgtacagtgggacaataaaggcggggatgagttttcgctgcaggatgaagcacctgacgattttgactcttcgagtgaaaaagttcaaaaagaacaggtattccagccaccccatattattgccgcggaatgtaataccgaaatgggctatatcgtgcagcgcctcgatcgtcaaactcgaagtattggcgtagtcaacccggatagtattccgttggcgatgaatgatattgagcaggtttgtagcgccagcaactgcggttatagaggggggaaaggtaaacaacccttccggcgggcactgttaggcgggcctttttatgtgacgaatatcgtgcctaccgtgctggaatattgtcaggactttatcagtgatgaaggcaaagagggggttggcccgctttctttgcctggacgagggcggcgactgattaccttcactgatagtcgtcagggaacggcacggatggcggtgcggatgcagcaggaagcggagcgcagccgtttgcgcggtagcgtggtggatattcttggatggcaccaacgtaaacagtcaacacatgcaccaaatgcccaggccgacgtaacgaagctgactgagatggcagcacaggcacgtgaagaagcgaaaaatcttcatgattgggggatgccggaagaagcgatccgtcgtgaagaacaagctgagcgcttagagcacgctatccaggtcgccactggcggaaaagtcgatacggttttgatttctctttcctggtccgaaatggtcaaggaattgaaagataaggcggatatcaaaggtcctatcttgcagtataaccactatctcaagcctgaaatcttcactgaaaatggtggccctttaaaactcgctgaaatgctgcttttccgtgaattcatgcggcgcccgaaacgcacaaatagcctggagacacaagggctggttcaggtgggttatcaggggctggagaaggcgcatagcattcctgctaattggcaagataaagggttaactctggatgactggcgtgattttcttaaggtcacgctggatttttatgtcagggaaagcaactacacccagctggacgaagatctgaaaaactggattggtagccgtttctcttcaaaatttgtccgtaatcccgattcgaaagagcctgatgacaaccaggttaaacgctggccgcaaattcgtcacggtaatgtcacgcagcgtctggtcaaacttttgatcctcggcgctaaattcagcagcgtaaatacggtcacaatagatatcgttaatgcgtggctaaaagaggcatggcttcagttgacggggtcattagcggtattgaaatctgacggcaaccgtttttatttacctaaagaacatctgacattctctctggttcaaaaagcctatatttgcccggtaactaataaattactggcgacggctttcagaggtttgacgccttatctgccaatgcatattcagtttgaacggctgaccagtacacaatatgacgcttttatcgcccaggcggtgacgctgcctgagatttggcagcacgatcgttctcaggatgattatgtcgatgggttaataaaagttcgtgactggctgggtcaggaccctctggtggcacaattacgttcgcaaaacctctggacggacattaacgatcgcgtcgttgaaggtggattttactaccgcacggcagagcattccgcccagcaatcatccgaacgtctgcaaagttatgaacgtatgtttaaaaacggacagcttaacgttctcaactgttcaaccactatggaaatgggcgtagatattggcgggatttctgccgtggtgatgaataacgttccaccgcaccccgctaactatttacagcgtgccgggcgtgccgggcgaagcaaagagtcccgcgctatttcttacacgttgtgcaaaggcaacccgcacgatcggcaggtttttgctaaccctctctggccttttgaaacggtgatccctgcgccgatggtggcaatgaattctgagcgtctggtacagcgccatgtcaattctctgctgctgtcagattatttgtgccatgtcatcggtgaaaccgaaaaagaacgcaccagccttaatagtcagtggttctttggtgaagagcttgaacagtcggtgtgtaaccgtttcaaagcctggctggagcgtccgacgctgagtattgacgcggctttggttcgtttggttaaaggcaccgtgcttcatggcgttgcggcagaaaagctgcgggataaaacgtgcgacgcgattacggcgctgcagaaacgctggctgggaatttatcgcgatcttgttaagcaggaaagtgaatcgcagcccaatacgccgtatcgcaaacgtctggagctggagaaaaaacggcactgcggcgagtatctgctgcgcgatttggcggccagaaccttcctgcctggatatggcttcccaacggatgttgtcacttttgataacttcactatggaagattatatccgcgagaaaacgtacaaagtccgtgataagagcgatcgtgaagataacgtctcgcgttataaaggcttgccttcacgcaacctttccgtggcgatccgtgagtatgcgccgggcgcggagattatccttgatggccgggtcttccgctccgctggggtgtctctgcactggcataatcttaatgctgataccaatgaagctcagcgtctggatagcgcctggcgttgtcacaaatgcggtacgttaggctatgaggaaggtattggcggttcgggagacttgttctgtaccaatgacgcgtgtggtgagcgcatcacgccggaaaaccgacgtcaggttttacaacctgcgggttttgtgacggatgcgcacgatccggtgaccaataatattgagaccatgaaattcattccggttgtgccggcctgggtatttgttaaggccgagcgtgtaccgctgccgaacccgttgatgggctttatggcttccggggcggacggtaatgtgttccagcaaagtatgggggaaggcggtcacggctatgcgctgtgcctgagctgcggtcgtgcggagtcgatgctcaacctcacggatgcgccgaaatccatggaagcacactatccgcctcgtcctggaaaggccgaccgggatagccagaatcagcggattatctgcccgggttcaacggcgctgaataaaaatgtcacgctgggggcgctggcgcggacggatgtcttagagctgattgtacgccgcccgcaggacggagagtatatagctgataacacggaagaaggtcgcattgttgcaatgacgctggccgtggcgctgcggcgctcgctggctagcgtgctgggtgtttccgcagcggagctgggctacgcggtgcgcccggtcaggctggagaacgagcaatccgttctggcggtacagctgtacgatattatcagcggcggtgcgggctttgcttccagcgcgccattgcatattgaggccgtgctgaagggaatggtgaagcagctgggctgccaccactgtgataccgcctgtagcgagtgcctgctcgactcacagacccgccacgatcacgatctgctggatcgtaaagcggcgctggcctggctgggggcggatttcagccactatattggtttgccggatgaggagaaattctcactggctgatgcgcaatattgccctgggagcattgaagatgctctgcggcgggccatcaacgatggtggtcgaaagctcacgctgtggatgagtgggccgttgaatgagtgggatctgtatgcccgtcagttccgcaccgcgatccagaactaccggctaaaagatgatgttgaggtggtgctggttatcccgcgaaacattgacgatccggagatccttctggaactcgcgcagtttacggcgataggcgtgcagctgtgccagtctgagctggataaggatacgccgctcgttgcgcaggtgacgtttgacgatcgcctgatgacgttaatttctcgcagccatgaagcaaccatccccgggccgaactggcatctgaatagccagatggttattcgcagccatttgcaggcgccgatagcgctttataaaacagagttgccatccgaggatgcgggcagcaaaggcctggttaacgatattgaaatccataagcagcttaacggcccggtttctcagtttggccagcgcttctggaacctgctgaccgagtctcaggatgatattcagcgcctgctgacggaatgccgggtgacgcgtgtccactacagcgatcgctatctgcaaaaccccgtagcgctggcgttgttaggcgggttattgaagacgttgaaaccgatgctgacacaagaggcggaagtgacgattgatacgctgttcaggagtaaagagcgaccggggaacaaaccgttccatgactggatgagtgaagcggacttccaggattttgccgaccagtggtttgcggcatccatgggacgagccgtggagattcaggcgttcaactctggccgcgacattccgcaccaccgtaagctgatggtaagttttgataatggccaggcgctgaaaatccgctttgatcaggggatgggatactggcgtattaactttgcgcgagcctggcgtgattttaactttaatgatgacgtctctttccagcttgggaatatggcgcaagcctgcgcagaaggcctggtagtgaacagcgaggagagctgggcaaccgatgtgctggtgcaggttattgctccttga

SEQ ID NO: 29957 - DNA, 3300 bp, Raoultella planticola ATCC 33531
ttgagtcatacagaacatatatcaatacttaaatgtactccgtggttagtcaaatttctaaatcgtagaagtttaagaaggcctgataatcgccctctttatgagtaccatgcaacgagtgatgaatatggcgagttgaagcggttgttgagggcgataggattacccgatggttacaaaagtgataaagggtacgcagcctgcttcacattgttctgctcagagtggtatcgaagagattatgaaagggaatgtggatgggcatgggagccaatttataaaacgataggcgtatcagcatcttcctcggaaatggggaaaataattcctaaaggcctggatgggtactgggggcgccccgtgcgattctatgatacagaaaggcggaattttttagggtccttattcagtgaaggcggtctacctttcagattgttgaaggagtctaatagccgttttcagtcgatgttctctctcattctcaatcaatacgctcaggcccaatctgctaacatttccacgtttgcgttagttcatgcagcggtagaaaaatcatttctgccagtcgtttttaaagaggatacttcagtcgagcttattagtcgtatggctgaacagttagtttcgcttgttcaaatatatgatctgagtaaccatacagaacccgtaaaagaacttgaccgtgttcatccgaagtggcgggacagtttccctgttcctctcgatgacgatacagggaccagtttccttaatggacttttacgaacagcttctactgaatccaaacctcgccttcaaaaaaatagaacaaccctatgccagttcttatggtcagaaaatcatcctgaggctttacagtcgctcatttctcttccggaagagctgagtttttcgattgacagcgaaccttctacaacacgtttcgagcttgccatctatgaagatggtaacgaaattgcgagcctggggcctgcctatgcaacgctgagtaattcacaggcgaaaatgagagttcgtaagcgtgaaattaagttttttcgaaaaaatcccgctgccagcttgtttattgtggcgagagccggagggatgcttgtcggaaccaggttgttggaaggaagtgaggttgccgttggcgacgtgccattagtttttgtttttgataaaagtgaatggttgctacaagggcaagcatcttgcagtgtacgtggcagccatgtgctcattgtattgccaaaggatggttgtctggtctcagagctcgaggattgtgaaaccgatttttcggctttgggatgccgcgctctgattgtcaaagggcgcctggatatcctgattgaaggcggtgaaacgtatcggataaagacaggaagagagcagattatccagacagggttctctttccaggggaagcggttaaactggacaagctacccggatgagctcttccttggtgttcctggaattactcataattctgagaatctattaacgcatcattatagactttttttcaacggcacatttatagataattgtgatgtgcaagagaaaatgggagctcagtttatttcagtacgtaacgaaaataatgaaactttactgcgtaagaaaataggtgttcttcccaatgatttttgtctggaaataaaaaacggacaacaagcaaacgaaggttctgtcattattactactaagtatccttgtttgtatagtttgaaagaaaaaatactggaagttggacgggagcgtttgtccggcagtacagaaatattgatgaaggcggaggggattcctccagcatcgatttcattacaaataacgccaaacctcactgcgaacccgattgttattttgttaccatttccagcacgaggctgtcttgctttcgataaagacgagaagccactgccaaaaaatttaacgattaacgaccttctgggagccagagcataccttttcggtaagaatggtgagcctacgcgataccaacttgaactgcgtttacgatcccgtagcggaatgcaggcatggtatgagtggcgctatagtgcgggagaaaacccggtagagcttactttatacagcttaagggagcatattgacaatttactttccctggaggaagggattgatcaaacagtggatatgcgtattgagggcggaggtagctcctttacctggcaaatcaggcgctataaatatagtcttgaatatgatcgggaaatgcagcttcttcttgctaattcagtgagcaatcgtacggggcagatcccttcacccgttattatgttactcagtgagcctgaaagaaaagcagtatcgctcgtatcgagaacaagcgaaggcgtaccggttggtgaattcgaattaagttcgacgatacaaaataatggcccatggctggtgttgccgaaacaaggtgaagaagcctcattccggccatgctacattgcaggtgaaccggtaatccaaagcgataccacggcaatacaatccctgcaaaaagcaacgcagctatttaatccgcggtcagatgtaaataccatcacgttagttctggaacaaatggcgagcgaccctgcacactcgggctggcagttcttacgtaatttatacaatcagtttggatatttaccactggctacctttgaggtatggcgtgccttggttcagcatccacgggcattagcaatgtcactgtttaaatttgagatgtccattgattatctcagccgtatcgaaagcgagtttcctgttttctgggagtttttacctattactgaggttaaacatgcctcgatgcgttttcgagcgtttctgactcataaaggtgctccggaggaaatgcagataaagttactgggtcgaatgttccagcaattagggactgtatttccaacctatgccagcgaagtgcaattatggttagaccagggaaaattaccaccgacttttccggcacaaatgataaaaggcatcattcatgactggcatcaggagctcttacgtgaacatggtgaatctcgttggccagagtttggtggatcgggactttttcgttggtatgcgtcgcaaaaggatcccattattgaggtttcgcccgataccagttatcgatattccgtcactttgctccccatatttgctgccgctgttgcatgcggcaaaacaacatttgacagtgtttttgaaaataaacctggtgccgtatttttcttaagacaagtcagagattttgactcgcgatggtttaatgccattttccagtattgcttattgcgtaatgtggctaagaaataa

SEQ ID NO: 29958 - DNA, 6126 bp, Rhizobium etli CIAT 652
ttgaagccctttaacacgctttccgatattcgtcgcagatctgccgaagcaatcatcgctcagtccgggatcaggaacgtggccctcgccgaccacatgcggcgcatgttcggctccgaagcgcccgatgcaggcgccctgctccagcagccggtcatcgaaggatcgcatccgtacgtcgccgccaaaaagacgatgtccgaagtcgaggcatcggtgctgcatcctcgcttcgtctcgatgctggacgagattgcaccgtcgaacgactatcggttccccaaggggcgccgtccctttgctcatcagttgaccgcctgggagcatctagccggccgctcggcccctcagtccgtcctggtcacctcgggaaccggttcgggcaagacggaatgcttcctgttcccgattttgagcgaccttgtccgacagctcgatgcgacgagcacgccgctcgaaggcgttcaggcaatcatgctatatccgttgaacgcgctgatcgaaagccagcaggaacggctctccacctggacggcgccgttcggcggaaagatcaggtactgcctctacaacggcaaccttccacaatccgaaccgaactcggttcgtcgggagacacctgagaagctcagggatcgcgagcagctacgagctagtccgcccccggttctggttacgaacatcacgatgctcgagtacatgctcgcacgcagcgaggaccaaccgatcatcgagaaatccaagggaaaactgaagtggatcgttcttgacgaggcgcactcgttagtgggcgccgccgcggctgagattgcgctactgctgcgtcgcgttcttctggccttcgaatgcaaacccgaagaggttcatttcgtggcgacgtcggccacgatcgggagcggcgacgacatacaggcgcagctcaaacggtttttggccgacgtggcgggtatcgagcatgcgaacgtgcacgtcgtcgaaggtcaccgccagcttcccggccgtccttcgaaacgcgggaggatcaccgacgtcgaagcccttttcgacgtacggcccgaagagcgttatgaagccctcgcggccgacgatcgcgtatggagcctcatttccgatcgattgttcaaggagccgctgacacttgccgaattcgaacgatccgcgcggtcgctgggtcttgacgctgagcggttcctgacgctgctgtcgagcgcggccaggccgcatcccgacgcgaaggaggacgaggagaggctcgcgcccgtgcgtgtgcacagttttgagcgggctgtacccggcatgtggacctgtgtgaacgatggctgcccggcgtcgcccgcgggctggtccttcggcgcggtatacctcgatcgctgcgacttgtgcccgacgtgcagcgctccggtgctcgagatcgtgagctgctcggagtgcggcgaggtccttctcgaggcagtggagcttccgaatgatcggatccgcggtacgcgccgcgacctgggcaaggacgagttcgaagccgaggcgacgagggaggatgacggcacaggcgacgacgcggatgacgaggccgatgacaccgagcaggaaatggtcggagatctcgttggaaccgagattctgatcggcgcagcggccggccccgacttccgaccattgcacctgtcgagaaccgactggaagatcgaggctgttgcgtcgcccggctctgcatccgtgtactcggccttgaagcaggattcgtgcccgtgctgccagactgttgcgactaacggcgtcgacaagctacttcgccccgttcgcttcggggcgccgttcatgattgcgagcgccgcaccgatccttctcgaaggagtcgacccagaggtggacaggggagtctcgccggcgcagggtcggcgcgtcctatcgtttacggacagccggcaggggacggcccgcatgtcggcgaagatacaggccgaagccgagcgaaattttgtccgctcgttcgtatatcataccgtccagcattcgcttcaaattgggaccgcggtcgacgcgtccgagatagagaagacgatagcaagtctcgagccggtcgttgccgccaccagggatcccgcactccagaatctgctcgaccagcagagaaaagcgctcgccgacgcatccaagccctcactggagggcgtggcttgggacgatatggtcgcgcgcctgtcgcagcggaaagaagtcggccagtgggtgaaggaagtttgggagccacgcgatccggaactgttcaacgacagcagaaagctggctgacttcctcctgcttcgagaattcgcgagacgcccgagaaccgctctctctctcgaaagcctaggactcgcgcggctccgcttcgccgcgatcgacaaccagactgtcgtgccgcccgctttcgcccgacatggaaaggggatcgaggactggcgcgctttcctatacgccatcacggcgttcttcctgcgaggtaattccgccgtcgcgattgacccggcggtcatgcattggatcacgcccaaagcgaagacgcgggctttgcgcgctccgggcagaaccactgatggcgagcggcggttcctagggtggccgggagttccgaggaaggggaatccttcgacgcctcagttgctcctgatgaacggacttgggctcgatcggtcgcggccagatcaccgcgccgatttcgaagagatattcgacaaggcatggcatcagcttcaggcggtattcaacagcgatccggatcgccctgccctcgacctgcgcaaggcccatatcgcgcccctgcccgacggctattactgcgccctgacgcgtagaattgtcgacatcgccccattgggctcaagtccgctcgtgcgggcgtcgaggcactccgcccgccgcgtggcagaacccaggaagatgcctagtcttcccgcggttctactgggcgacgtcgacttcgacgaaggtcgacggaagatccgcgaatggcttgacggttcagacgacgtgacggccctccgggaagatggtgcctggaacaacatttcggaccgcgtcgccctgttcgccgattactcgcgatctgccgaacattcggcccagcaggacgcctccgtcctccagcattacgaggcgcagttcaaagcgggcaaaatcaacattctgaactgctccacgacgatggagatgggcgtcgacatcggatcggtatcgacggtcctgatgactaacgttccgccgtcgatcgccaactacaagcagcgagtgggacgcgccgggcgacgcaggcagccattttcgctcgccttcaccttctgcagggaccgcccgctcgaccgagaagccttcaattcaccggagcgttacctgggccgtaccttggcggcgccgaaggtcgcgctaagcagccgtccgatcgttcagaggcacgtaaacgccttccttctgcggcgctttatgctcgcgcgcggcggcaacccgctcaagatggaaatcggagcgttcatgggtacgccggcggtggtcggcgaggctaggcccgttgcggagttgcggccgattgcagcctttcgcgagtggcttgggaagccttcgacagccgccgcggtcgagatggagctcacgagcctcgtcaggcactcggttctcgaagggcagtccgatctcgtcgagagctgcttggaaatcgcgacgcttctggaaactgggttcgtaaacgaatggacgggcttgcaggctctcgccaaggacgaaggcatcaaagatgctgccaagggaagaatggctctcgagttgaagcgcctttgtcaggaattcctcctcagcgcgctagccgatcgcggcttccttccgggccacggtttcccgaccggcgtcgtcacgttcgtcccacacaaaccaaagtccaccgacccgcaggatggacggcgcacgacgcggcttgtcggaccccaacgatcgcttgaccttgctatccgcgactacgccccaggttccgagatcgtcctagacggtctggtgcataagtcggctggcgtgcttctgaattggaagcggccggcgagcgaggaaaacgtccgcgaggttcaaagcctaaagttccactgggtgtgccagagctgcggcacaagcgataccggacgtgacctggtgaccgaatgcccgatctgcgcgggagccgtgagaaacgaacagtatctccgtccagcaggattctctgtcgacgcccgagagaaagcgcacgcggagacggacatcatctcctacgtccctgcggaagagccgagcgtgtcggtgcgcgcgagcgcatgggcttcgcttccagtaccggatctcggccggttcaggagcacgagagaagggtcggtctactacagcaaccgcggacagtcgaaaaacggatacgccctctgccttcactgcggtcgcgcggcgcccgaccaccagaagcttgagaacggcgaccccgatcccacgcacccatctccgctcgagctgcaccttccactgcgatggaagaagggcgagagccgactattctgcgaaggcaacgacagttcctgggccatcaagaggaacttggaactcggctatgagatcacgaccgacgtcttcgagctccagccgtcagcgtctctgacaagagctgcagcaaccgcgcttgtcattgccctgcgcgaaggcatagctcgcgatctcggcatcgaagcggacgagatggggttcgcgacgcagagttgggacggcgtcctcgctcagcgtgtacggtcgatgctcgtgttcgaccgtgccgcaggaggggcgggattctcgactgcgataccatcgcgacttccgactgtcctgcgggaggctcggtcggtactgaactgcccgaatcctggatgcacgacgggatgtgcctcatgcgtgctggtgtccgacgctcccttcgaagagggacgactagacagaactgcagctttggacttccttgacgctcatctctcgttcaatgacgacgtccccgaagaggatcggtttggggtggatccagtactctccacgtccacagtggacgaagtcaaccgactcctcgtcgtctctgcgaagcctatcgttcacgtcttccttcccgaggccacggaccccggacaactgtccgagtgggcgtcgctaacgcagttcggaaagtggtactcgcaaggatacgacgttcgtttcgtcctgccggacgccgccctttcttcctacgacggtgcgaagaagctggcattctacgacctcgcacagcgtttcagccgtacgggaggcaatttcccgatcctgtctggaaacctaaccacccaagcgaacggcgcgttcgccggtatttcggtgaccacggccggccgaaccactgcttgggcgtcgagagacgcttcaccctggctccccggaacgagatgggggcagcctgcaacaatgccggtggtcaaggcggccgtgaattggacgccctccttctcgccgctagagagtaaggcgctgcttccgtcggccacgtccagatacgaaccgatcaaaggcgaactggacagatcgctgacgctgtttggaaacggaatggcgtctaagattcggggactgctcgaagaacttggaataccgaagacatctacgatcgagtccgttatctacagcgatccctacgtgaagtcgccgttggtggcgaaaatgttcgtcgacacggtcgccgcattgacaaaaggctcgacgccccgtcccgtcgtctctttgttgaccggcgacagaccgggaacgaagcccggaatgcagaacgcgatctcgaacgactggcgcgacagcgcggtggcggagatggtgttgaaggaatacgcgaaaaggaaggacgtcgaccttgatatcacgttccaacgtgttgctcacggtcgctacatgcatgtgcgttttcccggtgggaaggaggcgaccatcgtgttcgaccaaggtttcggcgcatggaactcagtaggaaacggcgggacctccacacgttttgactttcgagatccgcccgttaggcaggcggagtcgatgggcagatgcggtgcgatggtcagcaagacaggtcttggtcccacgtaccttgtcgctagcatcgattag

SEQ ID NO: 29959 - DNA, 3225 bp, Rhizobium etli CIAT 652
atgccagcggacgcactcgtgcgatggaaactgtcctaccttggacgtcgtggactggaagtacccgacggacggccgctccatagatatcgtatgagtgataacgagtatgcggaaatccgagagattctacgcgccgcaaccggccgcctgttgcgggaagacggcgtcgctgcaagtttgtttgtggcgttttgcgcagaatggtttcgtcgagagtccaccagccttttcttgaaatgggattccctgaacctcgacgtccttaacgacgtccctcatgacgcgcgccggcgcctcgcggaagcgggcctaggatactggaagcgccctctcctaagatttgacaatggtcgcgaattcctgctttccctcgccttggaaggcgggatttccgcccatgtgatcgccgacggcggctcgacgtggctctcggaataccttcgggcaatcatgcgtttttcgctgatggacggtcacgccgaccacgtaaagggttatgcgcacgacatgtcggagatgatccgcaagtcctacaagcaagaaggattcgtggatctatgcgccgaactcgtcctgacgttgctcgactggcgcaggacggtggagacggctccggcaggggtggaccctgttcagttcctcgacgcgcacagccccgattggaaggcgacgcttccaatcttcattcccagcaacgacgaccagatcgcacgccggcttctcaacggactgctggttgaaaaggtggaaacgggaccggttggcagcggcgtcggcgcggagcgttaccttgttttcgaaaccgatcgatggcggccggcgttgcagctcaacgcacgtggagaaattccggcaggcaagctccccggcatctcctcgaagggtcgatggaaggccggtccctccggaaagcttgcagattttcttccgagccagttggcactgttcgagcctccgaccgaacacgagaagacatggcgcgttcgccccacggcacagctagaccggctgcttgtcggatttggtttcaacgaagctgtcaccgtcaatctgacgtgcggatcggacgtgcagccctttccttggcccggtggctcaccggtggtcgggaagatcatggcgttcgtcgccgagggggcagatgtccagtctcagaaaaagctgaggctggccaaggttggttcagccagccttccagcggccacggtctacgtactggcacctgcggactggatcgtgacaacggaagaaggaaccgctcttcctgcaaactggccaggcgacgcggggacgatcgtccacgttgtcaccggcacggcttacttccagaagccggccgcaactttcggagagcgttacagaatcgaggccggcaaggacgagaggcaggaaagtctgtcactgacatccgtggaagcatctcctctccagtcgatggacgaactcgaaatcttcgagggtccggttacgatcgagatcgcaagcccggcgggtgcaagacagatccgcccgaacgaagtcctgatacgtcagcccggaggcccttggaccccggtgaatgaccgtcgggtctctcgcttaggcgttttcgacatttcgtggcgcgacccgaccgcgaacatccagctcgaacgccgtcgcatcgcgataatgcccatcggcgcgcgcctgaagggaaggatggtcagcggcctcgaggcacagatcgttgaagagaacctggaagactggagcgtcagcctggcctccgccgaggtaaaagctgacgtcgtcaacgcgggcgaacataggttcatgttcgctcgcaggccgcgctatcgcgtcgaggcggttctgtgcgctcccggtggacatccgttcagcgtgtccattccaataaaaagtcgcctggcttcagtgatttccagcgatggagaaatcattcagcccggccaggagatcgacgtcaccgcgctccggggagcgatcgccgagtcgtcttcgaaagccacgctgacactcacgccccggaacgaacggtcgaattctcttcagttcagcttcacaggagagattccgctttccgtgttgaagccggtcgtcgaagagctgatggcacgcatcagcgagcaggacgcggttctcgacatggacttcatcggggatgcaaggacatcgatcagggtcaagcggtatcgatattcgcagcctcattatcgagacgggcagatcgtgctcgaccagacgatgccttccgatccagtcgtccggatgatcctacggcctgctgaagaacaccccctgagctccaacgcagatggcacgttcgcgctgcccgatctctgcgagggaccatgtctcgtctacgtacgtgacgggccggacgttgtctccagaccgctcctggttcggcttccggcgggcgatgtgggcgaatcccatttccgctccgcgcttttcgctcctgatacccggaccagaatggagaagttcgagcaggccattttccagttcgaagccggaacgctgccgcccgacgacgtcaactaccttctcgatctcgccaccaatctgaacggtctccccgcggcggcattcgacgtccttaaagtcatggcacgacggccgcggtcgatgctccgcctcttgttcaaggcaagggacgatgcgcagagacaagccatctgggcgctccaggaccagttgccattcctgtggctctccatgccatcgagagcgtggcgggacatgctcgtcgcagagagagaagagttcgaaaccgcgctttcgctcgtacaactgccccccgagaaggtcttcgaattcctggccaaccgcgtcaggtctctgtgtgactcgcttctgtcccttgaacctgcactcgccgcggttctcgacgtcggaggcgtgaaggcgcagccgacgttggacatggtgctgatggaatacgtacgcgatcagcatcttttcgacgacgagacgtctcatcggaacaccgtccggaatcctgtgctggagctgttgtcgcaatcctccatccgcctgccgccggagttcgaaaaccacagcgtggcggaattcgagggcattgcggttcctgcatttctcgcggctgccgcgactggcagaattgcatcgagcggactttcagacgtcgtggtgcgaaaaaccctccgcgagcacggccgttacgtatcgttcgcctacccgcatcttctacgtttctatgaggccctttcttga

SEQ ID NO: 29960 - DNA, 6111 bp, Rhizobium phaseoli Ch24-10
gtgaagccattcagcactctctccgacattcgcgccaggtccgccgaggcgatcatctcccagtcgggggtcagaaacattgcccttgtcgctcaacttagagcgatgttcaactccccctcgacgtcggagggcgggctccttcaacagccgatcatagaaggtgcgcacccgttcgtgcccgccgacgttgatatgggcggcgtcgaagcttccgtgcttcacccggatttcgtatccgccatcgacgcgctcccagacggcagcgactaccgctttccgagaacacgacttcccttcaagcaccagcttcaggcttggaagcatctttcacccggaggtgctccccaatcagtgctggtcacgtccggcacaggttcgggaaagaccgagtgtttcctttttccgatactgagcgacctcgtttcgcaggccaagggcagatcggcgccgctcgaaggcgtgcaggcgatcatgctgtaccccctcaacgcactgatcgagagccagcgggaacgcctgtcggcatggacccggcccttcggcggacaggtcagatactgcctgtacaatggtgatttgccgaactcgcagccggcaagccttcggcgcgccaccccggagcagcagatcgaccgggaacagcttcgagaaagcccgccacctgtgctggtcaccaacattacgatgctcgaatacatgctcgcccggtccgaggaccagccaatcattgagaagtcgaaaggaaagttgaagtggatcgttctcgatgaagcacactcgctcgtgggtgctgcggccgccgagatcgcgctgcttctccggcgcgtcctgctagcgttcgactgcaagccggaagacgtccacttcgtcgcgacgtcggcgaccattggcagcggcgacgacgtgcagaagcagttgaagcgattcctcgccgacgtagcgggaatagcagatgccaacgtgcacgtcgtcgaaggcaagagacagcttccatcgcgtccgactaaacgtgccaagcttccgccggcgagcacgctgaacacgttgtcctccagcgcactcttcgaggcgatgagtaccgatgacgcggtgtggaatttcatcgagaagcaactctttgcaacgccccagcagctaacggaattcgagcgggttgcaggcacactcggtctcgaggccggagacttcctgacatttctctcccatgcagttcgcccgcatccaaagactggcgaagacgagcggctcgcaccgatgcgaattcacagctttgaacgcgccgttcccggcgtctggagttgcgtcaaccctacgtgcaaaggctcacccgagggatggtcattcggaaagctcttcctcgatcgctgtgacacctgccctacgtgcagcgcgcccgtcctcgaggtgataagctgcgtcgattgcggcgaagtcgtgcttgaagcggaagaagacgccgcgaacgaccggatactccccacgcgccgcgttgcggacaaggacgaattcgaatttgaagccggacgcgagaacgacgtgcccgacgcggacgaatacgccgacgacgagacgaaagagcacgatgtcgcaatccgccgaaagatcttgcttgggcccgcgacgagcgggcgcttccgcccgctgcatctgtcgacgtccaagtggacggtcgagccgacgtccactaccgaaacgatcacagtgggatccgatctgaagggcgacgcctgcccctgctgcggctctccctcgagaggaggtatagaccgacttctgaggcctcttcgcttcggcgctccgtttatgatcgcgaatgctgctcccattcttctcgaaggggtcgatccagccaagaattccccggccctcccgtcgggcggacgtcggcttttgtccttcaccgatagtcgccagggaaccgcccgaatgtccgccaaggttcaggctgaggccgaacgcaatttcttgcgctcgttcgtctaccattctgttcaacattcgatgcaatccggaacggctgtcgacaccgaaggactcgaggcgcaaatcaaagctcttgagacggcgttggcagcgacgccgatcgcagccttacagaccatgctcgacgcagcgaagaagaagctggcggactcgagcggaccgaacatgtcgggtatcgcatggagcgagatggtcgaacgtctgagccgaacttcggaggtgagcgactgggtaaaagacgtctggaagcctcgcgatgacgacgcgctgttccatgacagcgtaaagctcgcagactttcttttgatgcgcgagttcgcacgtcgtccgcggactgctctgtctgtcgaaacgctcggcatggctcggcttcgtttcaaagaagtcgacggcgtgatgacgatgccgccgtgcttcacccggtacggcaagtcgatcgaggattggcggagtttcctttacgcgattgcgacgttcttcctccgcgccaatgccgcggtcgacgtccagcagggcctcatgcgctggatcactccccgtgcaaagctgaaggcgctcctcgggcctgggcagaagaccgaaggggacagacgaatgcgggcgtggcctggcgtgccgaacaacgcagcaaacatgtcgacgccgcagatcctcttgatcaacggcctcggtctggacgtgtcaaacgccgagcatcgtgcagatatcctcgaatgcttcgaccgagcatggcagcagctccagccggtcttcaacgccgaccctacgcatcgctccctggacattcgaaaggcttatatcgcgcccgtttcggacgcgtatctctgccctcttactagacgtgtattggacaccgcaccgtttggcatcagcccaatggtccgggcggcgcggcacggcgatcggcgacaggtcgaaagaatccagcttccacttcatccccgtcccttgatcggcagcacggatctcgaagcggatcgaaaattgacgaaggactggcttgagcagtcggagcggatcacctcgctccgaactcagggcgtttggaacaacatcgccgaccgcgttgcaatgtttgcggactacgcccgttcggcagaacactcggcgcaacaggacagcgcgctgcttcgtcgctacgagaagatgttcaaggatggtgaaatcaacatcctcaactgctcgacgaccatggaaatgggcgtcgacatcggatcggtatcgaccgtcatgatgacgaacgttccgccctcggtggccagctacaaacagcgtgtcggccgtgccggccgccgaggacagcctttttcacttgccttcacgttctgccgcgaccggccgctcgaccgggaggctttcacctctccggttagctatctcaatcgaagcatggcggcgccgagggttgcacttagcagtcgtcccatcgtccagcgtcatgtgaacgcatatcttctcaggcgattcatggtggaacgcggtggcgacccaatccgcatgacgatcggcgccttcatgggcacgcctgcaaagctgggagaaccccgccttctagtcaacgaacgaccggtcgcgatgttcaaggaatggcttgcagcgcccaccactgcgaccgtcgtggctgccgatctcgagaagctagttcgccactccgttctggagggcgagacgctgctcactgaagcctcgagggctatcgtcgacgagctgcaaggcaacttcgaaaacgagtgggacgggctcctggcccttgcccgagacgaaggaatgaatgacgccggcaagagccgaatgggcatggaattgaaacgcctgtgtgacgagttcctgctcagtgcgctcgcagaccgaggcttccttccgggccacggctttccgacgggcgtggtcaccttccttcctcataaacacaaaagcgaccagcctgccgatggcggacgaatgaaacggctctccggcccccagcggtcactcgaccttgcgatccgtgactatgctcccggatcggaaatcgttctcgacgggttggttcacaagtcggctggcatcctgctgaattggaagcgacccgccagcgaagagcatattcgggacgtgcaaagcctaaaattccactggtcctgcgatcgatgcggcaccaccgacacgagccgcacacggatgtcagactgcccgatctgcgcggcgactgtctggaaccgtccctacatccgcccggctggattctcagtcgacgttcgcgacaaggttcacgccgagaccgacatcatctcctatgtcgccccggaggagccgagcgtatcggtccgtgcaagcccgtggatttcgcttcccatccccgacctcggccggtttcgtagcagtcgcgagggcgccgtctactacagcaaccgaggaccagcgaagaacggatatgcactctgcctccactgcggtcgcgcagctccggatcatgctacgatggacaacggcgaagtcgatcagaccgtgacgtcaccgttgtcgcaacatgcccctcttcgctggaagaccggagaggacgcttcacgctgccagggaaatgacaacgcctgggcggtgcggcgcaatctcgagcttggttatgagattgcgaccgacgttttcgaacttcagccttctgttccgctgaagaaggcggcggcgaccgcgctggtcatagcaatgcgcgaagggattgcgaggatactcggcatcgaagcggatgagatgggtttcgccacccggacgtcggaaggtctccttgcgcagcatgcaaggtcgatgctgatattcgaccgggctgccggcggtgccggtttctcagcctcgatcgccacccgctttcccgcggtcctcgccgaggcccggcgggtactcgagtgccgcaatcccggttgcgtcacaggctgcgctgcatgcgttctggtgagcgacgctccatttgaagaaggaagtctcgatcgctcgagcgcccttcgcttcctgacaaaccacctgacattccacaatcctctggccgacgaagaccgtctgtcgtccgacgccgcggtttccatatcagtagtggatgaagtcgagcgaaagcttcgggatgccgtcagaccaacagtttacgtctttctgccggaaacgaccgacgctggccttcttggggagtggtcggcgactgcgtacctggaccggtggcgcttccttggtaacgacgtgatctttgtagtccctgagggcttcgtttcgaagtgcgacacagcgggccgtcttgccctttatgatctcgggcagcggttcgcgaagggcggatccaatccagtccacgcgggcagaagcatggagttcaacggtcttgccgcagggatcatagtcgccacccaatctggaagcaccgtgtgggcaacgcgggatccttcgacctgggaggccggcccgacatggagccagccaatgtcggcgccgatcgtgcatggaaccgtcgttgtcgaactcagaacctccccgctcgagcgctcgtcgctgctgccggcatcgtcttcgcatttcgaaaggatcaccggcgagctcgacagaggcttggctctattcggcggcggcatgtcaacgaagattaaggcgcgcctcgaaagtgtaggcattccgaaatccctgaaaatcgagacggtcgcctatagcgacccgtacatcaagtctcccctcgtcgcgaagatgttcgtcgacaccgtgtccggactcctgaagggaagtacgggagccaccgtcgaactttccaccaatgcccccggtggaaaacttggagtgccgttccgcatctacgacgattggcgcgacagcgcggaggccgaagccgtgatggacgaatacgccaagctaaaaggcgtggacctgaaggtgcgcttcgggcaggttccgcacgggcgatatatgacgattaagttcaaaggcggcgtatcggcgacgatcgtgtttgaccaagggttcggcgcatggcggacgacttcgtcaggaaacttgatatcctttgatttccgggtgtctgcaaaacgtcaggcggaagcccttgcgcggtcaaccgtatcggtcgccaaggcaggattcggtccgacatacatggtcgcctcaaaagataattaa

SEQ ID NO: 29961 - DNA, 3423 bp, Rhizobium phaseoli Ch24-10
atgcaacgcaagggggagaagttgcgtctatccgaatttagcgataccgaacttaaatatgagtttgagcagtgtccgcaggatcttccgcgactggaagcgctcaacaaggagctgaacaggcgcgactccgatgaagcgttcgacctgcagcttgaagtcgtgacggtgctcaacgcacttcggaaacagaccgcctctccatcacgtggcgatgttgccggagcgtggcttaaggccttccttctcagtcgcggtattgccgtcactgatgggcgcccactccaccagtacaggatgacggacccggaataccaggaagcgcgcgctatccttatggactccacccaccgcctagcccgtgacgatggccagatcgcaagtttgtttgtttccttctgcgccgaatggtttcgccgtgaggcaacctcattctttcttaaatgggacgccctcgcgccggaggttttcgcaacgatcccgcacaatcgacgccgggatctcgtggagcttggcctggggttctggaagcgtccgctcatcaggtcggaaaacggcacgggctatctgctgacccttgcgatcgaaggcggcatctctgcccacgtcatttcggaatttggttcgtcgtggctctctgactacctgcggaccatcatgcggttcgctctcgcggacggaaatcgtgcccatgtccggggtttcgcaggcgatatgtcaaacgacatccgcgtttccttccgccaggatggctttatcgatctctgctgcgaactcattctcaagctcatcgaatggaaacgggtcgcagatcaaggaccagcgggaatagacccggtaacatttctcgacgcccagaaccccgattggaaggactctcttcccatctacatgccggccgatcatgacaagatcgcaagacgccttctgagcggcctgcttgtcgagaagcccggcccggtgatccgctcgggtatagccgcggagcgatacctgacattcgaagctgggacgtggaaacctgctgtttcccttgcggctgacggagaagtccctgcgggtaagctgccgggggttccgagttccggacgttggaaggctagtccatcgggcgagctagccaactatctcccaagccatatcgcgctattcgaaccgccgaccgaagaccagaagacctggcgagtacggtcagttacgcctctcggcaagcttctggtcggcgtaagcctcaatcacaccctcaccgtgaacctgacgtgtggtgcggaagtcgttcctctcgtgtggccgggcggcggcgccatcggctcgtcgatctcatcgtttcttccaacggaagtaacggacatgtccgaaccaaagacgcttcgtttcgtcaagacgggttcggtgagcctgcctgccaccactgtttatgttctcgtgcccaaggattggatggcgcttccggccgaaggatcggacgccgggcgaacctgggaggtcgatggcggcaaggtgttgcatggagttacagccaccacgtacttcctcagaccgggcgcggcatcgggagagcgatatcgcatcgagccggggaaagatgcgcggcaggaaacgctgaacatatcgtcgcggggcgccgtatctttccatgccgaagacgaaatcgaaactctggaaggtcctgtcaccttcggcatcctctccgaaggatcagttcgacatccgcaggcaggtgaaatcctcgtacgcgggctcgatgatcaatggaggccgttaatagatcgccggatcaccgcggccggcgtctacgagatttcctggcgagacccgttggcggacattcagctcgagcgacgaaggatagcgatcatcccagcgggagcacgtgtcacaggcgagacgatctccacccacgaggggcggatagtctatgatcgactgcctgggtggcgcgtcgaacttctcggggaattcggtattgtcgaaagacttgaaggagaaatccggtttacgatcgccgggaagccccggtaccgggttgaagcgttgcttcgtcctccgatcggaaaaccgttcaagattaacatctccgtgaaggtgcgcgaggcagcaattatcctgccggacgggagcgtggtcgcatctgggcagacgatcgacgttaccgctctccgcggctcgatcgccgcatcgccgtacgcaaccacccttacgctttcgtcgaaagcagaccgctcaagttcccttcatttccgattcacgggggagttccctctcgcagccctcaaaccggccgtcgaagaactgatggctccgatgaatgatcaggacggattgctggagctcgaattcctcggcgagacacgcatacctataaagcttcgaaagtatcgatatgcgcgaccagagctggtccatggcgcgatcgtgttcggggagaacttccgcgccaaagcagtcgcaaagatgatcctccagccaacgagggaacatctactgcagaagaatacgaacggcacctatacgctgcccgattggtgccacggcccgtgcctcgtctaccttcgcgacggtccggacgtcgtcgcccgtccccttgtagtgaaccttcctttgaacgaaatcccgtcttcgaagctgcaagccgcactcgcacgggtcgacttcatgcgactgatggcagacgttcgcgccgcgctagacgacctcgccgaaggaaagctgcccacgaacgacgtccggttgttgcttgaccttgtggcaagcctcaacggcctgtccgccgttgtgttcgtcgttctaaaagaacttgccatgcgaccgaaggcgttgctcaggcttttgctgagcgcgggcgatgcggatcgtcacgcagtttgggcgttgcagcaggaattgccgttcctctggctcgcgctgccggcaagggactgggaagctgcgatgaacgcggagtccgacgctctgcatcaagcactctccgcaatgcccgacgaaatgcgatttgccacgatcatggcgcacttcaaaaacctccgggagaagttgctggcgatagaacccgcactcgacaccgtcttcgttcggacaggtttccccgccgagacaatgccttctctcgacgcagtcctccagggcttcgttcaggatcagcgcatgtacgacgacgatgctcccgctaaggcacctggaaggaacgccgtccttgaagatttgcgtaagagcgccatcaacctaccggcggaattccagcgcttcagtttcgaggagttcgaatgcatggcggcgcctgcggcgctcgcggccgtcgccgcaggccggcttagtctcacatcgatgaccgaactgatcctgcgaaagacattgagagagcacggtcacttcgtttcgtgtgcgtacccgcatttactgaaattctatgaggtccaggcgtga

SEQ ID NO: 29962 - DNA, 6129 bp, Rhizobium sp. Leaf453
ttgaaacccttcaatactctttccgatattcgtcgaagaacggcagaagcaatcatcgcgcagtccgggatcagaaacatcgcactcgcagatcatatgaggcgaatgtttggctccgactcctcaaccgagggcgcccttttgcaacagccggttatcgagggggcgcatccttatgtaacggccgaaggtacgatggccaatgtggaaacgtccctgctgcatactcgtttcgtttcgatgcttgatgaaattcccgagccaaatgactaccggtttccaaggagccgccgcccgtttgcccaccagttggaaacctggcaacacctcgcgagcggcgtctcgccccagtccgtgctggtcacgtccggaactggttcgggcaagaccgagtgcttcctttttccgatcctgagcgatcttgtccggcagctcgaaatggtaacgacgcctttggaaggcgtgcaggcaattatgctgtatccgttgaacgcgttgatcgagagccagcaagagcgtctttccgcatggacggcgccattttccggtaaaattaggtactgcctctacaacggtaaccttcctcaatcggaaaaaaactcagtgcgtcgcgagacgccagagaagcttcgcgatcgcgagcagctacgcgcaagccctccaccggttctggtaacgaacatcacgatgcttgaatacatgctcgcccgtgcggacgaccagcccatcatcgagaagtccaagggaaagctcaagtggatcgtcctcgacgaagctcactctttggtcggcgccgcggcagccgagatagcactactgctgcgccgcgtcctcattgctttcgattgcaagccagaagaaattcatttcgtggcgacctcggcaacgatcggcagcggtgacgacatccagtcccagctcaagagatttctcgccgacgtcgcagggatcgaacatgcaaacgtccatgttgtcgaaggtcatcgccagcttccgggccgcccagcccaacgcgcccggatcgcgaacgttgactcgctcttcgcctctcctccggaggagaggtacgaggctcttgcgggcgatgatcgcgtatggagcttcatttctgagaaactgtttaaggaaccgctgacgctcgctgaattcgagcgttccgctcagacactgggacttgatgctgagcgatatctaaatctgctttccagcgcggtgaggccgcatccagaatcgaagggcgacgaggaacgattggcgcccgtaagggtgcatagcttcgaaagagcgataccaggcctctggacctgcgtgaacggcggttgtccggcatcacccgctggctggtcgttcggagcggtttatatcgatcgctgcgacttttgcccagcctgcaccgccccagtgcttgagatcgtgagctgctccgagtgcggtgaggtccttctggaagcggaagagctttcaaacgacagtatccgctctacccgccgcgacctcggcaaggacgagttcgagctcgaagccaccagggatgacgacggcacgggcgacgatgtcgacgcggaggcagcggaagaggacagaacgcttgcggagattgtagggacagagattctgattgggtctatggccggccccgagttcaggccattgcacctttccaggaccgactggagcatcgaggcagttgggtcggtaaattcagtttcggtgtactcagctctaaagctcgaatcctgtccctgctgccagacgaacgccacaaaaggcattgacagactgcttcgcccagtccgttttggcgcacctttcatgatagcgaacgcggcgccgatcttgttggaaggcgtcgatcctgagatggcgagggaaacggcaccgtctcagggtaagcgtgtcctgtccttcaccgacagccgccagggcactgcgcgcatgtcggcgaagatccaggcagaatccgaacgaaatttcgttcgctcgttcgtctttcacactgttcagcactcactaggaaccggaagcacggttgacactactgatatcgagaacacgatcgccggtctggaagcagcattggctctttctccgaacgcagtcttgcaaggtctcctcgataaggagagacaggcgctcgccgatgcgaacaagccgtctcccggcggtatcgcctgggacgacatggtcacccgactttcgcagcgcaaagaagttgctgagtgggtcaaggaagtctggcagccgcgcgatccggagctgttccacgacagcaggaagctcgccgaattccttttgctccgcgaattcgcgagacgtcctcgcaccgcgctctccctggaaagcctagggctcgccagacttcggttcgcaggcatcgacagcaagactgtcgtaccgcccgcgtttgtccgctacggaaagggtgtcgaagactggcaggcgttcctttatgcgatcacgacgttcttcctacgtgccaatgctgccatcgcgatcgacgagggcgtcatgcattggatcactccgagggcgaggattcgatcattacgcgctcccggacgaaccacggatggcgaccgccgatacctggcatggccgggggttccgaagaacccatccaatccttccacgcctcagatgctcttgatgaatggcttgggactggatccatcaaggccagaccaccgcgccgatttcgaagacatcttcaatggggcttggaaccaactgcaggcggttctcaacaacaatccagaccatccggcactggatttgcgcaaggcccacatcgcccctctgttggacgggttcttctgcacgctgacgcgcaggatcgtggacattgctcctttcggtgcgagcccgcttgtgagggcgtcgaggcactcggcccgacgcctggcggagccgaggaagctgcccgccctgccatcgattcttctaggcgacgtcgattttgaggaaggccggcgagcgatccgcgactggctcgaaagttccgataaggtgaaggagctgcgcgccgacggtgcctggaacaacatttcggaccgtgtcgctctgttcgccgaatattctcgttcggcagagcactcggcgcagcaggacgcttctgttcttcatcactacgaaagacagtttaaggccggggcgatcaacatactgaattgctcgacgacgatggagatgggcgtcgacatcggatcggtctcgacagtcctcatgacgaacgttccgccgtcggtagccaactacaagcagcgggtgggacgcgcgggccgccgcagacagccattctcgctcgccttcaccttttgccgggaccggccgctcgaccgcgaggcgttcaattcgccggcacgatatcttgcccgcagtctggccgcgccgaaggtggccctgagcagccggccgatcgtgcagcgacacgtgaacgcattcctgctgaggcgcttcatgctcgagcgcggtggcaacgcgatcaagatggagatcggggcgttcatgggtacgccggcagtggtcggtgaaaaccgaccccttgtcgaccagcgaccgatcgcggcttttcgcgagtggctcgcgctgccgtcgacggaaggcgcggtggagaaggatctttcaagcctcgttaggcactcggttctcgaaggccagttcgatctcgtcgaaagctgcctggagatcgcaaccctgctcgagacgggcttcgtgaacgaatggacgggactgcaggctctcgccaaggacgaaggtatcaaggaggcggcgaaggggaggatggcgttggaactgaagcggctgtgccaggagttccttctaagcgcactcgctgaccgcggctttcttcccggtcacggctttccgaccggcgtcgtcacattcgtcccacacaaggcgaagaccagcgagccgcaggatggacggcgaacaacgcggcttgttggtccgcaacggtctctcgacctcgccatacgcgactatgctcccggctccgagatagtactcgacggtctggtgcataaatcggccggcgtgctcctcaactggaaacgacccgcaagcgaagagaacgttcgggaagtccagagcctcaagttccattgggtctgccagacctgtggcacgagcgacacgggccgggagttcgtccctgaatgcccggtctgcgccggagcggtcaagaacgaccagtatctccggccggccgggttttcggtcgacgcgcgagacaaggcccacgcggagacagacatcatctcttacgtgccgcccgaggagccgagcgtttccgtccgcgcgagcgcatggacgtcgctgcccattccagatctcggtcggttcagaagcacaagggaaggatcagtctactacagcaatcgcggtcagtcgaagaacggctacgccctttgcctacattgcggacgcgcggcacccgatcacgaaaaccttgagaacggcgatcccaatcctgatctgcggtcgccgctccagctccatcttccgctgaggtggaagaagggagagagccggatgttctgcgaaggcaacgacagttcttgggcgatcaggcgaaatctggagcttggctacgaaatcacgacggacgttttcgagttgcaaccttccgctcccttgagtagggccgcagcgaccgcgctcgtcttagccttacgcgaagggatcgctcgcgacctcggcatcgaagccgacgagatgggtttcgcgacgcagaactgggaaggcaccctcgcccagcgcgtccggtcgatgctggtattcgaccgcgcggcaggcggcgctggattctcatccgcgatacccgcgcggctaccgacggtgctgcgagaggctcgggcggtcctagactgctccaaccctggatgcatgacaggatgcgcggcatgcgtcctggtgtccgacgctccgttcgaggaaggaaagctcgatcgaatcgctgcgctgaaattccttgacgcgcatctctcgttgaacgacgcccttccggacgacgagcgttttgcagaggacgcccttctctccacgtcccccctggatgaagtcaaccggcttctcatcgactccgcgaagcccgtcgtgcatgtcttccttcccgaaacgacggacgccggacacttatccgaatgggcggcactggctcagttcgcaaagtggcactcgcagggatacgacattcgtttcgtcgtcccggacgccgctctgcgtgcctatgacggcgcaagaaagctggcgctctacgacctcggactgcggtttagtaggaccggcggcgcgttcccgatccattctggaaccgcgacgacggcggccaatggcgcggtcgctggcattgccgtgacctcgggattgagaacgacagcgtgggcgtcgagagatctgtcgtcttggcttccaggagcgaactggggcgagccggcgaggaagccggtcgtaaaggcgaccgtagactggatgccctcggccacgtcgatagacaagaagtccctgctcccatcggcggcatcgaaatacgaccagatcgagaacgagcttgatcgggcgctgacgatcttcggcggcagcatggcttcaaggattcgaggtcttcttgaggacttgggaatcccgaagacgacaacgatcgagtccatcgtctacagcgacccctacgtaaagtctccgttggtggcgaagatgttcgtcgacacagtttcggctctgaccaaaggggcgacccctcgtcgtgttgtcgagctgctgactggagatcagccgggaaacaagccgggaatgcagaactcgctatcgaacgactggcgagacggtgtgatcgccgaagcggtgttgaaggagtacgctaagaagaaggacatcgacttccgcgtcacgttcaaacgcgtcgcccacggccgttatatgcacctgcggttcgacggcggcaaatcggcaacgatcgtatttgatcagggtttcggcgcatggaagacggctggaaacggtgcgtcgtcgtcggcccggttcgacttccgtgactctgccgtaaggcaggcggacgcgatgggcagatcgagcgcgatggttagcaagagcggtcacggcccgacgtatctcgtcgccaacatcgattag

SEQ ID NO: 29963 - DNA, 3240 bp, Rhizobium sp. Leaf453
ttgcccgccgctaaaccgaacgatccgatagtccgctggctttccacctacctgttcaaaagagctcttagagcacctgacggccggcaacttcatagatacaggatgaccgacgccgaataccttgaagcgcagacactgctgcgcatttcgcaggcgaaaatcctgcgcgaagatggctctgcgggtgctctgttcgtcgtattctgtggcgagtggttccgcagagagtccaccacattgttcttgaaatgggacgccctcaacctggacgtcctaatcaacgttcctcacgatgtccggcgacgcctttcggaagtcggcctgaagtattggaagcgccctcttctgaaattcgacggtggtcgagaattcttgctctcgcttgctttggaaggtggaatttcggcaaatgtgatcgcagacggcggatcaagctggctctcggactatcttcgaaacattatgcgtttctcgctgttggacggtacggcggaccacgtcaaagggtttgcccatgacatgtcatggatgatccgcaaatcctacaggcaggaaggattcgttgacctctgcgcggaactcgtactgaccttgctcgactggcgtcgaacggtggagaccgcgccggctggagtcgatcctgtagcctttctcgatgcgcaaagccctgaatggaagtccaccttacctatattcatccccacgaacgacgagcagatcgcgcggcggcttttgagcggtctgctggtcgagaaggccgaagctggaacggccggcagtggggtctgtgccgaacgctatcttgttctcgacggcgaactatggcgacctgcgctgctcctgaaggcgcgcggtgacattcccgccggcaaactccccggcgtttccttaaagggacgatggaaggcaggtccgtctggcaagcttgtcgacttccttccgagccagttggcgctcttcgagcctcccaccgaattcgagaagacatggcggatacgtccgacggcgacgctcgacagaatgcacgtaggattcgagttcaaccagggtgtcaccgtcaatcttacgtgcggatcggaagttcatcccttcgtatggcccggtggttcgcctgtcgtggcgaaaatcatgtcgttcgtcgcagaaggttccgtcgaccagaccgcgccgaaaaagcttcggctagccaagacgggctctgcgagcctacccgcaccgacagtttacgtgttagcgcctgcggactggatcgccattacgcaggaaggaacggctgctcctgagacatggccggcagcaggcaagactgtcgtccacatcgtcaccggcaccacctacttccaaaagcctgatgcagcgatcggcgagcggtacaggatagaggccggcaaggacgaacggcaagaaagtcttgcgctatcggctacagacacctctccgcttcagcctgctgacgagatcgaaatattcgaagggctagtcacgatcgagatcagctcgcagacgggcgtgcgccagatccgtccaaatgaagtcctaatccgtcagccaggcgggtcatggacgccggtcaaggagcgtcgattgtctcgcctcggcgtcttcgacatctcctggcgcgacccgatcgcagacatacaacttgagcgaaggcgtatcgcgatcgtgccagtcggcgcgcggctgcatggcaggatgaccagcgctaccgaagcacagatcatccaggacaactttgacggatggaccatcggcctgggatctggcgacatcgcggctcgaaacgtgcgcgatggggaacaccgcctctcgttcgccgggcgtccccggtatcgtgtcgaggcaattctccgtgctccgcaaggccagccatttaaggtgtccgtgccgataaagagccggttggcctctgtcatttccagcgacggcgagatcgtccagcctggccaggagatcgatgtgaccgtccttagaggggcaattgcagagagttcttcgaaggccacgctcacgctcactccccggaatgaacgatcgagttcccttcaattcagcttcagtggagaaataccgctatctgtcttgaagccggtcgtcgaagaactgatggcgcgtatcagtgatcaggacgccgtcctcgacatggatttcatcggcgatgctagaacgtcgataagattgaagcgatataggtatccttctcctcgctaccacgatggacttgtcgtccttgatcgggtgctgccgtcagatcctgtcgtgcgtatgatcctgcgaccgacggaggagcatgcgttgaaaccccatggagaaggcacgttcgcgcttcccgatttctgcgagggcccgtgtctcgtctacgttcgggacggcccggacgttgtttcgagaccgcttctggtggtccttcctgcgagcggaggggaccgctccgtgctcttgtcggctctgttctcgcccaacaccaggtcacgaactgcagcttttacggaagcgctcgccgagttcgagtccgggtcgctgagagctgaagacgtaaattatctaatcgacctcgcgtgcaatctgaacggccttcctgctgcagccttcgacgttctcaaggtcatggccctccggccccactcgttgcttcgtcttttgttcaaggccaaggacgatgcgcagagacaggcgatatgggggctgcaggaccagttgcccttcctttggcttgcactgccgtcaaaagcctggagggacacgctcgtctccgagagggaggaattcgaaagagctctatcgcttgtgcaactgccgccggaaaggcttttcgagcttctggcagggcactttcagtccctgcgcgccgccctcctatcaatcgaacccgctctcacagcggtcttcgatgccggcctcgcgcaactgcagccgtcactggacatcgtgctgatggaattcgtccgcgaccaacatctttttgacgacgagacggcagagcggaaggttggccgcaatccggtgctggaacttctgttgcagtcatcgatccgcctgccggcggagtttaaaaatcatagcgtggcggatttcgaagggattgcggttccagcattcctcgctgccgctgcgacaggaaagattgcttcaagcagtctttccgacatcgtagtgcgccggacactccgtgagcacggccggtacgtctcctttgcctatccgcatcttttacgtttttacgaggccctttcttga

SEQ ID NO: 29964 - DNA, 5337 bp, Rhizobium sp. NT-26
atgctcgaatacatgctcgttcgtccccaggaccggccgatcatcgatcagtcgaagggcaagttgaagtggatcattctcgacgaggcccacaccctggtcgggtctgcagccgccgaagtggcgcttctcttgcgacgggtgatcgaagcattcgaggttgatccaaaaaccgttcggtttgttgcaacgtctgcaacaatcggcgacggcccgaaggtcaaagaagacctacgccggttcttggcagatgtagccggcacagaagtttcgactgtcgaggtaatttctggcgaccggcttcttccgacccggagcggaaagggcggacaagctcccagtccttccgcgatgatcgaccttcctgcagccgatctcttcgacaagctctcgtctcacgatcctgtctggtcgctggtggcgggattgaaagatcagcccttacagacacagcagctcgaccgccttggaagagcgatgggcgtcgacggcgagactcttgcaatggcgctgacgcgagcgacgtccagatccggcgagacgctggcgccgcttagggttcacagctttcatcgcgcgttctccggtctctggtgctgcacaaacccggcttgccccgatagcctaggcggagaatgggctgccggacgccttctattcgaacgagacgaagcgtgcccgaagtgccacatgccggtcgcggaactttattcctgcaatgaatgcggtgaagcatttatgattgcggacgagaagggtaagcggctcgccccccctcggaacctgcctccgaatgacgagtttttgttcgaagccgatcgttccgcgtcggatgacgacgaggtgaatgccgatgaaaagcttgatttagacacgcccaccatcgcgcactgcttttctctgtcgggccgcggtctcatgccaatcttcgtggacacggcgaccggcatgactgcggatggagacggtgaacgtcgataccgactatccgctcatcctggcggaggtaaaggcccctgcccgggctgcggcgcgacggcgaaatccggagacaaactctatcctttcaggttcggagctccgttcacgatcagcaacgccgcccccatgcttctcgaagcgatgccgccggcggaaggattggtgcagccctccctgcctcagacccctccggatcttcccaccggcggtcgccagctaatcagcttcacggatagccgccaagggacggcacgcatggcggcgaagcttcagatggagagcgagcgagccttcgtgcgctccttcatctatcaggtggttcaacacaaagcttcaggtagtggggacaacgggaaggctgaagagctcaaagccaggattgcgaaggtggcgtcctatccggattgggaggacgggccacttaagaacgtagttcgcgaggccgaggagcaattggcgaagctgtcgggcggcggcagcatcccctggagcgacttacgggctcagcttgctgagcgcactgaagtccgcgactggcttcctgacgtctggggatctcgtgcggacctcttcaagaaagctgcggcctcggcaccttctcagattgctgaagcattgcttcttcgagaaatgatgcgaaggccgaagctggccaactcgccggagacgatgggtcttgcgagatttgtctttccagggatcgagaagcacgcccaggcgccgagcggcttcctgcaacgtggtgggagccttgaggattggaaggcttggcttacgtgtttggtaactttttccatccgaagcaacctagcggtagccgtcaattcggacctgcttcagtggatcatgcgtaaaggcttcccgaaaacgcttgcctcgcctggtatggaaccgggtaggcggcagcttcgctggccggcagccagcgccgcgggaaagcagcctcaagtcgttgaactcctccggctcggcctcggcctgaacgttggttcctcgagcgatcgtgcggaaattaatgactggctccagaaggcgtggaatcagctgcacaccctgtttcctaagaacgccaacggcgagcaggcactggatttcgacaagcttgaggtcggaccgttgaggaacgcgtttcgctgcccggtcactaggcgaattgtggatgtcgcgcccttcggtctctcaccgtatgcgcggacaaaggtggatcgcccgcagccgattaccatgccggtcgccccggcggatgccgacaccgccacccgaaccctgttcctgtcggaagataccgatgttgctgctctgagagacagcggtctctggaccgacatgcatgatcgtatcgcactgtactcgccatacagccggtctgccgagcattcggcgcagctctcttcacgccacctgcggcattacgagtccgaattcaaggcgggccggatcaacctcctcaattgctccaccaccatggaaatgggggtagacatcggctcggtgaatggggtgttgatggcaaacgtgccgccatcgatcgcaaactataagcagcgggtaggtcgcgctggtcgacgcggtcaaccgctgtcgctcgcgttcacttttgcgaaggaccgcccgctagaccgcgaggcgttccgcgatcctgttgcattcttgagcaggtctatagcagcccctcgcgtggcgctagacagccgaccgatcgtgcagcgccatgtcaacgcgttactttttggtcgctttctaaatctgaacagcggcaatcccctaagcatggagacaggtgacttcttcggctttcccgctgcgcctaactcagtgcgcgctgcgaaagatgcccgaccgattgagttgatgctgaggtggctcgcaaaggccacgacggcagaagagaataaggtcgcactgcagcggttggtccgtggatcggtattggctggccgtgatgaccttctggaccaatgtgctgaagctctcaaatcagcggagactgagttcgaaaccgagtggagcgggctgcaaagtcagtttcagggagccgatatcataggcgcttcagccgcgatcgaggctcatctcaagaggctttgcaaggaattcttgctggccgatcttgcagaccgtggcttcttgccaggccatggattcccaaatcatgtcgtggccttcgagcttgatcgaaatgacttgcagggcgaattgaacaacgatgaccgcagagggcgtcgccacgggggcccgaagagaccgctcgacatcgcgatcagggactatgctccaggatcggagactgtcgtcgatgggcaagtctatcgcgtcggcggcgtcacactgaattggcatcgcccttcgagcgatgacggcgtccgcgaagttcaagcactccgttgggccgccaggtgctctcattgcggcgacaactggacgggcgccggttcaaggcctgaagaatgcaggacatgcgcagacccgtcaattgttgctgaaagtttcctcaagccggccgggtttttaagggaccggcacgccccagtgcatgccgaagtcgaaaatgtggatttcattcgcgccgaagcaccacggatctcagccggcgcgtcccgctgggaggccctcagccaacctacgacaggtcggttcagagtgaatcgtcggggaacggtctactatcacacacgaggacaaaataacgaagggtacggtctttgcttgcgatgcggtcgcatggaagcgatgaaacccggcgaaacaatctgcacgggcctcatagaccacaagcctctgcgcgcgcgcgaaaactttctacagccgtgcgagggcaacagcgaaaccttcgctgtccagcattcgttacatctcgggtacgaaatttacaccgacgttttggagctgcagcctgctcgatctccagaaatcggggccgccaatgcgattgcaattgcgatacgcgaggccactgcgcgacacctaggaatcgaaccagaggaaatgggctacagcatcggaccatccaggaacgccatggctacatcgaccctctcgatttttcttcatgaccgagcagccggcggtgccggctatgtcgttcaggctgccaacgagatgcgcgcgattctacgtagcgcgcgacgaatcttagactgcccacgcgactgcgcacacgcctgctcatcttgcgtactggtgtctgacgctccggaaagagaagaagatctagatcgacacaaggcaatctctttccttgacacccatctgtccctaccagacgtcatcgacgtcgctgacgccttcgctgcggaaagcgacgtgtccgaccgacctctcagcgagattgatgattggctcagccatcgagcaggctccgaactccatgtctggactggcgtgaatgacattgtggagctttcggactgggcttttacgccactgttcaaaaggtggaccgacaacggtcggcgcgtcagcctaatccttcctagcgacttcgtatcgtccctggacgcggctcaagtgctattcctgcgcgactactgcacccgcaacgggcttgatgtggctgaaggtgaaccgaagcgattcaacaatggcggataccttttcgcttacgccacagatgggacgaaaggacgtgggtgggcaagtcgagacgagaccgtgctgatggcaggtcctggttggggagcaacgcatgctgcgccaattgctcatgcacccgtcgttctctctcccaaataccgagagatatcgctccaggagctcaagcctaggtcgggagctgccgttgttgtacttggctccggccttgagggccccattgccgattttggcgcttccatggccaggaagataagggatgcgatggttaaatgtggcgtcgcaaccgcggacctggtgatcagagcaaactaccaggatagatacgcgcgatcgccactcgtcctaaaactgctggtcgacacagtagcatcacttaactccactggcgcaccttcgctctcgatcctaacggcgcccgaccgcagcggctattctcgaacacatatagcttccgacattatatccgacgtcgtgctggctgatctggcgcgaaactacgcagctaacaaaggatttgaggcggagctgtcggtcggccaactgccacataagcgcagtctcagccttcacatgcaatctggcaccacaatgatcgtggatctcgaccaagggtttggctggctcgagtacaacggaagagaaagattctttgacgccaacggctcaacgcaacgaaacacagagtggctgcggaagctaatggggcaggtaaaacgccgcaacgcatatgacagccagatggtgttgtggcagaaaacatag

SEQ ID NO: 29965 - DNA, 2736 bp, Rhizobium sp. NT-26
atggaggatgcgctttcacgcggctccttgcccacctacaacgaaatagtggactatgcggaaagtaacgctggctttctccccgaaagctaccgggacgagaccatctatgagcttacggcagagctaatcgggcatctacacgcttgccggaaaaaactgcctcccggcgaaacccagacgaatcctgcagggtggctcgatgtccatgatgccggttggcgagagcgtctcccaattcacctcccggaggatgttgccgcctgcaatcgcctcttcaacaacctccttacggtggcccctcgcgcacgagggggcggcatcgggctcgcaagatatctttatcgtgatctctccggcgcctggaaacaaggatttgtcgcacaagcggatggcgaactcgccttcgatgcgctcgcaaacttcaccgagggccgctttcgtgcctactttgctggacgcgcggggcagctcatgtctcgtgagttcgcgcacgtttaccgctcggaaaccgaaagcaacggaaacttcacagtcacgtcgcaagctattggtcgtcttgacctgattggcccagtgcctttctcggaagccattgccgtaaacctggtccgcgatgggatggcgatcccggcagtctgctggcctggcggttcgcagcgcgtttcaaactgcctcgtcctccggccaaccgatcgcgaggatcgcctagaattgctcgctaccggctcccttcgctcgactctgccttgcctattcgtgctgacgccgaagggctcgactgtgtcgggtcatgaggggggagaagctacgcggatctggaatgatagcacatggcagctctggcgaatcgagggaatggcgctcgtagtcacgccaggcggcgagcgctaccggatcgaatcggcagccaatacatccgacgatagacgtttggaactcaatcagctcttccatccagatctggttttcgaggacacctcgctagtcgcggttgaggctccgttaaaccttcgccagttcagcgcagacggtggtgcgacctcgaacggtgtcattcgcgttttgaagtccggtcaaccgatcgctgcacgagacgaagtgtctggcgtcgtgacggtccaatggcaagacgatgaagggttcatcattgatcgcggtcgtctgctcgtgttgccaagaaatttcgagctgcgcggtcagattgacagcggtggggcacgggtcgagtggcacgaattgccgggttggcggattgacgcccttgctagtgacggcactgtcacgacgaccacggacaggaccgagtacggatggctctgtccttggagtgggacgaggaacgggtaccagcgaatacagcttacagatccgcacggctccaccatcaaagcacgactgcgtctaacggcaaaacaaaccgtgttgcttgacgctgagggaaaggtccgtaccgatcaaccacaaatgtcgctcgccgaacttcgcggctctcttttgcttaccagtcgaccagtactcatcgatcttgatctgcggggtgcgggggccaatcgtgcactgatatcccggaggattgaaggcgaaacaccaatggttcgctttggtgaccttgcgcaaagccttctggggctatcggccgaacgcggcccaagtgtctgcctgcttgatgacagtcaccgaacaatctgcagcattcgccggccacaagagcaaccgtcaatccttcacgatcaaattgagttcgcgcggccgctggccgagggcgagctcacagtggtaagatcactacaatgccccgacgaagaacacgtactcggggaccaagatcaactgatccctcgactgcttgacaaagttcctggaccgcttctcctctacaggaggaagggcgacgcagttacgacgcgcccgaccgtgatttccggggcgcaggatgctgttcctgaagaggctctcgacgcgatcgcgcgcgctgcggtcatacaggatgaagcactccgtcgtcgcgcctatcacgccttactaagtggcgccgcgaacaaccctgccgccggctccacaatttcccgtatcttgcgcacgatccattcattgcgaggccttagtccccgcgcattggacatcactcgggagctcccgcactttccgaacttactgtgccgcttgctccttgccgccaacagcgagcgcgtcgaaagcatagtcgcgctagagcgcgacctcccattcctctggatggcgctgaacgtcaactcctggcgcgacgcagcacttgcagaatgggagcgtgcgaaggaagactttgcgcaattctatgatgcgaaggacgcgcagtcacaggctagtgcattaatgaaggagcggattgactttctcgtcgaacgtacccagtggtttgcaggaatacgtgctgccttgggctttagcagcgaactgagaagcgacttacgtcaacttgctcaagagcacgtccgccttcaagtagatcaatcggatcccattgcgaccgccctgatcaacgaggcggaaaaggctggacttcccgcggatattgcaaccctcaactaccatcactacgcgaccctcgtcgcacccgtcgtgctcgcggctgtcgcgagtggacgcatcgagtggtcgcccgccgttgcagcgggtctgcgcaacgcgctagacatcgatcacaactacatcagtgccgccttccctcattgtttgcagcgattccaatcatga

SEQ ID NO: 29966 - DNA, 6024 bp, Rhizobium sp. Root149
atgacaatccgtcccttcgaaaccctttcgcggctccgtcaacgcatggccgaagccatcgtcgcccagtcgggcgtacgcaacccggcactggccgcgcaacttcgccagtcactgtcacgagcggactctgaaggcgccctcgtcccgcccccaatcctggaggcggcattcccgttcgtgccgtcggacaagatgttgggagagctttctggcaacctcctggcaagcgcgacggtggacgcgttggtgggggatgatacgggacgcggttactcgtttccacgtgagcggcgcccctacttgcatcaactaaccgcatggaagaccctcacatcttccgagacaaaaagtgccctgatcaccgcgggcacaggttcgggaaagacggaatgctttcttgttccgctgctcgattcgctctttcgacgccaagagcgcgcaactggcgtcgaagccattatgctttatccgctgaacgcgctcatcgccagccagcaggagcggctcgacgcctggacgaagccagccggcggcaagatccgttattgcctatacaacggcaaccttcctgaaacgcacaagagcgtggtccaacgcgacaagctgtcgtcgaaccctcagcaggtgccggatcgcaagacgttgcgtgcgtctccgcctcctttgctcgtcaccaacctcacaatgctcgaatacatgctgattcggccccaggaccgacctatcatcgatcagtcgaagggaaagttgaagtggatcattctcgatgaggcccacacactggtcggatccgcggccgccgaagtagcgcttctcctgcggcgggtgatcgaggcattcgaggtcgatccaaaaaacgtccggtttgtcgcaacgtctgcaacgatcggcgacggccctaaggtcaaagaagacctacggcgatttttggcagacgtcgctggcaccgacgtctcgaccatcgaggtgatttcgggcgaccggcttcttccgactcgcagcggaaacggcgggcaagcccccagcccttccgccatgatcgaccttcctgcagccgatcttttcgataagctctcgtcttacgatcctgtctggtcgctcgtggcgggattgaaggaccagcccttacagacgcagcagctcgacagcctgggaagagcgatgggcgtcgacggcgagacgctggcgatggcgctgacgcgcgcgacgtccagatccggcgagacgctggcgccgctcagagtgcacagctttcatcgcgcgttttccggtctctggtgctgcacgaacccggcctgccccgacagcatgggcggagaatggaccgctggacgcctgctattcgaacgagacgaagaatgcccgaagtgccgcatgcctgtcgcggaactttacgcctgcaatgaatgcggtgaagcattcatgattgcggacgaaaagggtacgcggctcgcccctcctcgcaacctgcctccgagcgacgaattcttgttcgaagccgatcgctccacttcggatgacgacgaggagagtgacgacgatcaactgaacctggacacgccgtcggtctcgcattgcttttctctgtcggggcgcggcctcatgccgatcttcgtcgataccgcgacaggcatgaccgcagatggggatggtgagggacggtaccggctgtcggcccatgccggcgggggaaaaggcccctgcccggcctgcagcgcaacagcgaagtctggagacaagctctatcccttcaggtttggagccccgttcacgatcagcaatgccgcgcctatgcttctcgaagcgatgcctggggcagagggactggtacagcctcccctgcctcagaccgctcccgaccttccgaccggtggacgccagctaatcagcttcaccgacagccgtcagggtacggctcgcatggctgcaaagcttcagatggagagcgagcgagcgttcgtgcgctccttcatctatcaagccgttcaacacaaagcttcgggcggcggggacaacgcgaaagctgaagaactgaaagccaggatcgcgaaggtgaagtcctttccggattgggcggatgggccacttgagagcgtcgttcgcgaggccgaggagcaattggcgaagctgtccggcggcggaaccatcccttggacggagttgcgcgctcagctcgccgatcgcaccgaagtccgggactggcttcctgacgtctggggttcgcgtgcggaccttttcaagaaggcagcggcgtccgctccctcgcagatcgctgaggcgttgcttcttcgcgaaatgatgcgcaggccgaagctcgccaactccccagagaccatgggccttgcacgatttgtgtatccggcgatcgaacaacacgcacaggcgccgagcggcttcgtacaacgaggagggagcctcgaagattggaaggcgtggctttcgtgcctggtatcgttctcgatcaggagcaatcttgcggtcaccgtcagttcggacttgcttcaatggatcatgcgcaaaggcttcccgaaaaatcttgccgcgccgggtatggagcctagcaggcgacagcatcgttggccggcagccagcgccgcaggaaagcaaagtcaggtcgttgaactccttcggctcggcctcggcctgaatgtcggttcctcaagcgaccgcgctgaaattaatgactggcttcagaaggcctggaaccaactccacactgtgtttcctaaaaacgccaacggcgagcaggccctggatttcaacaagcttgaagtcggaccgttgagaaacgcgtttcactgcccggtcaccaggcgcatcgtcgacgtcgcgcctttcggtctttctccgtatgcgcggacaaaggtggatcgcgcgcagccgattaccatgccggtcgccccggcggatgcagatgccgccacccggtccgtgttcctgtccgaggacgccgatgttgccgctctgagaaatagcggtctttggaccgatatgcatgatcgcatcgcgctatactcgccatacagccggtcggccgagcattcggcgcagctctctccgggccatctgcggcactacgagtccgaattcaaggctggccggatcaacctcctgaattgctccaccaccatggaaatgggcgtagacattggctcggtgaacggcgtgttgatggcaaacgtgccgccatcgatcgcaaactacaagcaaagggtaggtcgcgctggtcgacgcggtcagccgctgtcgctcgcgttcacttttgcgaaggaccggccgctagaccgcgaggcgttccgcaaccctattgcattccttagcaggtccttagcagctcctcgcgtggctctggacagtcgaccgattgtgcagcgccacgtcaacgcattcctatttggtcgcttcctgaatctgaacagcggcaaccctatgagcatggaggcaggtgacttcttcggtttttccgctgcacctaattccgtgcggataacgaaagacgctcgaccagttgagttgatgctgaggtggctttcgaaggcaaccacggcagtggaaaacaagatagctctgcagcgattggttcgcgggtcggtattggttggccgatccgacctgctggacctatgcgccgaagctctgaagtctgcggaagctgagttcgaagccgaatggagcggattgcagaaccagcttcagggagcggatatcatcggcgcgtcggccgcgatcgaggcccacctgaagaggctttgcaaggaatttctgttatcagatctggcagaccgcggctttctgccgggccatgggttccccaaccacgtcgtcgcgttcgagcttgatcgaaaggacctggacagcgaattctacaatgacgaccgcaggggccaacgccatggcggccccaagagaccgctagacatcgcgatccgcgactatgcgcccggatcggaaacggtcgtcgacggtcaggtctatcgggtcggcggcgtcacgctgaactggcatcgcccgtcgagtgacgagggcgtacgcgaaatccaggcgctacgatgggctgccaggtgctctcattgcggcgacaactggacgggagccggttcccgacctgaagaatgccggacatgcggagacctgtcggtagtcgccgagagctttctcaaacctgccggtttcttgagagaccgacacgttcctattcatgcggaggtcgacaaagtcgattacgttcgccctgaaacaccgcgcatctcagccggttcgtcccaatgggaagccctcagccaacctacggcaggtcgcttgaggatgaaccgccgtggtacggtctactatcatacgagaggacccgacagcgaaggctatgggctatgcttaaagtgcggacggatggaggcgatgagacccggcgaggccatctgcaccggtctaattgatcacaagcctctccgtgccagggaaaacttccttcagccctgcgagggtaatagcgaaacctttgcgatccagacttcgcttcatctcggctatgaaattcacaccgacgtattggagctgcagcccgctgaaacaccaaccatcggagcggccaatgctattgccattgcgatgcgcgaggccaccgcgcgtcatctcggaattgaaccggacgaaatcggctatggcatcgggccgtcgcgaaacgcgatggcaacaccgactctttcgatcttcctccatgaccgtgcagcaggtggcgctggctatgtcgttcaagctgccagcgagatgcgagtaattctacgcagtgctcggcaaattctaaattgtccccgcggatgtgcacatgcatgctcatcatgcgtcctggtgtccgacgcacccgagagagaagaggatcttgatcggcacaaagcgatctcgttcatggacgcgcatctcgcactccccgacatcatcaatgccgaggacgtcttcgctgtcgacagcgacatctctgaccgtccagtgagcgaaatcgacgactggctcgggcaccgagcgcactcggtcctcaatgtgtgggcgagcgtgagcgacattgtgaacctttcagattgggctttgacgcctttgttcaaaaggtggaccgagaatggtcgacgtgtaagattgatccttcccaccgactccgtttcatccctagatgcggcccaggtactgttccttcgggactacaatgcccgcaacggacttgatatagctgagggggagcctgttcgattcggcaacggcggctggctatttgcgtacgtcaccgatggaacgagaggacgcggatgggcgagccgagatccgtccgtgctcgtggcgggtccaggctggggcgcaaaccacgccgcgccaattgcccatgcccccctcaaactatctcccgtctaccgagacatctcgcatgacgatttaaagccaaaggccggagccgcggtggtgacgctggatgccaaacttgacgggccagttgcagggttcggcgcttccatggcggcgcagatgagaaaggcgatggcgaactgtggcatcgagacagaggaccatgtcatcgaagcgaagtatcaggatagatacgcgcgatcgccgatcgttttgaagctgctgatagacacggtcgcctcactgaattctaagggtgcgctatccctttcgatcgttacggctgcagatagaggcggttactctcggacgcatatcgcatccgacatcatatcggatgtcacactgtcgtctctcgcccgggattacggagctcagaaaggattagtggcgtcgctgtcagtagggcaactcgcgcacaagcgcagcctgttccttcagatgcaatccggcgcgacgttgatcgtggatcttgatcaagggtttggttggctcgagtacgtcgggagagacaagttctttgatcccaacggatctaacgagggaaatgtagattggttgaaaaggcttatagggcgggtgcaaaggcggcatgcgcatgatagccagatggtggtgtggcgaaaatcatag

SEQ ID NO: 29967 - DNA, 3240 bp, Rhizobium sp. Root149
gtgactacgagcgacggcaagatattagagaacggccgacaggcaaaaccttcggctgcacggcgactgcttgatgatatcttgaaacgccaggggctggatcgaccgaacggtcagccaatctacagctaccgtatatcgcgagacgagttccaacgcggacgtgaacttctcgaaaagtctgcggcttttcttgatcgccgtaacgcgccgctttgcgcagtcttcgccctcgtcacgtcagaatggtatcgacgcgaagcaaaatctctttggcgagtgtggtctcacatcggggtcgtacccgacacactcaaagtcagtgaccggaatgatatcgcagacgtcgggctcgcatggtggggtcaatcaccaaagataagccgccaatccaacagaaagcggcgtgagttcctcctgacactcgccctgaacggtggactaccttcctcacttattgtcggcgaaaccggcaatcgagttcgccgcttctttctgggcgtgatggaagacgcgctctctagcggcgctgtgctcactgaggacgacctgattgactttgcagaaagcagggcagaaattctcccggatagctatcgggatgaaacaatttatgagctgacggccgaattgattaggcatcttcatgcctgccgtatgaaactgccacgcggagaacagcaggcgaatccgactggctggctcgacatccacgacgccggatggcgcgaacgactccctatccacctccccgaggaagtcgccgcctgcaatcgcctgttcaacaacctactcaccgtcgagcctcgggcgcgggggaacggcatcggtctcaggagatatctttatcgggtatcctccggcgactggaagcaaggatttatcgctctggccgacggccagcttgcgtttgacgcatttgcaaacttcagcgaaggccgctttcgcgcctacttctcaggaagcgcgggccagcttatgtctcgcgaattcgcgcagctctacaggtctgagaccgagaagaacggaagttttacggtcacatctcaatccactgcacgagtcggcttggtcggtcccgtgccgttctcggaagccgtcgcagtaagcctgctacgtgacggaaaagcggtaccggcagtgtgctggcccggcgggtcaccgcgggtttcaaactgcatcatcctccgtccaaccgatcgagaggatcggctggagctgcttgccaccggctccgttcgctccacgctgccctgtctgttcgcgctgacatcgaaggattcgacggtctcgggccatgagggtggggcggtcaattgcacctggaacgacgacgcatccgcgctttggcaaatcgaaggaatggcgttagtcgagacaacatccggcgagcgatatcgcgtccaatcggcagccgacacatccgacgatcgacgcctggaattcgaacagctcttcctaccagacttgattttcgaagacacgtccctcgtcgcggtcgaggctccgctaaggcccaggcaattcggcagggacgttattgcggaggagaacggcaccgttcgtatcttgaaatcgggtcgaccgaccgatgcgcgtgacgaagtcactggcgtcgtatcggtgcaatggcaggacgatgaaggattcatcgtcgatcgtgcccgtctactggtgctaccccggaatttcagcctccgcggccaaattgacaatggcggcgctcgggtcgagtggcggaacttgccgggctggcgagtcgacgcgctcgacgccgacggcgccgtcacggcaacgacggacaggaccgcgcacggctggttgtgcccctgggctggaacaaggaacggctaccaacgaatccagctcacggatctgaacggggtgtcggtcaaggcgcgactgcatctgacggcgcaacagatcgtgctggtggacgccaatgggacggttcgtagcgatcaacccgagatgtcgctcgccgagcttcgcggctcgcttctgctcgccaaccgaccagtgctcgtcgatctcgatttacgacgcgcaggagccaaccgcgctctcatatctcgcaagatcgaaggcgagacgccaatggttcgctttgtcgatcttgcgcaaagcctgttggggctgtccaaccaacgcgggccaagcgtcttcctgcttgatgacactcaacgaacaatctgcagcatccgtcgcccacaagagcaaccaaccatcgtcaacgatcgaattgagttcgctagtgcgcccgcggatggtgagattaccgtcgtgcgatcactaaggcgccccgatgaggaacacgtgctcggcgatgatcatcaactgagcctgccattgcctgtgggaattcctgggccgctcctcgtctatcggaggaagggcgacgctgtgacgacgcgacccacggtcacgaacggcgcacaggacgctgtgtctgaggagccagccgatgcgatagcacaggctgcactgatcgaagatgaggcaactcgccgccgcacttatcacgcgttgctcaaggaggccacggccgaccctaccgctggcgcgacgatttcccgtatcgtgcgcacgatccattcgttacgaggcctcagtcctcgtgcaatggacatcacgcgcgagctcccacagttcccgagcttgttgtgccggttgctgcttgcggccaacagcgagcgcgtcgagagcataatcgcactggaacgcgacctgccgtttctttggatggctcagccggtcggcgcttggcaagacgccgcacttgcggaatgggagcgtgcgaaaggcgactttgcgcaattctacgactcgcccgaggcgcaggcgcaggctactgctttgatgatggaacgggtcggtttcctcgtcgaacgtacccaatggtttgcggggatccgcgccgcactgggcttcggcggcgaactgagcggcagcttgcgccaactagcccaagatcacgtccgcctccacgtggatcaatcggaacctatcgcgacaacgctgataatggaggcggaacgcgcggggcttcccgcagatatcgcgagcctgaactacggacactacgcgacgctcgtcgcacccgtagtgcttgcggccgtcgcaagacggcgccttgaatggtcgccatcgctagccgcgggcctacgtaacgcactggacatcgaccagaactacatcacctcagcctttccccattgtttgaagcacttccagtcatga

SEQ ID NO: 29968 - DNA, 6102 bp, Rhizobium sp. UR51a
gtgaagcccttcaacactctctctgacatccgcgccagatccgcagaagctatcctctctcagtccagcgtacgaaacaccgcgttgctcggccacctgcggtcgatgttcaattcgccgtccacggcagagggaggtctgctccagcagcccatcgtcgaaggcgcccatccgttcgttccggcggacgtcgacatgggcggagtggatccatcggtccttcatcccgatttcgttgctgcaatagacgccctcccgaatggcagcgactaccgcttcccgaagaagcgccagccgttcaagcaccagttggaggcatggagacatctctcaagcacggggaacccccaatctgtcctcgtcacttctggcaccggctcgggaaagacggaatgctttctcttccccatcctcagcgacctcgtctcgcaagcgaagggtcggtcggcgccgctcgagggcgtgcaggcgatcatgctctatccgctcaacgcccttatcgagagccagcgggagcgcctatctgcgtggacgcggcctttcgacggcaaggtccgatactgcctgtacaacggcgacctgccgaactcgcagcctgcaagtctacaccgagccacccccgagcagcaggtcgaccgtgagcagcttcgggaaagtccgccacccgtactcgttacaaacatcacgatgctcgaatacatgctggcacgttccgaggaccagcctataatcgagaagtccaagggaaaactgaagtggatcgttctggacgaggcacattcgcttgtcggagcagcggccgcagagatcgcgctccttcttcggcgcgtcctgcttgccttcgattgcaagccggaggatgtccatttcgtagccacctccgcgaccatcggtagcggcgacgacgttcagaaccagttgaagcgtttcctcgcggacgtcgcagggatcaaggatgccaacgttcacgtagtcgaaggaaaaaggcagctccctgtccgtcctagtgcgcgaggaaagctgccgcctgcagataccttgaggaacttgccaccgtcgtcgctattcgatgcgatgtccgccgacgaggcggtttggaatttcatcgaaaagcaacttttcgtggcccctcaaaacctttcggagttcgaacgcgttgcccgttcagccggcctcgatgctgacgaattccttgccttgctttctaccgcggctcggcctcaccccaggacaggcgaagaggagcgactagcgccgatgcgcatacacagcttcgagcgagcggtgcccggcgtatggagttgcattaacccggcctgcaaggattcccccgacggatggctgttcggcaagattttcctggaccgatgcgatacgtgtcagacctgcaaagctccggtcctcgaggtcataagctgtgtcgactgcggcgacgtcgtcctggaagcagaggaagatgctgccaacgaccggatcctgccgacgcgccgcgtggcggagagggacgagttcgaattcgaagctggtcgcgagcaggacgaggccgacgccgacgaaaacgcggagtctgacgaagcgacagaggtggcacttcgacggcggattctaatcggtccttctacggccggacggtttcgacctttgcatctgtcgaccaccacatggacgatcgaagcaacagcgacgaccgaaacggtcaccgtcggttctgacctcaaaggcgatgcctgcccttgctgcagcactccatctaggaacggtatcgacaagctacttcgccccatgcgcttcggggcgcccttcatgatcgccaatgccgcgccgatccttctcgagggtgtcgacgcctccggcaacgctgcagcagttccatccgaaggccgccgcctgctgtcttttacagacagccgacagggcacggcgcggatgtctgctaaagttcaggctgaagccgaacgaaacttcctgcgttctttcgtctaccactctgtccaggattccatgagatcgggcaccgccgtagacaaggtcgggctcgaaacgcagatcatggctcttgagaccgcggtcgccgcgacgcctatcccagcgctccaatccatgctggacgacgcgcgcaaaaagcttgccgacgcgagcggacccaacatggaaggcatccgttggggggagatggtcgaacgcctgagccggacgagagaagtcagcaactggctgaaggacgtctgggagccgcgcgacgacgacgctcttttccatgataacgcccggctcgcagacttcctgctgatgcgagaattcgcgaggcgtccaagaaccgctctttcagttgagactttgggactggcccgccttcgttttaaagagatcgacgacctggcgacaatgccgtccgcgttctcgcggtatgggaaatctatagaggactggcgggccttcctatacgccatgaccaccttcttcctccgcgccaacgcggtcgtcgatgtacagcagggcgtcatgcgttggataacgccccgcgcaaaacttcgatctctgctagcgcctggggtgtctgccgatggcgataggcgacgtcagacatggcctgggatacctggcaaggcgatatcgacgccgcagtttcttctcgtgaccggtctcggtctggacgtctcgaatcccgaacatcgagcggacatcctcgaatgcttcgaccgcgcgtggcagcagctccaaccgctattcagcagcgacccgacacatcgcgctctcgatcttcgcaaggcatatatcgctccggtagttcaagcttatctctgccctctaacacggcgggttctcgacgccgcccccttcgggatcactcctctcggaaggaccgcgcgacatggcgcccgtcggcaggtcgaagccatcgaactcccgtgtcatccgcacccgttgatcggaagccccgatctgaccagggatcgcgcgtccacaaaggaatggctcgaagaatccgacgtcatcgcatcgcttcggaacagaggcgcgtggaacaacatcaccgaccgcgtctcgatgttcgcggactacgcccgctcggcggaacactccgcccagcaggacagctcactgctacgtcgctatgagcagatgttcaaggacggccagatcaacatcctgaactgctcgacgaccatggaaatgggcgtggacatcggctcagtatcgacggtgatgatgacgaacgtaccgccgtcggtggccagctacaagcagcgtgttggtcgggccggccgtcgtggccagccgtactcgctcgccttcacgttttgccgagatcgtccactggatcgcgaagcgttcacgtcgccgatcagttacctcaacaggagcatggcggcgccgaaggttgccctgagcagccgccccatcgtccaacggcatgtaaacgcctatcttctacgccgcttcatggtggaacgcgggggcgatgcacttcgaatgacgatcggttcctttatgggaacgccggcgaggcttggtgatccacgaccgcttatgggcgagcggccggtctcgatgttcaaggactggctggctgctccgacaacggcgaccgcagtttcgggcgatctcgagaagctcgtgcgacactccgtgctcgagggcgagacgctccttacagatgcctctcgaacgatcgtcgacgagctacagggcaatttcgaaaacgaatgggacggcctgctcgcgctcgcaagggacgaaggtgtcaaagaagccgggaagagccggatgggaatggaattgaaacggctctgcgacgagtttcttcttagcgcgcttgcagatcgcgggttcctccccggccacggcttcccgaccggtgtggttacgttcctgcctcacaagccgcggaatgaagacccggtagacggagggcggatgaagagactgacggggccgcaaagatcgttggatctagcaatcagagactatgcgccggggtcggagatcgtgctcgacggtctcgttcacaagtcggcaggcgtcctcctgaattggaagcgccctgccagcgaggaacacatccgtgatgtccagagtctcaagtatcactggtcttgcgaccgttgcggcactagcgatacagcccgcagccgtatggcggaatgccctgtctgtgcggcgacggtctggaaccgctcctacattcggcccgccgggttctcggtcgacgtccgcgacaaggttcacgcagaaacggatatcatttcgtacgtcgctccagaggaaccgagtgtttccgtacgagcgagcccatggatttcccttccggttccggagatgggacgtttccgcagcagccgtgaaggcgcggtctactatagcaacagggggcagacgaagaacggctatgcgctatgcttgcattgcggccgcgcggccccggatcatcaggctctcgataacggcgacgccgaccccacgctaggatcgccgctggcgcagcatccacccctccgttggaaacggggcgaggatgcatcccgatgccagggaaatgacaatgcctgggcggtgcggcgaaacttggaactcggctacgagatctccaccgacgtattcgagcttcaaccgtccgcatcgctaaagaagccggcggcgaccgccctcgtgatcgcaatgcgcgagggtgtcgcgcggctcctgggtatcgaggcggacgaaatgggctacgccacccagacttctgaggggcttctcgctcaacatgcacggtcggtattgatcttcgaccgggctgcgggcggcgcaggtttttcagcgtccatcgccagccgtctccctgcagttctcggtgaagcccgcaaggtgcttgagtgccggaatcctggttgcgttacgggatgcgcggcatgcgtgctggtctcggatgcacccttcgaagacgggggcttggaccgctcggcagcacttcgcttcctgatgaaccaccttgcctttcaagatgcgttggaagaagaggaccgcctatcgccggacgccgcaatttcgatatcggtggcggacgaggtcgagcggaaccttcgcgagacggcaaagccgaccgtgtacgtatttctccccgaaactaccgaccccggacggctatcggaatggtccgcaacggcgtatctcgaccgttggcggtttctcggcaaccgggtggcgatagtcataccagacggcttcgcttcccgttgcgatacagcaggacgcctcgcgctttacgatctcgggcaacggttcgcgcacgcgggtggcagccccctacgcatcggcgcagcaccggagatcaatggtctgaccgtgggtatcgcggttacgtcccagtctggagtgaaggtatgggcgacacgagattcctcatcctgggaggcaaatccagaatggggccaacctatgtcggcaccgataatcatgggttcgacgaatgccgaaattcagactaccgtcgttgagcttggaagccttctcccagccgcctcgtcccacttcgagcggatcagcacggaacttgaccgtagcctctccctcttcggtggaggcatggcaaaccggctgcgggctcgtctggagagcgtcggaataccaaagtcgcaagtcattcgaggtatttcctacagcgatccatacatcaggtcgcccctcgttgcgaagatgttcatcgataccgtggcaggcctgctgaagggagcggcgggggtcgctgtcgagctttcgactggcgcacccggagggaagctcaacatgccttcgcgcattttcgatgactggagagaaagcgtcgacgccgaagcggtcatgagcgagtacgccaaactgaaggggatcgatctgacgattcagttcgctcaagtgccacacggccgatacatgagcatcgccttcgagggtggagcatccgccaccatcgtattcgaccagggcttcggcgcttggcgaacgacatcgtccgggcatctcgtggcacacgatttcaggacatcgccacggcgtcaggcggaagccctttcgcggtcgagcgtctctgtcgccaagtccggatacggcccgacttacatcgtcgcgtcaaaagacagctaa

SEQ ID NO: 29969 - DNA, 3402 bp, Rhizobium sp. UR51a
atgttgcgtctgaggggatttaccgacgcggagctgaggagcgagttcgcgcggcacagagacgatctagtccagctcgatgccttgaaccgcgaactcaatagccgcgacacagacgaggcgttcgacctccagatagaggtggtgcaagtccttaccaacctccgaaaagccgcacagactaatacgagaggagatgctgttgctgcctggctgaaggcttttctattaagccgccgcatgtccgcagccgacgggcgtcctctccatcaatatcgaatgtcggatgccgaatacgatagcgcacgcttacttctcaaggcgtcgagattcagacttgatcgggacgacggtccggcggcaagtctgtttgtggcgttctgcgcggagtggtttcgtcgcgaagcgacatcattcttcctccgctgggatgcccttgccccggacgtattcagcaccattccccatagccgccgtcggaacctcgtagaggttgggctcaactattggaagcgctcgctgatcaaatcggagaccgcgacagagttcttgcttacgattgcgatcgaaggcggcatctcggctcacgtgatctcggaatatggttcatcgtggctggcagaatatctccgaaaactgatgaggttcgctctagcggacggcaaccgtgaccacgtacggggcttcgccggcgacatgtcaaacgagattcggatctcgtttcggcaagacggattcatcgatctttgttgtgaactcatcctgaagctcgtcgaatggaagcgcgtcgcggatcaggggccgccgggcgtcgatccgctttcgtttctcgacgcccggcacccagactggaaagattcactcccgatctacatgccggccgacgacgaccggatcgcgaggcgcctgctgagcggactgcttgtcgaaaaggcaggcccggtgggcgggtcgggaatcaccgtggaccgatacctaaagtttgaggccggcatctggcggccggctattgcccttaccgcagacggcgaggtctcgccaggcaagctgccgggcgtctccggtgccaggcggtggaaggcagtcccttccggacaacttgccaactatcttcccagccagatcgcgctcttcgagcctccgacggaagatcagcagaaatggcgcgtcaggtcgctaacgccgctcgacaggcttcttgttggaatgcccctggcgcataccgtgacggtcaatctgacgagcggctcggaggtttccccgatcgcctggccgggtggtgccggggtcacctcaccagtcttgtcgttcttaccgatagaagtcgcggagggcgatgcgccgaagacgctgcgcctgatcaagacgggctccacgagcttgcctgcgagcaagatttacgtactcgtccccagggagtggcgagccgttcctgcggagggaacagaacccggtccgatttggaatgctgaagatggtgggattctgcacgaggtcaccggcactatttactttatgaagccgggcgccgctgcggaagagcgctaccggatcgaggccaacatggacgcccgccaggagtccctgatcctgtcgtccgccggcgaggtatcgatacactcggaagacgggatcgaaaccttggcaggtccagtcacgctcggcatcctgtccgaaggtgccacgcgagccccggcgccggaagaacttctgatccgctcggtggacgatcgatggagaccgatcacggatcgaaagataacttcgcctggggcttatgaaatttcctggcgggatccaaaagcggacatccaacttgagcgccgaaggatagcgatcgttccatcgggaggtcgtatagtcggggagatgatcggcgcgcaggaagggcgaattgttcacgagaggcttcccggatggcgggttgacgtcacgggtgagatgaccgctctgaagaaaacggagggagaactgcaatttacgatgtcgggaaaacccagatatcgcattgaggcgcttcttcatcctcccatgggtcgcccgttcaggatcagcgtccctatgaaggttcgcgaagccgccatcatccttgcagacggctctgtggtaagcggcgggcagacaattgacgtaacagcgctccgaggggccgtcgctgcgtctccgcacgccacgaccctgacactttcttctcgaaccgaccgttcgaactccatgcaatttcgatttgctggggagtttcctctggccgccttgaaaccggccgtccaggagatgatggcgccgatgaacgatcaggatgccatgctcgagctcgagttcctcggcgagacaaggattccgatacggctccggaagtaccgatacgctcgcccgatcatggtcggaggggccgtcgtgttcagcgagaatttcagcgcccttcccgtcgcgaagatgattcttcaaccggccaaagagcacctacttcagcgaaaacccgatgggagctttgagattccagattggtgccatggcccttgcctagtctatctgcgtgatgggccagatatcgtggcccggccgctcgtagtgaaccgcccaacgcgcgacaatctcacgacgccgctacaggcagctctagcccagaccgaatatattcgattgaaggtggaggtaggcgtagccttggacgacctgtcggagggaaatcttccatcaagcgacgttcgtctgctcgttgatatggccgtcaacttgaacggcatgcccgctactggctttgtcgccttgcaggaacttgcttcgcgaccgaaggctctcctgcgacttcttcttagcgcaccagcgcaggatcgccaggccttatgggccctacagcaggagcttccatttttgtggcttgctctcccgtcaacagcctggtcgcaggtgctaatgtcagagtctgacgctctccacgcggccctctccgaagtgccggacgacgtgcgcttgccaatgatcatgacgcacctcacgggattaagggaaaagctggtcgaaatcgagcccgctctcgactcggttttcgttcgcgccgggttccctccgctggaaaagcagtcgcttgatgtcgtgcttcaggggtttgttcagagccagaggatgcatgatgacgaaacacagacgcccgtaaggcgaaatcccgtcctagaagatctcaagaagtcggctatcagccttcctgaggacttccatcgtttcagcttcgaggagttcgagtgcatggccgcacctgcagcgctagcggccatcgcggcaggaaggttgaacctgtcagcgacgacagaactcatcgtgcgaaaaacgctgagagaacatgcgcactttgtgtcgtgcgcctacccgcatctattgaaattctatgaggttcaggcgtga

SEQ ID NO: 29970 - DNA, 6039 bp, Rhodobacter capsulatus
atgaccctgaccaactccaatctcgatcacgccctgtcgcgcatggcccgtcgctctgcctccgccgtcgtcgccagggcccgcacgtcgaatacggcgctgaattcggtgctgttgcgtcgcctcgctgcggcacccgggcaccccgaggcacttctcgcggcgccggtatttgaggcggcaaaggcttggaaaccgggcgacaagaccctgggcgatctttcgggcaccttgctcgagccgcagttggtcgaggctttgagtgcaggacagaaatatcgcctgccgaaggaacgtccgccctatttccatcagttggaagcctggcgcgcggcactcgaggcgcaaaaatccgttctggtgacttcggggactggttcgggcaagaccgaatgcttcctgatccccttgctcaatgacattctcaagcgcgttcgggtgggggccggggtgcaggcgatcctgctctatccgctcaacgcgctgatcgagagccagcgtgagcggctctcggactgggccgaaggtctggacgggcgggtgaaattcgccctttacaatggcgacacgcccgagacggccttcaaggcaggacacccctcgacgcgcgtcgaactgaaaaaccgcaaggatatccgggacaatccgcccgacattctggtgaccaacatcacgatgctggaatacctgctgttgcgcgcgcaggatcgggcaatcctcgaggcctcgcagggggccttgcgctggatcgtcctggacgaggctcattcctatgtcggctcgcaggccgccgagatggcgctgctgttgcgccgggtccgggcggctttcggtgtcgcgccagaggatgtgcggttgatggccacctcggcgacgatcgggggagaggagaacgcgcttgaaaagctgaccgatttcaccgcggctctggccggggttggccgcgaccgggtcgccgtgatcgagggggtcgaagaagacccgcaactgccgatgccgggtccggatgggccgcttgaccccgctgcccttgccgcgatgacgccgtcagagctttggtccgcactttcaccgcatccacggattcaggcgctgcatcgggagttgaaagccgacccgtgcagcttgacacagatagcgggggtgctctttgccgatcagggtcgcactgaagcggcacagcaggtgcttgatgccgtggcgcgggccgagggcaacggtcgcgcgctcttggcgtggcgagcgcatctgttccatcgcgcgcaaggcggggtttatgcctgtgtcgatccggcctgcccgcatcgcgatgcagagctgatcgcccccgaaagcggctggagcttcggcgcggtttacactgctccgcggccgctgtgtcgctgcggagcgcctgttttcgaggtggtagcttgtggcggctgcggcgcggtgcatctgcaggcgcggctcatctctggcgctcaagcccgcctcgaaacccccgatccggtcgagggagatgacttcgcgcttgacgccgaacccgaagaagatgtggccgagggcgcggcatcgatggtgcttctggccggtccgcagggcaaggggcggcgcgtccatctggaaaagacgaccgggctcatcttcgacaacgcgccgcctgaaggcacgacgtcatggccggtggcgctggtcgaagagcccgcaacacgcgcatgttgcgatcaggccgacgaagcgcgtctgcaagaaatgcgcttcgggccagcgttcttcatgggtaatgccttgccgcaggcacttgaggacctggccgcgcccgaggatcgtccgggtctgccttcgggcggtcggcgcgcgatcagcttttccgacagccgtcagggtgtggcacggttggcggcgaagctgcaacaggaggccgagcgcagcctgacgcgcgccttcctttatcatgcggtgcaggagggtggggccgcggccgatccgcaccagctggccgaactcgatgcgaagatcgccaagctgaaagctgtcgatgccgagatgttcgcacgcgagatcgccgatgccgaaggcaagcgcgccgagatgacgggcgatgccggggcggtggtgcgttgggccgatctggttgcccgctttgccgcgcatcccgagctgcgcaatttcgctggagaggtctggcgtcggcgcaagcttggcgggcggatgggcgacaaccctgcggatctggcgcagatgttcttgttgcgcgaactcttccgccgtccgaaggtccaaaacaaccccgaaacgatgggccttgtgcaactcgtgtttcccgagctcgatgccgcggcgctgaatgatccggtgccgggggcactggcgcgcgccggtgtcgatgctgcgggctggctcgggcttgcccgcgccgcgatcgacttcgtgtttcgggatgcactggcttcgcgtattcccgactggatggtgccaatcgtctcgccgcgctttggcaagctcaacatgatcgccgcgcccgagttgcgcttcgaggaccgcccgaacaacacccgtagctggcccggcccggtctggaaaagccgtccgatgcggctgcaatccatggtctatgacctgatcgctggtgaccccgccaatccgcaacatcaggacctcgcgggagaggtgcttgaaaaactgtggaacttgctcaagcgcacggttctggtcagtgccgcgcccggggcctaccagcttgattttgcgaaagccgccgtcacgcgcctcgacgcggcctggctttgcccggtgacgcggcgccccttcggctattcggtggccgggcgaagcccgttcgactgcaagcgcaagatggacaaggtgatctttccgcgtctgcctgtggcccgggcggtcggggtgacgaccgacgagcggcgagccctgtcgcattggtgcgagaccgacccggaggtggctgaattgcgtcgccgcgggctttggagcgatatgaccgatcgcgttgccgcctatccggcgtttctgcgcgcgcaggagcattcggcgcagataaaacgaattgagctgaaagactacgaagaccggttcaatgccggtgaaatcaacctgctgaattgttcgacgacgatggagatgggtgtcgatctggctgcggtgccgctggtggtcaatgccaacgtgccgcccgcgctctcgaactatcgccagcgcgtcgggcgcgccgggcggcggcgcgaaccctgggcctttggattgaccttttgtcgcgatctgccgctcgatcgccaggccttcctgaacccggccgccttcctgacccgcaagatcgcagcgccgaaggtctggtttgacagcgcgccgctcgtgcagcggcatgtcaatgccgcgctgatcgggcggtggctggccgaagatggcgggatgaagatcaaggccaacaccgggtcgttccttggtttgccgggctccatcgagaacgcgacgcccaccgaggcgcccgtcgatcagttcttgcgcgctcttgccggagagtggggcaggggagcggcgcttgcagcgtctctgcgcgatctggtgcgaggaaccgcgctcgaggcggtgacgcccgccacgctggtggcacagacctccgccgcgatggagcgcctgacggtgagttggcgacaggaatatgccgcccttctcgatcgcagccttggtgccgatgaagacaccgccaaagccttcgaattccgtgctcggcgcatggccggtgaattcctgctgggcgatcttgcgcggcgtggcttcactccggcctatggctttgccaccgatgtcgtcagtttcgatccgctggtttctggtcgctccgatgtcgataccgagatcagtttcaatgcccgcggcggtgcctcgcgcgaattgcatcaggcgatccgcgaatatgccccggggtcagaggtggtgatcgatggtctcgtctatcaaagcgagggggtgagacccgcgtgggggggcgagcaggatagctcgaaactcgaagattttcaggagatgtgggactgcggcaactgccatgctttcggcgtttcggcgctggggcggcccgacacctgccccgactgcggctcgattgtgagcgacctgcgcaggatcctgcgcccggcagggtttctgacggccaagccgccgcataccggctatgaatccctcgccttcagcccctttgtcgcgccgcgcgtttcggcgcagggcggcgactgggtcgccttgcccgatccggcggcggggcgctatcggtatgatcccgcaggcttggtggtgacgcgcgcgagcggtcggttggggggcggtttcgcgatctgccttgaatgtggtcgcgcagcgccgatggaggaaggtgttcaaggcgtcgcggcccctgtgcccgaaagcatggtccggcattacccgctggcgcgcgggcgggcgaccaaattgacgtcggatggtcattgtccgggcggctacaccctgccgaaccggctgcaaaagcatgtgcatctggcgcagaccagccatacggatgtgttcgaattgcaacttccgccccccgcgaccgaggcgcaggcactggcgctcgcggctgcgttgcgcgaggtgctttgcgcgcggctgggggtcgagatccccgagatcggtctgaccagcgggccctcggtcggagccgatgcgacgcgacaggtctcggcctggctcattgatcgcgcggccggtggtgctggtctcgtggcgcgtctgcaggaggtggatctgttctcatcggtgctggcggaggcggcgcaacgtctggcttgccccgaggagtgtgcgcatggctgcccctcgtgcatcttgcaacccgatctgagcctgcgcgacatccggctggaccgacgcggcgcgcgcaggcttgctgaggcgctcgtcttgcggctgcagatacccgaggcgttgcgggtgttcggcccgcagacccgatcgcttggcggtgcgctggttcccgcgatcgatcgacttcgtcgtggcggcactctggcaaaagtcgttctctgcctgcatgggatgcccgacacatgggattttcagggctggccgatgcgggcatcgctggcaatgctggcctcggcgggaattgctgtcgagttgcggctgccgagcggcgcattgacccatgcggggttcgatctttcgatcaagctggcgctgcaccggatcgcgcaacatgcgcggatatcagccgtcgagaacgcaccgcatgttggggggctgccggtcgtttcgatgctggccgatgctgccggcgggtggcgtggcgtcgcggttcatgccgccgaagaggcgcagacgaatgagtgctgggcgatgggcgggcagggaacagtcctgatcgggccaatggagccgccggcgctgctttcctcgctctcgattgaaaaactcttcgaattcggcaccggcaatggtcgggtgctcacccccgagggcgatcttgacggcccggtcgcaggtttcgggcgccggttttggggctggatcggcaagaccgctctgctggaagtcggcgcgatgaaggcagttggtgtgaccgaggtcagctattccgaccgctatctgttgaccccgatcacgctttgccttctggccgagacgatcaaggcgacgcccggtctggggggcgctgcggttcatatcgatcttgcaccgaacggtgagcgtcgcggtttgagagatccctcaaaaatcttcgaaggttacgacgatgatcgggctcggcagcagaccttggctgcgctattgcccaaggcgaagttgcggatggcggcgcagaagaacgatctgccgcatcgccgggaactggctttcacccttagcgacgggcgacgctatcggctgctgtttgatcaaggcttcggcggtatgcgcgccgagggccgtgacctgcgccacgatttccgcgcgccgccggaactgcaggcggcaaagttgcaccaaatcgatctcaacgttcatgctggcgatgagccggtgattctcgagacacgaccatag

SEQ ID NO: 29971 - DNA, 3102 bp, Rhodobacter capsulatus
ttggtcatcggggcgaacatgacatatgacgagcgtttctttgcgtcacgcggactggagggagccgatggccgcccgctgcacggttggcgggtctccgacgtagaaaaggccgaactgaggcgaaatctctttgttcgggtctcttccgggcaggttctcgaaagcacggcaaaatggtttgtgctttgggctgccgagcatatcaaccggacctatgcccgcggtgtgctttcctgggagctcgttttcggggggcttggggtatcggttgacattaagctggcacacgctctcacggggctggggctgaaagcctgggggcggccgttgcgtcgtcgcgcgtcggacaatgcggcgctttacctgcaatcgctcttggcagagggggggcttcccgacgcactcctgagccgcgaaagcggctatcaaaaggcggttctggcggcggtggaggaattggagcgccacggcaatgccgatcctgaaacggctcggctcatcgccgatcgcaccctgaaccggctgccggaggtcttcggtcacgctgactcgagcttgcttctggctgaacttgcattggcgatcgtcgaactgcgccgcgccctgccgcccgaaatcgacgaggctgcgatcgagacttggcttgatcgcgccgtgcccggctgggcggatcgcttcccgatccgattgtcggaggccgcgcgggcggcgatcttgcgtccggcattgcggcgcgaaagcacgcgttccgaaagcaacgggccgccgctgttgcgggcgctgcggccccgcgccgatggggcgggctggctcgggatcatcaaggccaccggaggggtcctgcccgatgcgctgatacccgctgcggctcgggggcagatcctgcgcctgacctcggaacaggggttgatcctgcgcgcgcatcccgaagctggcggctggcgactggatccggtcggtcgcaacttcacagttatgccacttgtcgaaccggcaatctttaccgccaaccttgacggaagggcgctgtgcgatgtcgtgctggaggctggtctgcccgagcctgaagagatcctcagcttttgggtttcgggcgaggagggcggcttgaagcccgcggcacagccgcgaacacgctcggaccggatctgggtcttggctcctgagggcgtgacgggggaaccggacgcgggggtaacgatcctcggggccgcgtcagctcccggcgggcggctctgggagctttccggtgttggtgagatcaggttcggtcctcacaggacgagcatcgcaaccggtgccgaaactgatgcgcaatcgttgcagatcctgcctttcggcgagattttccgggggtggcgggcgctgggcagactgccggtttatcaaggcaggatgcgttaccttggggcggatctggggcttcctttgcgcgatcttcaggggcaaatccgcgaaaccccgatgcggcgcgtgcttggcgggcggatcgtgcaatggcatctcgggggagacttgtgcgcggcgctgcgttgtgtcgttctgccggccgatctgcagatcgatgcgggggaaatcgcccccggggtggttgaagcgcgggccaaggggttgccggtcgggtggcggatgagccttgccgcagcgggcgtgcaaacgccgttcggaaccgaggcccggcttgacgtcggcgcgcgcgatcccggtgatatcgtgctgaccctgcatgacaccgcctccggcctttcgctcgatctggttcgagcctggcctgcgcgtgcgccgctgctgatctcgcccgagggggagcgtttgcggtcgaaccgggtcttggcgctgcgatcgatccatggttggcgtggggtgctgcccgagcaaggggcggcggtgcaactgcgtatcgcgaaggccgcgcacgcgatcggcttcgctgaagcggggcagatccgtctggccagctacggcgcgttgctgggtcaggcccttgcgatgaccggggccgatggcaaggtcaatttgcggcttgttgccggggtggaaaccaaccggctcgagatcgggcgctatgactgggaattgccgcgcggcgatgcgccggaccttggcgccgagccgtgtcgtctgacggcgctgaccgtggcgccgccccatgaattgcgggtgaaagaggtggaggggccgctcgatctctcgggctggttgtcggatgtgtccgggatctggttcgtgcaggggcaatccgcgcgcggggtgatgcggccattcccctggtcgagcgatcccttaccgcgatcgacccgcgaggcccgcatcgaaacctatctggcgcaaatacagggtctcatgcgtcggccgacagatccgggatggggggagatcgaggcgctgatccggcttggccgcgcggggggagattgtggcgcgctcgatcaggtccaggcgctgggagcggtgcccgaatgcgccgttgcgctgctgttgcgcacgaataccccggcagaaatcctcgatctggaaaccgaagcgccactgtggtggcccctcacacccgtttccgcctggagatcggcggtgttgcatctgcgcgatctgctcatgcccaagcttgaggccgcaggattttcggccgccgaggcgaaagaaatgttcttgacccgactgcggcagcagctgggccacgtcgtctcgctgcggcgggaattgagcgggcacgtggcgcaggcgcttggcgggctgggattggcgcatgaggtgatcgggcctgatggcaaggtgatttcgcttcgggtgatgaatgcgcccgcgcttttgacggtgagtgctgcgggactggtcgcccgctcgccggtgatgccgcaaggcagcggcgggttgcatccgaaacagttggttgcgcccaagggcttcagtcgcaaggttttaccggcgctcgaagcgcctctgatcgtcgcagaggtggccgcggggcttgcgaagcacccggtgcctgccgacattctcgaacttctggcgctgcgcctcgtcgatccggactggttcgacaccgcattgccgttggcgattcagattgcgctctcaaatccaggacagcggaaatga

SEQ ID NO: 29972 - DNA, 6039 bp, Rhodobacter capsulatus; identical to SEQ ID NO: 29970

SEQ ID NO: 29973 - DNA, 3102 bp, Rhodobacter capsulatus; identical to SEQ ID NO: 29971

SEQ ID NO: 29974 - DNA, 6063 bp, Roseivivax halodurans JCM 10272
atgaaagaccagagcgcattgccgagttctggatacaacgcgattctggcgcgcgtgaacgaccgcgcggctgacgctgtcatcggtaagggacgcgtgcagtcgcgcagcttacgcgccaatttgtctgcgcggttgcacgggcaggccggcggacctgacgctttcgtggctgacccggtcttcgaggcggcgcgcgtttgggaacgggcagacgtatgcctcgacgacttggccggagggatgctcgacgaagatcttgtcgcggcattggaccgcgggaccctgctggacggcacaccgaatgaccgacgctggccacggcgcggcgacgatgtcgcgccatacctgcaccagctccgcgcttgggaggcggccgaggctgggcgcagtttcatggtcaccagcgggaccgggtcaggcaagaccgagtgcttcatgatcccgatgctgaacgaccttctacgcagccacaaacccggcgaaacgggcgtgcggggcatcgtgctctatccgctgaacgctctgatcgacagtcagaaagagcgcctgggtgcgtggatggacccgctggcaaaccggctgtcttatgcgctctacaaccgccacatgccggatactctgccgggacccaagagacgcggcgctcaggtgatggaacgtcgggcgatgcgccaggcgacaccctcgctcatggtgaccaatgttaccatgctggaatacatgctgatgcgtgcacaggatcggccgatccttgacaagtcgcagggcacgctgcggtggatcgtgcttgacgaggcgcacagttacgtcggtgcacaggcggcggagatggctcttctgctgcgccgcgtgcgcgatgcattcggggtggctccggaagatgtccgccttgctgcgacgtccgcaacgatcggcgaaggcgacgagaaccgggagaccttgcgacagttcctggccgatctggcgggcctgagccccgctcaggtcgaggtgatagaaggtcaggaacgagcgcctcatctgccgccagaaggcccggacgaaacgctggagccggatacgatgccgtctgcgcccgatgtactgtggcgcaagctggctccgaaccctcgattgcgaaaggtgcgcaccgcgatgcgtgatcgcggtatcggccttcgtgcggcggcagcgttgatggggcgcgaaagcgatacggaaggcgcgctgcgccttcttgaagcggcggcgcaggcgattgatccggacacaggcgtcgcgcttgccccatggcggctgcatgtgttccatcgggcgcaaggcgggctctgggcctgtgtcgatcccgagtgttccaagcgcgacgaggccctgcttcaggaggaccgagactggcccttcggtaggatccacttcgccgaaagggataggtgcgactgcggagcaccggtgttggagatcgcagcttgcgatgaatgcggcaccccatggctgcgcgcagaggtcgtcaatgagggcccacatcgtatattgcgaccagctcacggagcggggatcgatgacgactacatcttggatgtggaacccgaggacgacgatgacggtgaacctgccgcatcgcttctatccgaaaacgtgatcgtcggacccggaaacgggactgagggggaatttcttcgcttttccgacgcgcacctgttcgaacatccaaaggagggagaccgcgttctgtcgctcaccatcctcgcggaacaagatcgcaggtgttgcgagcgtgccgggcacaagggcgttaccgtgcgtccccaacgtttcggtgcgccgttcctgatgggcaacgcgatgccgctgctcatcgaggcagctaagcccagtagccatgaccatccggttccgttcggggggcggcggcttctgtctttcacagactcccgccagggcaccgcgcgtttctctgcgaagctccagcaggatgcggagcgcacgctgacacgggcaatcatgtaccactcggtccagaaccgggagggcgatccggaaaaagccgcccagatccgggccactattgaagctctccgcccggcggccgcatccaatcctttgctcgcagcgagcttggcggaacaagaggccgcattgcacgctgccgaaggcgccccgaggcccgtgccgtggtcggatatggtgcagcgcgtcgcacagaatgaagagttccgcaacttcgcgcggccagtctggcacaatcggccggagaagggcgacgatgcattgggaacccatcccacggccttggccgagctgtttctctaccgcgagcttttccgccgtccccgtcttcagaacaacgtcgagacgatgggcctggcccggcttctgttccccgagcttgtcgcgcaggcgcgcttgtcggttcccgatcctctgcgcgaggcgggccaaaatcaaaccgtctgggccgatcttctgcatgcggctgtggaccttgtgttcagaaccaacctggcgatccgactgccggaagaccctgcggacgtgcggcactggatctcgccgcacagcgctctgtccgcggtcgtggaacctggtctctccaaggacgacgtgcctggtgttggtaacccccgtttctttccaacagcgcaatccgatcgctccaacctcgtccgtctcgtctatcgtctgatcggtggcagcatggacagcgccacggacgtagagcgcgccgccgctacacttgcggcgatctgggaccggctgcgcaaggcgggagtcatcgtcaatgccgcctccggcgtctggcgtgtcgagttcaaaagggccgccatcgcaccggtcgaaacggcattcgagtgctcggtcacccggcggctcctgcccttcgcgccgggagggctgtcgctgaacgccattgccgcaagcgaagtcacccgcgccgtcgctatgccgacgctacccttggccgtgccggttggcacatcggcggcccaacgggatacgctgcgggcctggcttgcgcacgacccgatcgtcgccgggctccgcctcgaggggcactggacggatttgcacgaccggactgccgagttcacgcctttcttgcgcgcccaggagcattccgcacagatcgaccggcagagcctgaagacctatgaggacgctttccgtgagggtaggatcaacgtgctgaactgttccacaaccatggaaatgggcgtggacattcctgacgttggtcttgtggtaaacaccaacgtcccgccttctcctgccaactaccggcaacgtatcggtcgtgccggtcgacggggtgagccatgggccatggcgttcaccttctgcaaggacttgccgctcgacaatatgatcttccgcgagccggagagattgctcggcgcgcaggtcgcggcgccgcaggtccggctcgactccgcgatccttgtgcagcgccatgtgaatgcggcgctgttggggctcttcctgcgcgagggtggcgggatgagcattcggactaacatggcctcgttcatgggcgcgacggaggcgatggacgcgcccttcctgcccgacagtgtggccgatgatttcctctttgcactcaagggcgattggggcgctcaggacggtgtctcccaggcgctggccaggctggtcagggggacctgtcttgcaggccatactgggctggtgtcgcgcgccgagggcgactttggcgccatgcgaaatcgctggcgcgacgaatacgaacaactcgtcgaggcgcagtcggtctatgctgatactgacccggcgcattggctctaccgcaagcgcgcgaagcgcttgcgggaggagttcatgatgaccgaacttgcccgacgcgggttcacgccttcctatggcttcccggtggatgtggtttcctttgaccatgccgggaaagggcggggcgagcccgggccttcgcgcccgctggacatggcaatccgggagtattcgccaggatgtgaagtggtgattgacgggctggtacatcggtccgatggcgtgctgccgacctggggcaaccgtaacgatcccggctcggtcgaggatctccggacactgttcacctgccggtcgtgtaatctgttcggcaccacgcggcacgaggcagccgattgcccgcgctgcggtaaaccactcgtccgaacagagattttgcgccctgcgggcttcctcgggacccgccgtccacacagcgcttatgagaaactggcctatgtgccgcccgacccgccccgtgtgtcggccgagccggagaactgggtgtcgcttcccgatcccgaggtcggccgccaacgcactgcgcgtgaagggcgggtcctggtcaccgcttcgggcgatcacggtgacggctacgcggtctgcatcgcctgcggtcgcgcagaggcagagatcggagaacacgactcgccgctgcccgccgggatggtccgacaccggccccttcaaaagctgcgcgacaacccacgccacgacgggctttgcccggcgaacgacgacgcctctcgcaagatccggcggcatgtgaaactcggaaccgagatggtgaccgacgtgttcgagcttcagctcgattcgctgccaagcactgaagcaggcaaaggtaaggcctcagccatcggcgccgcgctgcgggaggcgcttggcgcacggctcggcgtggatgccgaaaccatgggcctcgccgtcgcgcccagcctgcggcccgacgaggcccggcggagcgcagtattcctttatgacaaggcttcggggggatctggatttgcctccgctgcggatcgtgacctgccaagcctcctgcgcgaagccgcgtcgcgccttagctgcccggccaattgcgccacgggatgcccggaatgcgtgttgcggcgcgatctgcaatttggcacggcaatggatcgacccggcgcgctggagatgctgaagaaggagatcttaccgcgccttgaacttccggaggcattgcagcttttcggcccatcaacgcaggcagtcacgcgcccgctcgccgattggattggtcggcaattggcacacggcgctattgagcgcctggcgctcttccttaccgacccgccttccggctgggacgtggccgaatggcccggaacgcgcattgccgaagatgccggccgtaccggtgtcccggtcacaatcgtgatgcggtcgtctgatgtccaccgcctggagatgtcgcagaagctggacctggttcgcctcgtcacccgtgcacgcgcaaccttgcacctggcagacgatctgcccgcggcaggcgatgcgccaatcctcgctgagacccgtctcgatgggcaggagattgccattgctgcaccagatcaggatgccggccatgtgaaccgtcactggggggacgtctcgcggacgctggctgtgcgtggccctcgtgtgccgttggcggtcagcgcggcgctttcgttggacaaggtcacggcttatggcgagggcaactccgcccaaaaggacgtgaccaccgaactggatggtccggtcgggcagttcggccagcggttctggggcatcgcgaagggtctgcgccctcaggttttcaccggctcggcccgtctcgtgcaggttacttacaatgatcgatacttgcgcagtccgttcactgcgcgcctcctcttcgaggcatggcgcacgcttccattgaagaacgcggatacgcggctggacatcgtgacagaggcgcttgggtcgcccgaacgaccagggttcctactctggcacaattgggaaacggatatgctccgtggggaggttctgtcggcgctcctccctggcgcttcggtaatactcggaacaaagtccgactgcgcccatgcgcgtttcttccgtttccgcttcgaagatggatcggagacttccctgtttctggaccaagggttcggagcttggcgcgaagcctcgcgccggacttcacggttcgctcatgatgtcacccccgatgcgcaggcccgcgcgcttagagacttgcggttcgatgtggctttgcaggacggcggacgtttcccttcccccgtctggctacgctggtag

SEQ ID NO: 29975 - DNA, 3168 bp, Roseivivax halodurans JCM 10272
ttgtatgcctattgcgtcggcgagaaactctatcacgagcttagagacactgtcggacacaatctaaagcttggccgtttcaaaactgcggctgcaccttttgttctttgggcggccgaaagatatcggaaagagtatgacggcggcggactgtcgtgggaattcctgacggagccgctgggcattgccctcacccagcagcagctgcgtgaaatcacgggcgtgggcatggcgcgcatgggacgctccgttcgccggctggacagcggcgtgcagtatctgcgcgccatcgccgcggagggcgggatcccggtcaggctcctgagcgaccagcggggcggctatcgcgccgcgctggtcggattggtggccgatctttcccgcatcggactggggtgcccgcgggatgttgcactgactttcgcggcccagcggacgcgccgccttcccgtcggctaccgcacgggcgaatatcacgcgctcttcgtggatttcgctttcgaggttctcgaattgagggagctcgcgccggaaggcatgtcggcgcaggaggtcgagccgtttcttgaccggggcaagccgggctggagggacgccctttctttgcggctcgatggtgacgccgcacgaagcctgttatcggacgcagtcctcgtctccgctcgtcatggattggttacagacccgatgacccgggtgctgcgacgctgcgaagacggtaattggtcagcatggatcgaagtcgaggaggctgcagaaattgcgccgcaactggttcagggcgtcgaaccggatcgacgacggttgcgtctggctccggtcggcgcgcttgcatcagccgtgccggacctgctcttcgctctggatcgagagacgcccgacaggccctgggacagccgccggatcagcgggcgccgaacggcgcgctttcatttcccgctgaatactggggccgaactgatggccatggccgatggagcattcctcggccgggtgaggctcgccggtggcgaggcgatcgagatcgatgccgggccgacgttctggaggctggcggaaatgggtgaagccggggccgaggcgctgtcttatgctggaaacggggccctccggacacatgacccgcatgtctggatgctggccgaaggaggcaaggttcccgattgcaccggctctcttgttgccgaacctgacggatcggtgcctggagggacgatctggcgactgtctgggaacgggcgtgtccttgtcgccggcggcaatgcccagatcgaaacaggagctgaagaagatacccgcgaagagatccacgcaagcggcccattggaatatcgcttgctcgatacgcgcggcacgccggtgcatcgcggagtgccggcgatccttcatcggcatcccggacgtggtttccgacaattgctcggagcggaactgcgccatcagatagcggggagcacgatatggcatggcggatccccctcggatacaatgatgggccgcgtttccttcgccgtccgcgagggcgccggggttggtgcccgggtcacggtgaacttggtccctcccaagttctcggccggggaggtgacgtatggggacgatccatgcaggcggatccgttttgatggcgtgccgcaaggatggttgttgcgggtagcatccggaaaaccgcagcaacccgacgccgatggcgttgtcgaggtgcggcttgacgctcccataggcagccaggcgcgattgccactgacgttggccggtcccaatggggcgccgcccatgtcctgggtcctgaatctgccgcgccctcggggcgagttccagacagtcgcgggcgagacactggcgtcaaaccaagacatctcgatgcagaccctgaaggactggcggatcgtcccggcggaagataggcggacagagttgcggatccgtctgcacagtgcctcggctggaggtgcgccgatcgtcggcaggcgggtaacggtcgagcagccactgtcggcttttcggtcactcttggaagagatgctcgtgacaggcggtgccgatgccgagctccggcttagggtgatcacgggcgcagaccaatcgccgcgactcatagtgcgtcacgcgctgggggaaacacggcttctgggcgaggacgtgttggtgctcaatgaccagacgccggtgcacgaacccgcgctcgcgatcactgccgtagatctgaacgacccggcccgcgtggtggagactggagcccggggcctttcgcacctgggaagagggcgctggttcctgttgccgcggagaggcagcgcgcctatgcgccccccacgcccctacgtacgtcctgagcctgccgggactacaggacaggatgcgcccagacgggctgaccgtattgcgcactacgcccgccgcttttcagaaaccaacatcgaaaatgacctcgctcgcctggctgccttgtccgagatgcttcttgcaaacggcgtctcgccatccgcactggacgaggtgcacgcactggcaaaagtgccctcggctgccgtacgactgctgtttcgtgtcgcgccgtccgaccttgaggacgcactatctctggatttgcacggtggcccgggatggtctttcatcggtcctgtggattgggcgaaaggcttcgcggatgaggcggcggctgtgcacgcgactttggcagcgctgcctgctcttgccgatagggcagacgagcatgcccgcgacgctgtgaccgcgcgtgcggcggacatcctgcggttgcgtccggcactggagggacatgtcgccctcgcgcttcagcaattggatccgatggcaatcgccgcccttgcacagcgccttggcggcctgtcgcgcgggctacagaatcctgagggcacgctgctggaaaccgcgcgagccatcattagccgccaagccgagaatccgcattcattgcacaccttggccgcgcgaagacgtccctccggcttcgatgtctttcaccccgacttgcgcggcttgatcgaggcaccgcttgtcgtggccgagattgccttcggcctgcgaccgccgccgaccaccagagaacgtgtagagctgctgcttgcggtacaggcagaccaggccgcctacgagactgcgcaaccggcagcaatcgcctggctggcgcagcagagaacctga

SEQ ID NO: 29976 - DNA, 5988 bp, Roseovarius sp. BRH_c41
atgaccgattctcattcaaatcttctgcctgcaattgaccatctggcgcagcgttcagcacgtggcatagttgcgcgttcgcgtcttgcttcgacggggctcaactcactgcttttgcgggtgctttctgcgccttccggctttcccgctgcgctggtcgccgatccggtgatcgaggcagcgaagtcttggctgcttgcgcgcgagaccatgggcgatctgtctggaaggcttctctcggaggatttgattaccgcactcgatcaggccgaaggcaaggcgatggcaagggaaagccatcctcgccagcatcagctggaggcttggcgtgccagtctagaaggcaacaactcggttctggtgacggcaggcactggggcgggcaagaccgagtgcttcctgattccaatcctacaggacattctggcaaacccgaggtcaggtggcggtgtgcgggcaattctgctctatccgttgaatgcgctaatcgaaagccagcgcgaacgtctcgccgcttgggcggcgggtttgggcggcaaggtccgcttcgcgcttctgaatggcgacactcccgagacggagcgggatgcggtgatcaaatcggacaaggtcgagctgcggtcgcgcgcgaagatccgagaatgcccgccagaaatcctagtgaccaacatcacgatgctcgaatatctgctcctgcggacaaaggacaaaccgctcattgagatgagtcaaggcgcccttcgttggatcgtcttggatgaagcgcatagttatatcggtagtcaggctgccgaaatggcgcttttgctgcgtcgggtgagggctggatttggtgttttgtccgatgacgtccggctgatggcaacctcggctacgattggcggagataaagatgctccaaacaagctccgcgccttcgctgcagcgcttgccggacaagacggggggcgagttgtggtcgtagagggcaaagaggatgcgcctgttctacctgcaccggggccagacgtagcactggatgccgtggcccttgctgacatgacgtccgaagaggccggcgccgttctggcacctcatcccagaattcagctgctctggaatgagatgtcgcaacagggcctgacactttcgcgggtggcggaggtcctcgcggacgatccgactcaacgagctgaggctgctcgcctgctggacttgctaggcagatcgacccgccaagggcgaccgttgttaccttggcgaggccatcttttccatcgttctcaagggggaatctgggcgtgtcccgacgccaattgcatgtgccgccagcctgacttgatctccgatgaggctaactggcctttcggagcggtatggttttcagcgcgggcacgatgtgaatgtggtgctcccgtttatgaggttgtttcatgttcagattgtggacaggtatttttgcaaggtctgttccatggcggcgcagagcctcgactggaacctcccgagtcgggtgaggctgatgattacgctctggatgccgaacccgatgagggtgagggaggagaggctgatcgcggatttgcttggctgctttgcggcgaggggatctggctcgcagatgatacgcgcatctatgacaataccgtgcccgaaggcgtgcgtgcccgcaggatgcaactgctccacgttccagcagatcgaacctgttgtgacagtgctggctcagcccggctgatggggctgcattttggccccgctttcctgatgggaaatgcgcttggcggcctgatggaagatatcgtgccgcctgatgagacgcctggtttgccagcaggtgggcggcgcgcgctgacctttaccgatagccgtcaaggcgttgcccgcctcgcggcaaagatgcaacaggatgccgaacgcagtctgacccgcgccttcctttggcatagcgtgcaggaggggggggctgcagaccccgtctgtgtagcaaagctgcagagcgatgcagcaaagcttcgagcggttggattagacgaaatggccgcagacaaagagcgggaactggcaaaagtgacgggagcgtcagcggagccggtcaaatggcccgacttggtccgacgtttcgggggacatgtcgatctagcggaatttgcgggtgatatctggcgcaaccgtcggattggtagggaaatggccgatgacccgttgaagcttgccgaggcattcctgttcagggaactgttccggcgtcctcgcgttcagaacaatcccgagacgatgggcttggttcgtctggtctttcctgctttggctgaaagggcacgcctttccgggccgccagcgcctttggcagagactgggatagacgccgaaggttgggtgtcacttgcgcatctggcggtggatatggtgttccggcaggctctggccgttgagatcccgctggatatggtgccgctggttgcgcctcgtttcgggcggctgaatacgatacatgcggctgacacgccccctgatcgaatggcagagcgttctcgccgctggcctggatcaagagccgagcgtcacaaacttgttcaacttgtttatgcgctgacgggcggtaacccggactccgcaatcgatcaggagcgggcggatgaggttctaaccgcgctatggtccataatctgtagcacggcggcgcgggacatggggcaaggtgcatggcgtttgaatttctctcgcgccggcgttgagcgactggagcgcgcttggttatgcccgattacgcgccgtccttatggttggtcggctggcggtcggagcccgaatgatccgagtcaattcatggctgagatcaccatgcctcgcctgcctgccgccaatgctggcgggttgacaaccgagcagcgtcgcgaggtggcgcactggaccgagaaggacacgacggtagcctttttgcgcgggcgcggcctttggaccgatttgcacgaccggcttgcggctttcccaccctacatcagggcgcaggaacactccgctcagatcccgagggccacactccagcgctatgaggaaaaattccgtgacggacggatcaatcttctgaactgttcaaccacgatggagatgggcgttgatattgccgatgtgcgccttgttgtgaactccaatgtgccgcccgcgctatccaactatcggcagcgcgcaggacgggcggggcgacgtggggaaccatgggccttcacaatgaccttctgccgtgacctgccgctcgaccgtagggtctttgacagccctaccgatttcctgtgccgtcccatcgtcgcacccaaagtgtggtttgatagcccgtcgctggttcaacgccatgtcaatgcagctctgctggctgcatggctttcggagaacggcgggcaggatgtaaggggaagtatcggtgcctttctcggtgccggtcaacgcgttgacgaggccgtgcttccaggtgctatggccgatgccttcctgatcgcgctggacagtgaatggggggcatcgcaggtgaaacggatcgctcctcttgtcgcaggcacatgtctggaggtgcgggcgctgcatgcgcttgtcttacattgccatgaggcgttcgaacgtctggttttgcggtggcgcaccgagcatcgcatcctgctggaaggcgcagagacgatgcctgacaaggatgctggcaaagcgctcgaactgcgggcgcggcgtctggcaggcgaatttctgttgggagagctggcgcggcggggttttacgccagcttacggtttccccacggatgtggtgaccttcgcgaacctgtcccagagtccggccgatgctgacggagggactagccaccttcgtcgcggcacggcatcgcgcccgcttgaccaagcgatcagggaatatgcgccgggcgctgaattggtgatcgacgggcttgttcaccagtcggaggggatcctaccggcttgggaggcgggcacggatgcttctgggcttgaagatctccgcacactctggacctgcgatgcctgccactcgtttgcgctcgaagcgggtgagcccatcgcctgtccgcaatgtggccatactggtctgagctatcgtaaggtgctgcggcctgccgggtttcttggggccaagcccgcccatgtcggctacgagaaccttgcgcatgtcgaaaccgatccgttgcgtctttcggctcatggcggcgattggatcgcgcttggcgaaggagttggacggatgcgcgccgacccggcagggctagtcgctccctcggtggcagggccattggggggcggttttgcaatctgccttgactgtgggcgtgcagaggctgagcctagaactcagccgggcatccccaccgttacgtctaagaccatgcgccatcaccgacctctaatgttgggacgccgtctgaagctgacccatgacggttattgtccatcggccaatgcgcccggacgcattcagcacaacgttcatcttgcccaggtcgcgagaaccgatgtctgggaatggcagttacccgtcggcgtcgctgccggaacggccttgaccctcgcagcagctttgcgtgaagccttggccgaagggttgggcgtcgaacctgacgaaatcggcccggcaacggaccgatcgaccgggccggcgcaagatgcgtgccagtcgctgtttctccatgatcgtgccgcaggcggggccggtcttgttgcgcgcatggcggagcccgcaatgcttgaaacctgcctcgaccgtgctttggttctgctggattgcgcggatggctgcagaaagggatgcccttcgtgcatcctgcgccccgatcttaatcgacgtgatataaatcttgaccggccaggtgcgcgcgatctggcccaggcgctgcgcatgaggctggctctggacccgggcgagcaagtattcggcccccagactaggttggcgggccggaacgcgacagatttcgttgccgagaggttgcaatcaggtcggttgcgttctctcgacgtctggcttcatggcgatccggcagtgtgggatttcggcgaatggcgcatgcgccggttgttagagagggtttcgcaagccggtgttcgtccccgcattcacctgccgactgcagctttgaccgcagctggcttcgatctttcatgcaagctggcgatctttgctttctcgtcggtagccgacctccatcgcatagaccagccaccaatggctggcgcagccccaatcattcttcgtttcgactgtggcgccggggttgatgcgcttgcagttttggacccgatggaggccagacctggtgccgaatggggggcaggggccatggcgctcgtggtggctggacctgcgcctgaggttgacattggggcgaagctttcggcccaaaggctcatagaacttggcttgggcaatgctcatcttttgaatgttggaactgaaatggatggaccggcctccggcttcggtcgccgattctggtcctggctgtcaggaaaggcacctttggacatcgctgcgatgcagtcagtcggggtgagtagtcttgcctatagtgaccgctatctgctgtctccctatacgctccggcttttggccgaggtgataaaatccgctccaggtgcgaaagacgcccacaaggtgatcaacatggcgttctccgacaggtcgcgggacgcgacccgttatctccatgacacattcccttccgatacaacacggcgtgaggtgatccgccaaatggtgcctggggtggaggtcaccttgcttgctaaatcgcacatggcgcatggcagaagcttggcgatcacattgaaagatggacgccaactgacgattcaccttgaccagggatttgggggttggagggtcgatggaatgcatcggcatgacttcgcggtcccggacgcggcgcaggccaaaggaatcgccgctgcggtcttttcaatcatcggggatggcatggtcggggcaccgcttgctataagcaggatgtaa

SEQ ID NO: 29977 - DNA, 3129 bp, Roseovarius sp. BRH_c41
atgaagattgttcagttaattcttgagcgtaacgggctaaaacgacctgatgggcgcccgctttactcgtatggtgtcacagattccgagcgagaggatctgggatctttcctgcgcatgcggattggcgtgggtgggcttacgccatcgactgcgcagggctttgtgatttgggcggcagagcatatcaggacaggctttagcggtggacagctgacttgggattttgttttcgatgggatcgctctcgactatgatcgcccagccgctattgacctgacaagtcgtggtctggatgcgtggggacgcaagttgcggcgcagtgatcaagggcacagggagtttctttattctctgcttgctgaaggggggttgccggatctcgcactcgctaacgccccgcgatatcgcggggcgctgctcgggcttgtgtcagcaatagagggcgaaggtgtgcttggggcgtcgatcgctcacgctgcggctctgaggttggtcgaggatttgccccaggtattgcgctctggagaacaggcccgtcttatggccgaattagcgcaggcgatcattgccgcaagaagtcttttgccaggagatctggccgttgaagccgctgagaactggcttgacactcataaccctgactggcgtcaggaactgccgctacggctttcccatgctgccttcgaggcattggtgcttcccgtgctgctcagcgagcgaaggcgtgcaacgccggtgtctgttttggcacggcggcagttacgtaagcatgtaagtggttcatggatcggtgttgccgaaatctctgagggggcattattgccgcatgcgaatcttgcgggtgttgatcgcagtcttcgattgcgactaacgaccgacgcaggtgcggggttcctcggtgttccggttgaagatggctgggaactaactcgtagtgcgggacgtggtgccttgatgatgcctgtcgcacctagtgagccggttttcctgaatgcccacgctgatgggcggtttctgacgcaggttttggttgatgctgggcaggtatcgccggatgatgcgccatctctctggcgtgcgcttgatcccgatgtcgccatgccagaggtattggtgccactttcaggccgaggacagacaaaagcagatcgagtttttgtgctagcacctgacagggccatccctgaaagcgcccatgatatgcgctttagtaaagacgcgattgggccgggtggcgctgtctggtcggtgtctggttgtggagtcgcccgttttggggcgcatgaactggtcatcgcgactggagcaaatgaagatgcgcccgcaacgaggcttgcggttctggggcgcccgatccagggatttatgattgacggggggatcgcagcctttcttggcgcgccgatattactaggctttgaaggcgacgcaccgatgcggccgatcgggaaagatgtgcgcacaaggtctgtgcccggtctactgggagggcatgtcgcggaatggtgcgatggaggggtggttcttgcgcgctgccgctatgttgttttgtccgaaacaatgaagatggacttgcgcgagatcgtcgatggccaagctatgcttaaggcttcgggactgcctcagggtattcatttgcatcttggagtcggaaaggaacggcacgcgactgtgattagtgatgaagggtgcgccacattggtattccaagttgcaggacagcccgcgacgtttgatattcggctgtcaagtccggccaacggggaaagtctctcgatgacaggggtttggccctctcgcgtggcacgtgttctcgatgggcggggtgcgctggtgtccagtaatcgaccgctttctcggcagggactggtcggatggcggggtgtattacccgaggctggtggggctgtgcagttgcgcatggcgcgcggaggagcgccggttgcctttgccgccgcaggagtggtgccgcttgttcagtttggcaatgtgatcgatctggccctttcccttcagggtgctgatggcagagtgaatttgcgtctcgtcggaggcgggcaagagacaccccgattggaaatcggtcgatatgactggaatgccgaacctaaaggccccttctggcatcttgacccaggggtcacacatctaacggcggtcagtcttgatgatcctgcgcggacagtatccgtagacgttgaaagctgcacggatccggtggtttggctgggtgaagaagaagggctttggtttgtccaaggctggtcagaaacccagggcgtcatgcggcccgttgtctggtccgcgcgtcctatggggtggtcttcgcgggaccagcgactgcaatcctataccgttgagtggcagcgactgctctctgaccgcgatgatctggcttgggatcggatctggagccttatcctcgcggtcagagaagccggagatgcttcggcgctggatcaggtgcaggccttggctcgcgttcctggcgcggctgtagctttgttgttgcgcgtcggtcgtgtggaccgcgccgccgccttagcgatcgagaccgaaagcccattatggtggccacttgtgccttgctcagcctggacagagggccttgttgcggtgcgggacgggttacgcgggcggttgcggtctgcgagcatagatgaggccgagattggcaaactggttgaggagcgccttgcgcgggctgcaggagagattatcgctttgcgacctgaattggcggtccatatcggtcaggccttcgctagagcaggtgaaacgccgctggcgctaacgtctggaggaatcccctttccgctggccctgccgaacgctagggctaagtttgtcgctgctgcccaagaggcgctgcgccgtttctccaaattgcccgatggtgtgtccggcctcttggctgaaaagttgcaggatcccctacctgtcagcgatgatttccgccctcttctgcacgctccctttgttgctgcggaagtcgcaagtggtttgcggcctgctctctccgcccaagaacatctgcaactgattgcccttcgcgccgctgaccctgtctggttcgataccgcactgcccgccgctctaacacttgcattggacctttccagatga

SEQ ID NO: 29978 - DNA, 4254 bp, Rubellimicrobium thermophilum DSM 16684
atgccccccgcctcgaacctgacggccgcgctcgaccggctgacccgcgcttcggccatgggcatggtggcgcggacgcggatggcctcgccggggctgaacctgtggcttgctcgcgagcttgcgaaagaccccggcacggcaggggcgctgatcgccgatccggtgatcgagatcgcccgcgcctggaagcccgccgaccggccgctgtcggccctggcaccggatcttctgtcgcccgatctggtggcggcgctggacgggacgcaggtcgcgcgcctgccggccgaacggccgccttacgcccatcagctggccgcctggcaggcgactctgggcgagcgccggtccgccatcgtcaccgccggcaccggggcgggcaagaccgaatgcttcctgatcccggtgttgcaggatgcgctggcccatccccgaccagacggcggggtgcgggcaatcctgctctatccgctcaacgccctgatcgaaagccagcgcgaccgtctgcgcgcctgggccgagaggctgaggggccgggtgcgctttgcccttctgaacggcgacacgcccgagaccgagcggcaggcgaaggagcagtccgacgacatcgaactgcgctcgcgccaggcgatccgcaagcgtccgcccgaagtgctggtgaccaacatcaccatgctggaatacctgctgctgcgcagcgccgacaggccgatcctggccgccagccagggcgcgctgcgctggatcgtgctggacgaggcgcatacttacgccggcagccaagcggccgagatggcgctgctgctgcgccgagtgcgggcggccttcggcgtgacgccgggcgacgtgcgtctgatcgccacctcggccacgatcgggggcgaggaccgcaccgccgaaaagctcgccgccttcgccggggcgctggccgggcaggaacccgagagggtggcggtgatcgaggggcaggaacgcacgcccgacctgccgccggcggggccggatgggcccctggcgcccgatctgccggccgaggcgctcgccggccatccgcgggtgcaggcgctgcgccgggccctgtccgagtcgggccgcccgctgggcgaggtcgcgcggatcctgaccggcgatgccacgcgccgggacgaggcggtgcgcctcctcgatgccctggctgcggcggactggcaggggcatcggctgctgccctggcgggcgcatctgttccaccgcgcgcagggcgggctctgggcctgccccgacccggcctgcccgcatcgcgcgcccgaactgacgggggcgggggcgggctggcccttcggcgcggtctggctgaccccgcgcgccgcctgtgcctgcggcgccccggtctatgaggtggtggcctgcaacgactgcggcaccgcgcatcttcaagggctggcgcagcccggcgcgcagcttcggcttctggcgcccgaggcgggcgagggcgacgatttcgcgctggaccaggacccgggcgaagaggatgcacccgccgcgcccgcgggctccgcctggctcgcggctgaggggcagggcggcggcatggcgggctggctcggcgccgatgggctgtggttcgacaacaccccgccgcatggcacgcgcgccatccgcgcaagatggatcgccaccccggccgaccgcgcctgctgcgcccgcgccgggcaggcggggctgacgggcttccgcttcggtccggccttcctgatgggcaatggcgtcggcggcgtgctcgaggatctcgcgcccccaggcggccggcccggcctgcccgcgggcgggcggcgggcgatcagcttctccgacagccggcagggggtggcgcggctggcggcgaagctccagcagggcgccgaacgcgacctgacgcgcgccttcctgtggcatgcggtgcaggaggccccggcgggcgccgatccggccgagatcgccgcgctgcgcgagaagatcgcgaagatggaggccgcgggcctcggcgactatgccgatgccgaccgccggcgtctgggcgaactcaccggcgctgctgctgccccgatcccctggggcagcctcgtgcagggacttgccgcccatgccgacctgcgcgagttcgcgggcgacatctggcgcggccgggcgcttggcgcggggctggccgacgaccccgcgaagctggccgagatgttcctttaccgcgagctgttccgccgcccgcgggtgcagaacaaccccgagacgctgggcctgctgcgcctgaccttcccggcgatggaggagcgcgcgcgcctgtccggcccgccccggctgctggccgaggccgggatggacgccgaaggctgggcggcgctggcgcaggtggcggtggatctggtgttccgccagagccttgccgtggacatgccccccgccttcgtgccactggtcgcgccgcgccatggcgtgctgaacgcggtcgtgcccgccgatacccgcgccgaggatatgccggcgaacagccgccgctggccgggcccgcaggccgtgaatggccgcctgacccgcctggccgaactcgtctatgccccgaccggcggcagccctgacagccgcaccgatcaggaccgcgcgggcgaggtgctggatgcgctgtggcagcttatcgccggcacggcggcgcgggatacgggcgcgggggcctggcggctggatttcgcgcgggcggcagttctgcggctggaccgcgccttcctctgccccgtcacccggcggccctatgcctacagcctgtcgggtcgcagccccaatgaccccgcccgcacgatgcagcccttcgagatgccgcgcctgcccatggccaatcgcggcggtttgacgcgcgatcaggcggccgagattgcagagtggtgccagaccgaccccaccgtggccgccctgcgcgcgggcggcctctggaccaatctgcacgaccggctggccgcctttccgccctatatccgcgcgcaggaacattccgcccagatcccgcgccccaccctgcaacgctatgaacaggccttcgccgaggggcggatcaacctgctcaactgctccaccaccatggagatgggggtggacctggccgatgtgcggctggtggtgaatgccaacgtgccgccctcgctcgccaactaccgccagagggcgggacggccggccgcgggcgagcccttcgccttcacgctgaccttctgccgcgacctgccgctggaccgccgcgccttcgacaaccccgcggcctggctgacccggcccatcgtcgccccgcgcgtctggttcgacagcccggccctggtgcgccgccacgtcaatgccgcgatcctgaccgcctggctggccgcgcgcggcggcacggatgtgaccggctcgatcggcgccttcctgggcgcgggcagcagcgccaaccggccggtcgaggatggtgccgcggccgatgccttcctggccgatctcgatgccggctgggccggggggctggacgggccgctgcgtgacctgctggcgggcacggtgctgacggggcaaggggtggaggcgctggcggcgcacacccgcgccgccttcgaggcgctggtcgccggctggcggcgcgagcatctggcgctgttgcaggctgccgccgccgcacccgaccgcgaggcgcgtcaggcgctggaactgcgcgcaaggcggcttgcgggcgaattcctgctgggcgaactggcccgccgcggcttcacgcccgcctatggcttcccgaccgatgtcgtcaccttccagaacctgtgccaccgcagccccgatgccgataccgggcagagccgcttccttcgcggcaccgcggcgcggtcgctcgatcaggcgctgcgcgaatacgcaccgggggccgagctggtcatcgacgggctggtgcatcgcgccagcggcatcctgcccgcctgggaggcgggcgccgatgcctcggggctcgaggatctgcgcagcctctggtcctgcccggcctgccgcgccttcgactgggcacccaccgcgcccgagtcctgcccccgctgcggctataaaccgctcaagatccggcgcgccctgcgcccggccgggttcttgggcgacgagcccgcccatgtgggctatgagaacctgtcccacatcgccgccgatccccgcggctttccgcccatggcggcgactgggtggcgctggccgaaggcgccgggcggatgcgcgccgatcccgaaggccgccttgcgatga

SEQ ID NO: 29979 - DNA, 1644 bp, Rubellimicrobium thermophilum DSM 16684
gtggagtggcttgaggatggcgcggttctcgcccgtctccggcttgtcgtgctgcccaccggcctgcggctgaccctgcgcgagaccggatccgaggcgctgcggcttgaggccgagggcctgccccccggctggcacctggcgctgcgagcgggcgagggcgcagcgcagggcatcgccgacgccaggggccacgctcttctgtcgctgaccgccgcgcagccgccgggccttgtcgcgctgcgcctgtccgatccgggccgcggcgcagcgctggacctcattggcctctggcccgcgcgaacgccgcggctgatcgaccccgaggggcaggtgctgcgcgaggaacagcggctgtcgctgcgccgcctcgccggctggcgcgggcatctgccacgggggcagggcgcggtgctgatccggctgggcgggcagggggcgcaggtgggctttcccgtcgcgggcgaggtgcgtccggccgcagtcgcgggcgtgctgggtcaggcgctggcgctgttgggcgccgacgggcaggtaaacctgcgtctggcgctcgtgcaggagacgccgcggctgtcgatcgcccgctacgactggcagagcgaggaggccgggccgttccgccatctgggcggcgggcggacgcggctgcgggcggtgctgctcgaagaccctgcccgcaccgccgagaccgaggccgagagccgcatcgacctcggcggctggctgggcgaggacgagggactttggttcgttcagggcgagaacgccacccgcggggtgatgcgccccttcgtctgggccgcgcggccgcaaccccgcagcacccgcgacgagcgactggcccgctatgcggcggaatggcaggagatcctcgaagccccccgcgatccccgttgggatcggatcgcggcactgatcgctgcggttcgcgcggcgggcgactgcggcgcgctcgatcaggtgcaggcgctggcgcgggtgccggcggcggcggtggcgcttctctggatggcgagacgcgaggggcgcgcggcggcactggcgcttgaatccgaggcgccgatctggtggccactgatccccgtccaggcctgggcgctgggggccagggcggcctatgcccggctggtcgcgcagcttcgcgcggccgggatcgacgacgccgaggcggtcgcggccgggaccatggcccgcgcggcgggcgagatccttgcgctgcgccccgaacttgcggcgcatctgggccgggccctgcaggcgtccgggctgcggccccagtcctgcgacgtgcaggggaatgcctcgccccttctgccgcccggaccggccgcgcgcgcgctgctggatggcgctgcgcaggaggccgcgcggcgcttcaccggcctgccgcagggggtggacgggctgcgtgcccggcgccttgccccgccaaggatcggcgatggcggcatggatgccctgctgcacgcgcccttcgccgctgccgaaatcgccgccggactgcgcccggcacccgagccgcccgaggtgctgcgccttctcgccctgcgcgcagctgacccggcctggttcgaggccgctctgccctgcgccctgacacttgccctgacggaggccccatgccccccgcctcgaacctga

SEQ ID NO: 29980 - DNA, 6321 bp, Salmonella enterica
atgactacacgctatttttcgtcacttattgaacaatcgttgtctcgttctacagaagcaacgctgagtatcatgggggtcacaaacccgcagttgcgtgaacacctcgcgcagcaaatgggcgccgattgtggggagtctggctcatttcttgctgcaccggtattccagcaaatgtttggctggaaagaatcaaataacacgatgcgcagcctgactgaaggcaaggcattactaagtaaagccgttgttgattcgcttgatgatcagaacaatggtcgctaccgttttggtgctgactggaaacctttcactcaccagctggccagttggaaggctttactggaagagaaacattccgtggtggtgacaagtggtacgggttcaggcaaaacggaatgttttatggtgccggtgctggaagatctctaccgggaactgcatgaaaatggcaacaatccgctggttggtgtcagagcccttttcctctatccacttaacgcgctgattaattcacagcgtgagcgcctggatgcatggacacgaggttttggcaccgggatccgatactgcctctataacggtaatactgaaaatctccacgctgcggtaaaaagtgagcagataaaaaggccgaatgaagtgctctcgcgtgaaaagatgcgtgaagaacctgctccgattctggtgaccaacggcacaatgctggaatatatgatggtacgccaaatcgacgccccgattattcagcaatccaaagcacaaaagtcactacgttggatagtactggatgaagcgcatacctatgtcggttcgcaggccgctgaactggcgctacagttacgtcgcgtgatgacggcatttggcgtgacgcccgatgatgtgcgtttcgtggcaacatctgcaactattgccggaggcgatgccgaaaaacagctgaaaaaattcctctctgaattatccggtataccgcaggagcgtattgacgtactggacggaacccgggtgattccgaaactagaaccgtgcaaacacgtttatattccgttagaagaaattgagcaaatccctgatacagacatgatgggcgtaagcccagagcgctttgaggcacttacacattcacctgaagcgcattacttgcgtgagatgttagtcactcagccggatccaatgaagctggatacgatgacgcagcggttgaatacgctgaccaggcaacattatagccagcaggatgtgctgcgctggatcgatgtttgctccggcactcaacctaatactaaagatccggcatttctgaaggtaagagcgcatatcttccagcgtaatacccagggtgtgtgggcttgcgttgataaagagtgcagaaaaaagcacggcactccgctggaaaagggctggtcctttggctatgtgtatgtgaatcaacggcaaaattgtgactgcggaagcccggtctacgaactggcattctgtaatgaatgtaacgagccacatcttttggcgcgggacaaaaagggcaaactggtccaatgggaaaataaaggcggtgatgagttctctttgcaggatgatatgcatgttgaatatgacggcgtagaagataaagtcgagaaagagagtactttccagcccccgcttattattgccgcagaaaagaccaatgagatggggtataccatccaaaggctggatcgccagacgcgtcgtattggcgtgggtagtaatgacagtatcccgttagttattaatgatattgagcaagtttgcagcgccagtggctgtggctacagagggacgagcgggaaacaacccttccgtcgcgctttattgggggggccattttatgtcaccaacattgtgcccaccgttctggagtattgtcaggactttattagtgaagaaggaaaagagggcgtcggacctgattcgctaccaggtcgaggccgtcgactgattacctttaccgatagccggcaaggaacggcccgaatggcggtgcgcatgcagcaggaagctgagcgcagtcgtttacgcggcagcgtggtggaaatcctgagctggcatcaacgaacgcagactaccgtcacaccgaatgccagtgccgatcttgaaaagttatccgcgagggcaaaacaggcccgaaatgaggcagaagaatatagaagctggggaatgccggaacaagcaaaactggcagaagcgcaagctgaacagcttgaacaggctattcaggttgcgaccggtggcaaagcagcaactgttctgctgtcccggacctggacggaaatggttaatgaacttaaagagaaggctgatattcgcggtccgattctacaatataaccactatctgaagcctgagattttcaatgaaaacggaggcccgctgaagctttcagaaatgttgcttttccgggagttcatgcgtcgccctaaacgaactaacagtctggaaacgcaagggctagtccaggttggttatcaggggctggagaaaataattaaactcccggtgcactggcatgaaaaagggctgacgcagggcgactggcaggattttcttaaggttacgctggatttatacgttcgtgaaagcaacttcacgcaactggacgatgaattgaaaaactggattggtagtcgtttttcatcgaaattcgtccgtaacccggaaacgaaagatcctgaagataatcagaacaaacgctggccgcaaatccgtaatggcaacttatcccatcgtttagtgaagttgttgatgctgggagcgggtttcaaaacagcaaatacggcgacgattgatattatcaacgcgtggctgaaagaagcatggaatcaacttaccgggccacttgccgtactgaagcctgatggtaaccgtttctatctgccaaaagagcacctgactttttctttaatcacggatggctggatttgcccggtaaccaataaaattctggataccacctttaaaggcttaaccccttatctgccaacccatatttcgtttgaacatcttagccaggtgcagttcgacacgtttatcgcgcaaaaggtcaccatgccggaaatctggaagctggaccgttcgcaagaagactacgcggcaggtctggcgaaagtacgtgactgggtcagcaaggagccgctgatcgcgcaattacgttcggaaaacgtctggacggatatcaacgatcgtgttgtggaaggaggcttctattaccgcacggctgagcactcagcccagcaatcatcggaacgtctgcaaagctacgaaaagatgttcaagaatgggcaactgaatgttctcaactgttccaccaccatggaaatgggggttgatattggcggtattactgctgtggtgatgaacaacgtaccgccgcatccggccaactatttacagcgtgcagggcgggccgggcgtagtaaggaatcgcgagcgatctcttatacgctatgtaaagggaacccgcatgaccagcaggtttttgccaatccgctgtggccgtttgaaaccatgatcccggctccgatggtggcgatgaattctgcccggctggtacaacgccacgtcaatgccttattactgtccgacttcttatgcaacgttattggtgaaacggagaaagaaaaaaccagcctcgacagtctctggttttttggtgaggaggacgggcagtcaaaatgtgagcgctttaaagtctggctggagcgcccggttcttgatatcgacgcggcgctggaacggctggtgaaaggtacggcgctgcatggagccagacccgacctgctgcgggataaaaccattaacgcgattactttcctgcaacagcgatggctttccgtctatcgcgatcttgtggctcaagagcgcgaatcacagccgcaaacgccttatcgcaagcgtatcgaactggagaaaaaacggcactgtggcgagtatttgttgcgcgatctggcagccagaaccttcctgcctggttatggcttcccgacggatgtggtgacgtttgataacttcactatggaggactatatccgtgaaaaatcgcggaaaagccgggataaaaaagatcgcgaagataacgtgtcacgctacaaagggctgccctcccgaaacctgggagtcgccatccgggaatatgcgccaggcgcagagatcattcttgatggtcgggtcttccgctccgccggtgtctcgctgcactggcacaatattaacgccgataccaatgaggcccagcgtctggattgcgcctggcgctgccacaaatgcggtacgattggctataaagaggggatgagcaactccgggacgctctattgcaccaacagcgcgtgtggtgaaaaaattatcactgaaaatcgccgtcaggtgctgcagcctgccggatttgtgaccgatgcgcatgcaccggtgaccaacaatattgaaaccatgaaattcatcccggtggtccctgcatgggtatttgttaaagccgaaccaatgccgttgcctaacccaataatgggatatatgacctctggtgctgacgggcatgtcttccagcaaagcctgggagaaggtgggcatggttacgcgttatgtctgagctgtggtcgtgcagagtcgatgttgaatgctaacgacgcaccgaagagtatggaagcacactacccaccgcgcccgggaaaatcggatcgcgatagccagaatcaacgtctaatttgtcccggttcgacggcgcttatgaagaacgtcacgctgggggctttggcgcgaacggatgtctttgaaatggtactacgcaagccgcaaaacggtgaatatctgccggataatactgaagaggggcgggttgtcgccatgacccttgcagttgcgctgcgtcaggcgctggcgggtgttctgggtatctctgccgcagagctgggctacgctgtgcgtccggtccggttggaggacgggcaatcggtattagccgttcagctgtatgatgtgatcagtggtggggctggttttgcctccagtgcgccattgcatattgagtctattctgcagggaatggtcaaacagctagggtgtcatcattgtgatacctcctgcagtgaatgcctgctcgactcccagactcgccacgatcacgatttactggaccgaaaagcggcactggcctggcttggggatgacttcgtctattatgttggtttgccggatacggagacattctcgctgccggatgcccgctactgcccgggagccattagcgacacccttcgccgggcgattaacgaaggggctgaaaaactcacgctgtggatgaacgggccgctcaatgagtgggatctttatgcccgtcaattccgggcggctattcagaactaccgggtaaaagataacgttgcggttgatcttgtcatcccggcaggcgtcgatgaccctgaactgatgcacgagctttcgcagtttactgctctgggtgtacggttgtgtcatagcgaacaggctccggaactgccgattgtggcacaaatcgcctttgccgatcgggtcatgacgctggcttcacgcagccagcaggcaacgatccctggaccgggctggcatctgaatgacgaactggttgttcgcagcctcggctataaaacggtaaaactgaacgagtttgttctgccggggaaagccacgagcgcggttgaacgcgtcaaagatattgcgatccataaagagctgaacggcccgctttcgttgttcggacaacgcttctgggacgtgctgtttaacgaccatgaagaggcgcagtcgctgatgaaaaatcagcggatcatcggcgttcactataccgatcgctatctgcaaaacccggttgcgctggtgctgctggcggcgttattgaaaccgctgaagccgttactgactgaggaagctaaggtggcgattgatacattattcaaacctaaagatcgcgccggtaaccggcctttccatgactggatgagcgacgcggattttcaggatttcgccgaccagtggtttgccgcggcaatgggcagggcggtagcgctaagagtattcgattcgctgcgcgacattccccaccatcgtaaactgacggtgacatttgagaatggtcaggtattaaagattcgttttgatcaggggatgggctactggcgtatcaactttgcatcaaaatggtattactttgacttcagcgatgacgtttcctttcagttaggcaatatggcgctggcctgtcaggatggcaaggtgcttaacagcgaagaaagctgggcaacggatgtgctggtggaggtgatggcagcgtaa

SEQ ID NO: 29981 - DNA, 3300 bp, Salmonella enterica
ttgagtcagtcagaatacacgtcgatcctaaaatgtaccccgtggctagataaattcctcgctcgtagaggattgaagcaaccagatcatcgcccgttatatgaatatcacgcaacgtgtgatgaatatgatgaattgaaacggttgttgcgagctatagggctacccgatggttacaaaagtgataaagggtatgcagcctgcttcactttgttctgctctgagtggtaccgaagggattacgagcgagattgtggatggacgtgggaacctatttataaaactcttggtatattgctaccttcttctgaaatggggaatataatccctaaaggtctggatgggtactggggacgcccagtgcggttctatgatactgaaaggcggaattttttagggtccttattcagtgaaggcggtttacctttcaggttgctgaaggaatctgatagccgttttcagtcaatgttttctctcattttaaaccaatacgatcaggctaaatcctctaacatttccacgtacgcgttggttcatgcagcggtagaaaaatcatccctgccagtcgttttcaaagaggatacttcagttgagcttattagtcgaatggctgaacagttagtatctcttgttcaaatttatgatttgagtaatcataccgaacccgtaaaagaacttgagcgtgttcatccaaagtggcgggacagtttccctgttcctctagaggatgatacgggtactagtttccttaatggacttttacgaacagcttctactgaatcaaaacctcgccttcaaaagaataaaaccactctctgtcagtttttatggtcagaaaataaccctgaagccgtccaggctctcatttctctgcctgaggagctgagcttttcaattgatagtgagccttcaacaacgcgcttcgagcttgctatctatgaagatggcaacgaaatcgcaagtctgggacctgcttacgccacgttaagtaagtcccaggcaaaaataagagttcgtaagcgcgagattaaattttgccgaagaaatcccgcagtaagtttgtttattgtggcgagagctgggggaatgtttgtcggctccaatcttttagaaggtagtgaagttgccgttggcgatgttccattggtttttgtttctgataaaagtgaatggctgttacagggacaagcctcttgcagcgtgcgtggcagtcatgtgcttatcgtactaccaaaggatggttgtctggcttcggaacatgaggattgcgactctagcttttcggctttgggctgccgtactctgaccatcaaaggtcggcaggatatcattattgaaggcgacgaaacgtaccggataaagacaggaagagagcagattatccagactggattttctttccagggaaagcgattgaattggacaagctacccggatgaagtcttccttggtattcccggaattaccaaaaatcctgagaatctctcaaagtatcattataaacgctttttcaacggtacgtttatagatgattgcgatgtgcaagagagaatgggagcacagtttatttcggtgcgtaacgaaagtaatgaaactttactgcgtaagaaaataggtattctccccaatgattttagcctggaaataaaaaacggagaacaggcaaacgaaggttcggtcattattactactcagcatccttgtttgtatcgtttgaaggaaaaaacacttgaagttggacgggagcggttgcctggtagtacagaaataatgatgaaggcggaggggatacctcctgcatcgatttcattacaaataacgccaaacctcactgcggacccaattgttatttggttaccatttcctgcacgaggctgtcttgcgttcgataaagacgagaagcctctacctaaaaatttaacgattaacgatcttctgggagccagagcataccttttcggaaaaaatggagagcctacgcgataccagcttgaactacgtttacattcccgtagtggaatgcaggcttggtatgagtggcactatagtgcgggagaaagtccggtagagcttacgttatacagcttaagggaacatattgataatttactctcactggaagagggaattgatcaaatagttgatatgcgtatagaaggaggtggtagttcttttacctggcagattcgacgttacaaatatagtctggactatgatcgggaaaggcagattcttttcgcaaactcaataagtaatcgtacaggacagatcccttcgcccgtaattatgttactcagcgaaccggagagaaaacccataccgctgatgtcaagaatgagcgaaggtgtaccggttggggaattcgaattaagttcgacaatacaaaataatggcccatggctggtgttgccaaaacaaggtgaagaagcttcatttcggccatgctacattgctggcgagtcggtgattcaaagcgacacgacaacaatacagtccttgcaaaaagcaacgcagctttttaatccccggtcggatgtaaatacaattacgttagttctggaacaaatggcgaacgaccctgcgcattcaggctggcagtttttacgtaatttatacgatcagtttggatatttacctttggctacctttgaagtatggcgggcgcttgttcagcatccgcaagcgttggcgatgtcgctattcaaatttgaaatgtccattgattatctcagccgtattgaaagcgagtttcctgttttctgggagtttttacctattaaagaagttaaacgtgccgccacacgttttcgtacttttttgactcataaaggtgcgccggaggaaatgcagataaggttgctggacagaatgtatcagcagttgggcacagtattcccgacttatgccagtgaggtgaaattatggttgagtcgagggaaattaccaccggttttttcggagttggtgatgaaaggtattatccaggggtggtatcaggaacttctacgcgaacatggtgaatctcgctggccagaatttggtggtccgagccttttccgttggtatatgtcgcaacaaaatccagttatcggtatttcacctgattccagttaccgatattccgtcaccttgctccccgtatttgctgctgctgttgcaagcggaaaaacaacatttggcagtgtttttgaaaataagcccggtgccgtattttttttgaggcaggttagagatttcgactcgcgatggtttaacgccattttccagtactgcttattgtgtaatgttaccgaaaaataa

SEQ ID NO: 29982 - DNA, 6321 bp, Salmonella enterica; identical to SEQ ID NO: 29980

SEQ ID NO: 29983 - DNA, 3300 bp, Salmonella enterica; identical to SEQ ID NO: 29981

SEQ ID NO: 29984 - DNA, 6321 bp, Salmonella enterica subsp. enterica
atgactacacgctatttttcttcgctgattgaacaatcactgtcgcgttctacggaggcgacgctgagtattatgggggtgaccaacccgaatcttcgcgagcatctcacgcaacaaatggcggccgattgcgggaaagaaggatcgtttcttgcctcacccgtatttgaacagacatttggctggaaagagtccaacagcacaatgaaagaccttgcaacaaaacaaacgttgctaagcaaggaggtggtggactcgctggatagtgaggaaaatggtcgttatcgttttggctctgactggaaacctttcacgcatcagttagccagctggcaatcattacttgagaaaaaacattcggtcgtggtgaccagcgggacaggctctggcaaaacggaatgctttatggttccggtgctggaagacctctatcgtgagcttcaggttaagaacaaaaaaccgttgataggtgtgagagcactttttctttacccactgaatgccctgattaattcccagcgcgagcgtttagatgcgtggacccggagttttggttccggaattcggtactgtctgtataacggtaacacggaagaattgcatgctttggtcaaaagtgagcaggcaaacaggcctaatgaggttttgtcacgagagaagatgcgtgaagagcccgctcccattttagtgaccaacggtaccatgctggaatacatgatggttcgtcaggttgatgcgccgattattcagaaatcaaaagcggaaaaatcattacgctggatagttctggatgaagcccatacctacgttggttctcaggccgctgagttggctctacagctccgtcgcgtcatgacggcatttggcgtcacgcctgatgatgttcgctttgtggcgacgtcggccaccatggccggaagtgatgctgaaaagcagctgaaaaaattcttgtctgagctgtcaggagtgccacaggaacgtattgatgttctggggggaagccgcgttattcctgagctcgaaccctgcaaacaatattctctgtcactggatgagattgagcatatccctgattcggagagtgaagggatcagcccggagcgttatagtgcgttgacccactctccggaagcgcgctgtttacgcgaaatgctggttagccaaccccgaccaatgaaacttgatacgctgacccagcgtttgaacgaactgaccaaacatcagtacacgcagcaggatgttttacgctggatcgatctttgctctggcacactccctaatgcaaaggatcctgcatttctgaaagtcagagcacatattttccagcgaaacacccagggcatctgggcctgtgtggataagaactgtgcagctaaaaaaaataccgcgctggaaaaaaactggtcttttggcaatgtgtatgtaaatcagcggcaaaactgcgagtgcggcagtcccgtttttgaactggcattctgcaatgagtgtaatgaaccgcatcttcttgcacgggataaaaaaggcaaactcgtacagtgggataataaaggtggagatgaattctccctgcaggatgaaatttctgacgattttgaaacatccggagaaaaggttcagaaggattttgtattccagtcgccacaaattattgctgcggaatgtaatacggaagctggctatattatgcagcggctcgatcgtcagacccgcagtatcggcgtggtgaacccggacagtattccgctggcaattaatgatatcgaacaaatctgtagtgccagcaattgtggctataaaggcggaaagggtaaacagcccttccgacgggcgttactgggcgggcctttttatgtcaccaatattgtgcctacggtgctggagtattgccaggacttcactagcgatgaaggtaaagatggcgtcggcccgctctctttgcctggtcgaggtcgtcgcctgattacctttaccgacagtcgtcaggggacggcgcgaatggcagtacgtatgcagcaggaagcagagcgcagccgattacgtggtagcgtagtagaaattcttggctggcaccaacgaaaacaaccaacgagtgctccgaacgaccaggctgacgtgatgaaactggttgcaagggtgacacaataccgtgaagaagcccgggagtatcgcgagtggggaatgcccgaggaagcaaaactttctgaagctcaggccgaacgccttgaacaggcaatccagacggcgacggggggaaaggctgcaaccattttagtttgccgaacctggacggaaatggtcaatgagctgaaagagaaagccgatatacagggaccaattttacaatataaccattatctaaagcctgaaattttcaccgaaaatggtggccctttgaaactcgccgaaatgctgcttttccgtgagtttatgcgacgcccgaaacgaaccaacagcctggaaacccaggggctggttcaggttggctatcaggggctggagaaggcgcacagtgttcctgctcactggcaggctaaaggcttaacccttgatgactggcgcgattttctgaaggtgacgctggatttctatgtcagagaaagtaactacatccaactggatgacgatctaagaaactggatcggtagccgtttctcttccaaatttgtccgcaacccggattcgaaagagccagatgacaaccaggttaaacgctggccgcaaattcgccacggtaatgtgactcagcgcctggtcaaactgttgattttaggagccaaatttaacaccgtaaatacggtaactattgatattgttaacgcctggctgaaagaagcctggctccagctaacaggatctctggcggtattgaagcctgatggaaaccgtttttatttaccgaaagagcatctaacattctctctggttcaaaaagcacgcatttgtccagtgaccaataaattactggcgacaaccttcaaaggtttgaccccctatttgcccatgcatatccagttcgagcgactgacgagtgcacagtacgacgcgtttttggctcaggaagtcacgctgccagcgatctgggaacacgatcgctctcaggatgattatgtcgacgggttaacaaaagtgcgtgactgggtaagcctggatccgcaagtgctatcattacgctcgcaaaacctctggacggacattaacgatcgcgtggtagaaggtggattttactaccgcaccgcagaacactcggcacagcaatcgtcggagcgcctgcaaagctacgaaagaatgtttaaaaacgggcagcttaacgtccttaactgctcaaccacaatggaaatgggtgtggatattggcggtatttctgcagtggtgatgaacaacgttcctccgcatccggccaactatttacagcgagccgggcgtgccgggcgtagtaaagagtcacgcgctatttcgtacaccttgtgcaaagggaacccgcacgatcagcaggtttttgctaatcccctctggccatttgagacggtgatcccggctccaatggtggcaatgaactcagagcgtctggtgcagcgtcacgtcaattccctgctgctgtcagaatatttatgccatgtggtcggggaaaccgaaaaagagcgtaccagccttaatagccagtggttctttggcgaagagctcgaccagtcggtatgcaatcgttttaaagcctggctcgaacgtccgacgctgagcattgataacgcgctggagcgtctggttaaagggactgcattgcacggcgttactgcagaaaaactgcgtgataaaacgcaggaggctattgccgtcttacagacacgctggctggggatcttccgcgatctcgtgaaacaggaaagtgaatcgcagcccaatacgccgtaccgcaggcgactggagctggagaaaaaacggcattgtggtgaatacctgttacgcgatctggcggcccgaactttcctgcccggatatggcttcccaacggatgttgtcacttttgataacttcaccatggaagattatatccgcgagaaaacgcacaaaggccgtgataagaacgaccgggaggataacgtttctcgttataaggggctgccttcgcgcaatctttccgttgcgatccgtgaatatgcgccgggtgcagagattatccttgatggtcgggtattccgctcggccggcgtttcgctgcactggcataaccttaacgccgatactaacgaagcccagcgtctggacagcgcctggcgttgccacaaatgcggtaccttaggttatgaggaaggtattggtggcccgggggatttattctgtaccaatagcgcgtgcggggagcggatcacgctggataaccgacgtcaggtattacagcccgccggttttgtcaccgatgcccatactcccgttacgaacaacattgaaacaatgaaattcatcccggtggtgcctgcctgggtatttgtgaaggcagaacgcgtgccactgccaaacccgctgatgggctttatggcttcaggcgcggatggccatgttttccagcagagcatgggcgaaggtgggcacggttatgcgctgtgcctgagctgcggccgggcggagtcaatgctcagtgctaccgatgcgccgaaatcgatggaagcgcattatcctccgcgccccggtaaatctgatcgcgacagccagaatcagcggattatctgccctggatccacagcactgaataagaatgtcacgctgggtgcgctggcccgcaccgatgtgtttgagctcattttgcgccgtccgcaaaacggggagtatatccccgataattctgatgaaggccgtattgtggctatgacgctggtggttgcgctacgtcgggcgctggccagcgtgctgggggtatcggcggcagaattgggctatgcggtgcgtccggtcaggctagagaatgagcaatcggtcctggcggtgcaactttacgacattatcagcggcggtgcggggtttgcttccagtgcgccattgcatattgaagcagtcctcaaagggatggtgaaacagctgggatgccgccactgtgataccgcctgtagcgaatgtctgctcgattcgcagacccgccacgatcacgatcagctggatcgtaaagccgcgcaggcctggctgggggaggatttcagtcactatatcggtttgccggaggcggaaaaattctccctggccgacgcgcagtattgcccaggcagcattgaggatgctatccgtcgtgccattaacgacggggcgcgcaaactcacgttgtggatgaatgggccgcttaacgagtgggatttgtatgcccgccagttccgagcggcgatccagaactatcggctgaaagatgaggttgaggttacgctggttgtgcccggtcatattgaagatccggagcttttacaggagattgcgcagtttgccgccattggtgtgcagctttgccagtctgagctgaatacggatacgccggttgtcgcacaggtagcattcaacgatcgcctgatgacgttgatttctcgcagcccagaggccaccatccccggcccgaactggcatctgaatagccagatggttattcgtagccatgcgtttgagccgataacgcttagtaaagctgagctattatccgatgccgcaggtaacagaggcctggtcaacgatattgagatccataagcagcttaatggcccggtttctcagtttggtcagcgtttctggggcgtgttaaccggggcacaggaagatattcagacgctgctgaaggaaaaccaggtgacgcgcattcactacagcgatcgttatctgcaaaacccggtggcgctggcgttattaggcgggctgttaaaaccgctgaaatcgatcctggcgcaggatgcgcaagtgacgattgatacgctgtttaagagtaaagagcggccaggcaacaagccgttccatgactggatgagtgaagcggattttcaggattttgccgaccagtggtttgcggcatctatgggcagagccgtcgtggttaacacctttggctcgccgcgtgatattccacaccatcgtaaactgatggtgaccttcagtaatggtcaggcgctgaagatccgttttgaccaagggatgggatactggcgcatcgtctttgcgcgagcgtatcgcgattttgattttaacgatgatgtggctttccagctcgggaatatggcaaaagcctgcgttgaaggtcaggtggtcaacagcgaggaaagttgggcaaccgatgtgctggtgcaggtgatagtcccttaa

SEQ ID NO: 29985 - DNA, 3300 bp, Salmonella enterica subsp. enterica
ttgagtcagtccgaatacacatccattctaaagtgtaccccatggctagctaaattcctcacccgcagaggattgaagcaaccagaccatcgtccgttatatgaataccacgcaacgagtgaagaatatgatgaattgaaatggctgctgcgatctataggggtacccgatggttataaaagtgataaagggtacgcagcctgtttcacattgttctgctcagagtggtatcgaagagattatgaaagggagtatggatgggcatgggagccaatttacaagacgataggtatctcagcatcttcctcggagatggggaaaattatccctaaaggcctggatggttactgggggcgtccagtgcggttttatgacacagaaaggcggaatttcttaggttccttattcagtgaaggcggcctacctttcaggttgctaaaggaatctaatagccgttttcagtcgatgttttctctcattctaaatcaatacgatcaggctaaatattctaacatttccacgttcgcgttagtccatgcagcggtagaaaaatcatccctgccagtcgttttcaaagaggatacttcagttgagcttattagtcggatggctgaacagttagtatctcttgttcaaatttatgatttgagtaatcataccgaacccgtaaaagaacttgaacgtgttcatcctaagtggcgtgacagtttccctgttcctctcgatgatgatacgggtaccagtttccttaatggacttttacgaacagcttctactgaatcaaaaccccgccttcaaaagaataaaaccactctctgtcagtttttatggtcagaaaatcatcctgaagccgttcaggccctcatttctctgcctgaagagctgagtttttcaattgatattgagccttcaacaacgcgcttcgagcttgctatctatgaagatggtaacgaaatcgcaagtctgggacctgcctatgcaacgctaagtaactcccaggcaaaaataaaagttcgtaagcgcgagattaaattttaccgaagaaatcctacggtcagtttgtttattgtggcgagagctgggggtatgtttgtcggctccaatcttttagaaggcagtgaagttgcggttggcgatgttccattggtttttgtttctgataaaaatgaatggctgttacagggacaagcctcttgcagcgtacgtggcagccatgtacttattgtgctgccaaaggatggttgtctggcttcagaacatgaggattgtgactctggcttttcggctttgggatgccgtgctctgaccatcaaaggtcgccaggatatcattattgaaggcgacgaaacgtaccgcataaagactggaagggatcagattatccatgctggattctctttccaggggaagcggttaaattggacaagttacccggatgaactcttcctcggtgttcctgggattactcaacattctgagaatctatcaacgcaccattacaagcgttttttcaacggaacatttatagataattgtgatgtacaagaaaaaatgggagcacagtttatttcggtgcgtaacgaaaataatgaaacgttactgcgtaagaaaattggcattctccccaatgattttagtctggaaataaaaaatggacaacaggcgaacgaaggctctgtcattattactactcagcacccttgtttgtatagcttgaaggaaaaaacacttgaagttggacggaagcggttgcccggtagtacagaaataatgatgaaggcggagggcattcctcctgcatcaatttcattacaaataacaccaaacctcactgcaaacccgattgttatttggttaccatttcctgcacgaggctgtcttgcgttcgataaagatgagaagcctctcccgaaaaatttaacgattaacgatcttctgggtgccagagcatatcttttcggaaaaaatggtgagcctacgcgataccagcttgaactacgtttacgttcgcgtagtggaatgcaggcctggtatgagtggcactacagtgcgggagaatgtccggtagagcttactttatatagcttaagggaacatattgataatttactctccctggaggaaggaattgatcaaacagttgatatgcgcataaaaggaggtggtagttcttttacctggcagatccgacgttataaatatagtctggactatgatcgtggcaggcagattcttctcgcaaactcaataagtaatcgtacaggccagatcccttcgcccgtcattatgttactcagcgaaccggagagaaaagttgtaccgctgacgtcaagaatgagcgaaggtgtaccagttggtgaatttgaactaagttcgataatacaaaagaatggcccatggctggtgctgccgaaaccaggtgaagaagcctcatttcgaccttgctttattgcaggtgagccggtaattcaaaacaacgcgacagcaatacagtctttacaaaaagcaacgcagctttttaatcctcgttcagatgtcaataccattatgttagttctggaacaaatggcgagcgacccggcacactcgggctggcagttcttacgcaatttatacgatcagttcgggtatttacctttggctacctttgaagtatggcgggcacttgttcagcatccacaagcgttggcgatgtcgctgttcaaatttgaaatgtccattgattatctcagccgtattgaaagtgagtttcccgttttctgggagtttttacccattacagaagttaaacgttccgccacacgttttcgtgcttttttggctcataaaggtgcaccggaggaaatgcagataaggttgctggacagaatgtatcagcagctgggcacaacattcccgacttatgccagtgaggtgcaattatggttgagtcaagggaaattaccaccggtttttcctgagttgacgatgaaaggtattatccttgagtggtatcaggaacttctacgcgaacatggtgaatctcgctggccagaatttggtggcccgggccttttacgttggtatatgtcacaacaaaatcctgttatcgatatttcccctgatgccagctaccgctattccgtcaccttgctccccgtatttgctgctgctgttgccagcggtaaaacaacatttgacagtgtttttgagaataagcccggcgccgtattttttttgagacaggttagagactttgactcgcgatggtttaacgccattttccagtactgtctattgcgtaatgttactgaaaaataa

SEQ ID NO: 29986 - DNA, 6321 bp, Salmonella enterica subsp. enterica
atgactacacgctatttttcttcgctgattgaacaatcactgtcgcgttctacggaggcgacgctgagtattatgggggtgaccaacccgaatcttcgcgagcatctcacgcaacaaatggcggccgattgcgggaaagaaggatcgtttcttgcctcacccgtatttgaacagacatttggctggaaagagtccaacagcacaatgaaagaccttgcaacaaaacaaacgttgctaagcaaggaggtggtggactcgctggatagtgaggaaaatggtcgttatcgttttggctctgactggaaacctttcacgcatcagttagccagctggcaatcattacttgagaaaaaacattcggtcgtggtgaccagcgggacaggctctggcaaaacggaatgctttatggttccggtgctggaagacctctatcgtgagcttcaggttaagaacaaaaaaccgttgataggtgtgagagcactttttctttacccactgaatgccctgattaattcccagcgcgagcgtttagatgcgtggacccggagttttggttccggaattcggtactgtctgtataacggtaacacggaagaattgcatgctttggtcaaaagtgagcaggcaaacaggcctaatgaggttttgtcacgagagaagatgcgtgaagagcccgctcccattttagtgaccaacggtaccatgctggaatacatgatggttcgtcaggttgatgcgccgattattcagaaatcaaaagcggaaaaatcattacgctggatagttctggatgaagcccatacctacgttggttctcaggccgctgagttggctctacagctccgtcgcgtcatgacggcatttggcgtcacgcctgatgatgttcgctttgtggcgacgtcggccaccatggccggaagtgatgctgaaaagcagctgaaaaaattcttgtctgagctgtcaggagtgccacaggaacgtattgatgttctggggggaagccgcgttattcctgagctcgaaccctgcaaacaatattctctgtcactggatgagattgagcatatccctgattcggagagtgaagggatcagcccggagcgttatagtgcgttgacccactctccggaagcgcgctgtttacgcgaaatgctggttagccaaccccgaccaatgaaacttgatacgctgacccagcgtttgaacgaactgaccaaacatcagtacacgcagcaggatgttttacgctggatcgatctttgctctggcacactccctaatgcaaaggatcctgcatttctgaaagtcagagcacatattttccagcgaaacacccagggcatctgggcctgtgtggataagaactgtgcagctaaaaaaaataccgcgctggaaaaaaactggtcttttggcaatgtgtatgtaaatcagcggcaaaactgcgagtgcggcagtcccgtttttgaactggcattctgcaatgagtgtaatgaaccgcatcttcttgcacgggataaaaaaggcaaactcgtacagtgggataataaaggtggagatgaattctccctgcaggatgaaatttctgacgattttgaaacatccggagaaaaggttcagaaggattttgtattccagtcgccacaaattattgctgcggaatgtaatacggaagctggctatattatgcagcggctcgatcgtcagacccgcagtatcggcgtggtgaacccggacagtattccgctggcaattaatgatatcgaacaaatctgtagtgccagcaattgtggctataaaggcggaaagggtaaacagcccttccgacgggcgttactgggcgggcctttttatgtcaccaatattgtgcctacggtgctggagtattgccaggacttcactagcgatgaaggtaaagatggcgtcggcccgctctctttgcctggtcgaggtcgtcgcctgattacctttaccgacagtcgtcaggggacggcgcgaatggcagtacgtatgcagcaggaagcagagcgcagccgattacgtggtagcgtagtagaaattcttggctggcaccaacgaaaacaaccaacgagtgctccgaacgaccaggctgacgtgatgaaactggttgcaagggtgacacaataccgtgaagaagcccgggagtatcgcgagtggggaatgcccgaggaagcaaaactttctgaagctcaggccgaacgccttgaacaggcaatccagacggcgacggggggaaaggctgcaaccattttagtttgccgaacctggacggaaatggtcaatgagctgaaagagaaagccgatatacagggaccaattttacaatataaccattatctaaagcctgaaattttcaccgaaaatggtggccctttgaaactcgccgaaatgctgcttttccgtgagtttatgcgacgcccgaaacgaaccaacagcctggaaacccaggggctggttcaggttggctatcaggggctggagaaggcgcacagtgttcctgctcactggcaggctaaaggcttaacccttgatgactggcgcgattttctgaaggtgacgctggatttctatgtcagagaaagtaactacatccaactggatgacgatctaagaaactggatcggtagccgtttctcttccaaatttgtccgcaacccggattcgaaagagccagatgacaaccaggttaaacgctggccgcaaattcgccacggtaatgtgactcagcgcctagtcaaactgttgattttaggagccaaatttaacaccgtaaatacggtaactattgatattgttaacgcctggctgaaagaagcctggctccagctaacaggatctctggcggtattgaagcctgatggaaaccgtttttatttaccgaaagagcatctaacattctctctggttcaaaaagcacgcatttgtccagtgaccaataaattactggcgacaaccttcaaaggtttgaccccctatttgcccatgcatatccagttcgagcgactgacgagtgcacagtacgacgcgtttttggctcaggaagtcacgctgccagcgatctgggaacacgatcgctctcaggatgattatgtcgacgggttaacaaaagtgcgtgactgggtaagcctggatccgcaagtgctatcattacgctcgcaaaacctctggacggacattaacgatcgcgtggtagaaggtggattttactaccgcaccgcagaacactcggcacagcaatcgtcggagcgcctgcaaagctacgaaagaatgtttaaaaacgggcagcttaacgtccttaactgctcaaccacaatggaaatgggtgtggatattggcggtatttctgcagtggtgatgaacaacgttcctccgcatccggccaactatttacagcgagccgggcgtgccgggcgtagtaaagagtcacgcgctatttcgtacaccttgtgcaaagggaacccgcacgatcagcaggtttttgctaatcccctctggccatttgagacggtgatcccggctccaatggtggcaatgaactcagagcgtctggtgcagcgtcacgtcaattccctgctgctgtcagaatatttatgccatgtggtcggggaaaccgaaaaagagcgtaccagccttaatagccagtggttctttggcgaagagctcgaccagtcggtatgcaatcgttttaaagcctggctcgaacgtccgacgctgagcattgataacgcgctggagcgtctggttaaagggactgcattgcacggcgttactgcagaaaaactgcgtgataaaacgcaggaggctattgccgtcttacagacacgctggctggggatcttccgcgatctcgtgaaacaggaaagtgaatcgcagcccaatacgccgtaccgcaggcgactggagctggagaaaaaacggcattgtggtgaatacctgttacgcgatctggcggcccgaactttcctgcccggatatggcttcccaacggatgttgtcacttttgataacttcaccatggaagattatatccgcgagaaaacgcacaaaggccgtgataagaacgaccgggaggataacgtttctcgttataaggggctgccttcgcgcaatctttccgttgcgatccgtgaatatgcgccgggtgcagagattatccttgatggtcgggtattccgctcggccggtgtttcgctgcactggcataaccttaacgccgatactaacgaagcccagcgtctggacagcgcctggcgttgccacaaatgcggtaccttaggctatgaggaaggtattggtggcccgggggatttattctgtaccaatagcgcgtgcggggagcggatcacgctggataaccgacgtcaggtattacagcccgccggttttgtcaccgatgcccatactcccgttacgaacaacattgaaacaatgaaattcatcccggtggtgcctgcctgggtatttgtgaaggcagaacgcgtgccactgccaaacccgctgatgggctttatggcttcaggcgcggatggccatgttttccagcagagcatgggcgaaggtgggcacggttatgcgctgtgcctgagctgcggccgggcggagtcaatgctcagtgctaccgatgcgccgaaatcgatggaagcgcattatcctccgcgccccggtaaatctgatcgcgacagccagaatcagcggattatctgccctggatccacagcactgaataagaatgtcacgctgggtgcgctggcccgcaccgatgtgtttgagctcattttgcgccgtccgcaaaacggggagtatatccccgataattctgatgaaggccgtattgtggctatgacgctggtggttgcgctacgtcgggcgctggccagcgtgctgggggtatcggcggcagaattgggctatgcggtgcgtccggtcaggctagagaatgagcaatcggtcctggcggtgcaactttacgacattatcagcggcggtgcggggtttgcttccagtgcgccattgcatattgaagcagtcctcaaagggatggtgaaacagctgggatgccgccactgtgataccgcctgtagcgaatgtctgctcgattcgcagacccgccacgatcacgatcagctggatcgtaaagccgcgcaggcctggctgggggaggatttcagtcactatatcggtttgccggaggcggaaaaattctccctggccgacgcgcagtattgcccaggcagcattgaggatgctatccgtcgtgccattaacgacggggcgcgcaaactcacgttgtggatgaatgggccgcttaacgagtgggatttgtatgcccgccagttccgaacggcgatccagaactatcggctgaaagatgaggttgaggttacgctggttgtgcccggtcatattgaagatccggagcttttacaggagattgcgcagtttgccgctattggcgtacagctttgccagtctgagctgaatacggatacgccggttgtcgcacaggtggcattcaacgatcgcctgatgacgttgatttctcgcagcccagaggccaccatccccggcccgaactggcatctgaatagccagatggttattcgtagccatgcgtttgagccgataacgcttagtaaagctgagctattatccgatgccgcaggtagcagaggcctggtcaacgatattgagatccataagcagcttaatggcccggtttctcagtttggtcagcgtttctggggcgtgttaaccggggcgcaggaagatattcagacgctgctgaaggaaaaccaggtgacgcgcattcactatagcgatcgttatctgcaaaacccggtggcgctggcgttgttaggcgggctgttaaaaccgctgaaatcgatcctggcgcaggatgcgcaagtgacgattgatacgctgtttaagagtaaagagcggccaggcaacaagccgttccatgactggatgagtgaagcggattttcaggattttgccgaccagtggtttgcggcatctatgggcagagccgtcgtggttaacgcctttggctcgccgcgtgatattccacaccatcgcaaactgatggtgaccttcagtaatggtcaggcgctgaagatccggtttgatcaggggatgggatactggcgcatcgtctttgcgcgagcgtatcgcgattttgattttaacgataatgtggctttccagctcgggaatatggccaaagcctgcgtggaaggtcaggtggtcaacagcgaggaaagctgggcaaccgatgtgctggtgcaggtgatcgttccttaa

SEQ ID NO: 29987 - DNA, 3300 bp, Salmonella enterica subsp. enterica
ttgagtcagtccgaatacacatccattctaaagtgtaccccatggctagctaaattcctcacccgcagaggattgaagcaaccagaccatcgtccgttatatgaataccacgcaacgagtgaagaatatgatgaattgaaatggctgctgcgatctataggggtacccgatggttataaaagtgataaagggtacgcagcctgtttcacattgttctgctcagagtggtatcgaagagattatgaaagggagtatggatgggcatgggagccaatttacaagacgataggtatctcagcatcttcctcggagatggggaaaattatccctaaaggcctggatggttactgggggcgtccagtgcggttttatgacacagaaaggcggaatttcttaggttccttattcagtgaaggcggcctacctttcaggttgctaaaggaatctaatagccgttttcagtcgatgttttctctcattctaaatcaatacgatcaggctaaatattctaacatttccacgttcgcgttagtccatgcagcggtagaaaaatcatccctgccagtcgttttcaaagaggatacttcagttgagcttattagtcggatggctgaacagttagtatctcttgttcaaatttatgatttgagtaatcataccgaacccgtaaaagaacttgaacgtgttcatcctaagtggcgtgacagtttccctgttcctctcgatgatgatacgggtaccagtttccttaatggacttttacgaacagcttctactgaatcaaaaccccgccttcaaaagaataaaaccactctctgtcagtttttatggtcagaaaatcatcctgaagccgtccaggccctcatttctctgcctgaagagctgagtttttcaattgatattgagccttcaacaacgcgcttcgagcttgctatctatgaagatggtaacgaaatcgcaagtctgggacctgcctatgcaacgctaagtaactcccaggcaaaaataaaagttcgtaagcgcgagattaaattttaccgaagaaatcctacggtcagtttgtttattgtggcgagagctgggggtatgtttgtcggctccaatcttttagaaggcagtgaagttgcggttggcgatgttccattggtttttgtttctgataaaaatgaatggctgttacagggacaagcctcttgcagcgtacgtggcagccatgtacttattgtgctgccaaaggatggttgtctggcttcagaacatgaggattgtgactctggcttttcggctttgggatgccgtgctctgaccatcaaaggtcgccaggatatcattattgaaggcgacgaaacgtaccgcataaagactggaagggatcagattatccatgctggattctctttccaggggaagcggttaaattggacaagttacccggatgaactcttcctcggtgttcctgggattactcaacattctgagaatctatcaacgcaccattacaagcgttttttcaacggaacatttatagataattgtgatgtacaagaaaaaatgggagcacagtttatttcggtgcgtaacgaaaataatgaaacgttactgcgtaagaaaattggcattctccccaatgattttagtctggaaataaaaaatggacaacaggcgaacgaaggctctgtcattattactactcagcacccttgtttgtatagcttgaaggaaaaaacacttgaagttggacggaagcggttgcccggtagtacagaaataatgatgaaggcggagggcattcctcctgcatcaatttcattacaaataacaccaaacctcactgcaaacccgattgttatttggttaccatttcctgcacgaggctgtcttgcgttcgataaagatgagaagcctctcccgaaaaatttaacgattaacgatcttctgggtgccagagcatatcttttcggaaaaaatggtgagcctacgcgataccagcttgaactacgtttacgttcgcgtagtggaatgcaggcctggtatgagtggcactacagtgcgggagaatgtccggtagagcttactttatatagcttaagggaacatattgataatttactctccctagaggaaggaattgatcaaacagttgatatgcgcataaaaggaggtggtagttcttttacctggcagatccgacgttataaatatagtctggactatgatcgtggcaggcagattcttctcgcaaactcaataagtaatcgtacaggccagatcccttcgcccgtcattatgttactcagcgaaccggagagaaaagttgtaccgctgacgtcaagaatgagcgaaggtgtaccagttggtgaatttgaactaagttcgataatacaaaagaatggcccatggctggtgctgccgaaaccaggtgaagaagcctcatttcgaccttgctttattgcaggtgagccggtaattcaaagcaacgcgacagcaatacagtctttacaaaaagcaacgcagctttttaatcctcgttcagatgtcaataccattatgttagttctggaacaaatggcgagcgacccggcacactcgggctggcagttcttacgcaatttatacgatcagttcgggtatttacctttggctacctttgaagtatggcgggcacttgttcagcatccacaagcgttggcgatgtcgctgttcaaatttgaaatgtccattgattatctcagccgtattgaaagtgagtttcccgttttctgggagtttttacccattacagaagttaaacgttccgccacacgttttcgtgcttttttggctcataaaggtgcaccggaggaaatgcagataaggttgctggacagaatgtatcagcagctgggcacaacattcccgacttatgccagtgaggtgcaattatggttgagtcaagggaaattaccaccggtttttcctgagttgacgatgaaaggtattatccttgagtggtatcaggaacttctacgcgaacatggtgaatctcgctggccagaatttggtggcccgggccttttacgttggtatatgtcacaacaaaatcctgttatcgatatttcccctgatgccagctaccgctattccgtcaccttgctccccgtatttgctgctgctgttgccagcggtaaaacaacatttgacagtgtttttgagaataagcccggcgccgtattttttttgagacaggttagagactttgactcgcgatggtttaacgccattttccagtactgtctattgcgtaatgttactgaaaaataa

SEQ ID NO: 29988 - DNA, 6321 bp, Salmonella enterica; identical to SEQ ID NO: 29984
  subsp. enterica serovar Havana str. CFSAN001082

SEQ ID NO: 29989 - DNA, 3300 bp, Salmonella enterica; identical to SEQ ID NO: 29985
  subsp. enterica serovar Havana str. CFSAN001082

SEQ ID NO: 29990 - DNA, 6321 bp, Salmonella enterica subsp. enterica serovar Infantis
atgactacacgctatttttcttcgctgattgaacaatcactgtcgcgttctacggaggcgacgctgagtattatgggggtgaccaacccgaatcttcgcgagcatctcacgcaacaaatggcggccgattgcgggaaagaaggatcgtttcttgcctcacccgtatttgaacagacatttggctggaaagagtccaacagcacaatgaaagaccttgcaacaaaacaaacgttgctaagcaaggaggtggtggactcgctggatagtgaggaaaacggtcgttatcgttttggctctgactggaaacctttcacacatcagttagccagctggcaatcattacttgagaaaaaacactcagtcgtggtgaccagcgggacaggctctggcaaaacggaatgctttatggtcccggtgctggaagacctctatcgtgagcttcaggttaagaacaaaaaaccgttgataggtgtgagagcactttttctttacccactgaatgccctgattaattcccagcgcgagcgtttagatgcgtggacccgtagttttggttccggaattcggtactgtctgtataacggtaacacggaagaattgcatgctttggtcaaaagtgagcaggcaaacaggcctaatgaggttttgtcacgagagaagatgcgtgaagagcccgctcccattttagtgaccaacggtaccatgctggaatacatgatggttcgtcaggttgatgcgccgattattcagaaatcaaaagcggaaaaatcattacgctggatagttctggatgaagcccatacctacgttggttctcaggccgctgagttggctctacagctccgtcgcgtcatgacggcatttggcgtcacgcctgatgatgttcgctttgtggcgacgtcggccaccattgccggaagtgatgctgaaaagcagctgaaaaaattcttgtctgagctgtcaggagtgccacaggaacgtattgatgttctggggggaagccgcgttattcctgagctcgaaccctgcaaacaatattctctgtcactggatgagattgagcatatccctgattcggagagtgaagggatcagtccggagcgttatagtgcgttgacccactctccggaagcgcgctgtttacgcgaaatgctggttagccaaccccgaccaatgaaacttgatacgctgacccagcgtttgaacgagctgaccaaacatcagtacacgcagcaggatgttttacgctggatcgatctttgctctggcacattccctaatgcaaaggatcctgcatttctgaaagtcagagcacatattttccaacgaaacacccagggcatctgggcctgtgtggataagaactgttcagctaaaaaaaataccgcgctggaaaaaaactggtcttttggcaatgtgtatgtaaatcagcggcaaaactgcgagtgcggcagtcccgtttttgaactggcattctgcaatgagtgtaatgaaccgcatcttcttgcacgggataaaaaaggcaaactcgtacagtgggataataaaggtggagatgaattctccctgcaggatgaaatttctgacgattttgaaacatccggagaaaaggttcagaaggattttgtattccagtcgccacaaattattgctgcggaatgtaatacggaagctggctatattatgcagcggctcgatcgtcagacccgcagtatcggcgtggtgaacccggacagtattccgctggcaattaatgatatcgaacaaatctgtagtgccagcaattgtggctataaaggcggaaagggtaaacagcccttccgaagggcgttactgggcgggcctttttatgtcaccaatattgtgcctacggtgctggagtattgtcaggacttcactagtgatgaaggtaaagatggcgtcggcccgctctctttgcctggtcgaggtcgtcgcctgattacctttaccgacagtcgtcaggggacggcgcgaatggcagtgcgtatgcagcaggaagcagagcgcagccggttacgtggtagcgtagtagaaattcttggctggcaccaacgaaaacagccaacgagtgctccgaacgaccaggctgacgtgatgaaactggttgcaagggtgacacaataccgtgaagaagcccgggagtatcgcgagtggggaatgcccgaggaagcaaaactttctgaagctcaggccgaacgccttgaacaggcaatccagacggcgacggggggaaaggctgcaaccattttagtttgccgaacctggacggaaatggtcaatgagctgaaagagaaagccgatatacaggggccaattttacaatataaccattatctgaagcctgaaattttcaccgaaaatggcggccctttaaaactcgccgaaatgctgcttttccgtgagtttatgcgacgcccgaaacgaaccaacagcctggaaacgcaggggctggttcaggttggctatctggggctggagaaggcacacagtgttcccgctcactggcaggctaaaggcttaacccttgatgactggcgcgattttctgaaggtgacgctggatttctatgtcagagagagtaactacatccaactggatgacgatctaagaaattggatcggtagccgtttttcttccaaatttgtccgcaacccggattcgaaagagccagatgacaaccaggttaaacgctggccgcaaattcgccacggtaatgtgactcagcgcctggtcaaactgttgattctaggggccaaatttaacaccgtaaatacggtaactatcgatattgttaacgcctggctgaaagaagcctggctccagctaacaggggttctggcggtattgaagcctgatggaaaccgtttttatttaccgaaagagcatctgacattctctctggtgcaaaaagcacgcatttgtccagtgaccaataaattactggcgacaaccttcaaaggtctgacaccctatctgcccatgcatatccagttcgagcgactgacgagtgcacagtacgacgcgtttttggctcaggaagtcacgctgccggcgatctgggaacacgatcgctctcaggatgattatgtcgacgggttaacaaaagtgcgtgactgggtaagccaggatccgcaagtgctaccattacgctcgcaaaacctctggacggacattaacgatcgcgtggtagaaggtggattttactaccgcaccgcagaacactcggcacagcaatcgtcggagcgcctgcaaagctacgaaagaatgtttaaaaacgggcagcttaacgtccttaactgctcaaccacgatggaaatgggtgtggatattggcggtatttctgcggtggtgatgaacaacgttcctccgcatccggccaactatttacagcgagccgggcgtgccgggcgtagtaaagagtcacgcgctatttcgtacaccttgtgcaaagggaacccgcacgatcagcaggtttttgctaatcccctctggccgtttgagacggtgatcccggctccaatggtggcaatgaactcagagcgtctggtgcagcgtcacgtcaattccctgttactgtcagaatatttatgccatgtggtcggggaaaccgaaaaagagcgtaccagccttaatagccagtggttctttggcgaagagctcggccagtcggtatgcaatcgttttaaagcctggctcgaacgtccgacgctgagcattgataacgcgctggagcgtctggttaaagggacggcattgcacggcgttacggcagaaaagctgcgggataaaacgcaggaggctattgccgtcttacagacacgctggctggggatcttccgcgatctcgtgaaacaggaaagtgaatcgcagcccaatacgccgtaccgcaggcgactggagctggagaaaaaacggcattgtggtgaatacctgttacgcgatctggcggccagaactttcctgcccggatatggcttcccaacggatgttgtcacttttgataacttcaccatggaagattatatccgcgagaaaacgcacaaaggccgtgataagaacgaccgggaggataacgtttctcgttataaagggctgccttcgcgcaacctttccgttgcgatccgtgagtatgcgccgggcgcggagattatccttgatggtcgggtattccgctcggccggtgtttcgctgcactggcataaccttaacgccgatactaacgaagcccagcgtctggacagcgcctggcgttgccataaatgcggtaccttaggctatgaggaaggtattggcgggtcgggggatttattctgtaccaatagcgcgtgcggggagcggatcacactggataaccggcgtcaggtattacagcccgccggttttgtcaccgatgcccatactcccgttacgaacaacattgaaacaatgaaattcatcccggtggtgcctgcctgggtatttgtgaaggcagaacgcgtgccactgccaaacccgctgatgggctttatggcttcaggcgcggatggccatgttttccagcagagcatgggcgaaggtgggcacggttatgctctgtgcctgagctgcggccgggcggagtcaatgctcagtgctaccgatgcgccgaaatcgatggaagcgcattatcctccgcgccccggtaaatctgatcgcgacagccagaatcagcggattatctgccctggatccacagcactgaataagaatgtcacgctgggtgcgctggcccgcaccgatgtgtttgagctcattttgcgccgtccgcaaaacggggagtatatccccgataattctgatgaaggccgtattgtggctatgacgctggtggttgcgctacgtcgggcgctggccagcgtgctgggggtatcggcggcagaattgggctatgcggtgcgtccggtcaggctagagaatgagcaatcggtcctggcggtgcaactttacgacattatcagcggcggtgcggggtttgcttccagtgcgccattgcatattgaagcagtcctcaaagggatggtgaaacagctgggatgctgccactgtgataccgcctgtagcgaatgtctgctcgattcgcagacccgccacgatcacgatcagctggatcgtaaagccgcgcaggcctggctgggggaggatttcagtcactatatcggtttgccggaggcggaaaaattctccctggccgacgcgcagtattgcccaggcagcattgaggatgctatccgtcgtgccattaacgacggggcgcgcaaactcacgttgtggatgaatgggccgcttaacgagtgggatttgtatgcccgccagttccgagcggcgatccagaactatcggctgaaagatgaggttgaggttacgctggttgtgcccggtcatattgaagatccggagcttttacaggagattgcgcagtttgccgccattggtgtgcagctttgccagtctgagctgaatacggatacgccggttgtcgcacaggtagcattcaacgatcgcctgatgacgttgatttctcgcagcccagaggccaccatccccggcccgaactggcatctgaatagccagatggttattcgtagccatgcgtttgagccgataacgcttagtaaagctgagctattatccgatgccgcaggtagcagaggcctggtcaacgatattgagatccataagcagcttaatggcccggtttctcagtttggtcagcgtttctggggcgtgttaaccggggcgcaggaagatattcagacgctgctgaaggaaaaccaggtgacgcgcattcactatagcgatcgttatctgcaaaacccggtggcgctggcgttattaggcgggctgttaaaaccgctgaaatcgatcctggcgcaggatgcgcaagtgacgattgatacgctgtttaagagtaaagagcggccaggcaacaagccgttccatgactggatgagtgaagcggattttcaggattttgccgaccagtggtttgcagcatctatgggcagagccgtcgtgattaacacctttggctcgccgcgtgatattccacaccatcgtaaactgatggtgaccttcagtaatggtcaggcgctgaagatccgttttgaccaggggatgggatactggcgcatcgtctttgcgcgagcgtatcgcgattttgattttaacgatgatgtggctttccagctcgggaatatggccaaagcctgcgttgaaggtcaggtggtcaacagcgaggaaagttgggcaaccgatgtgctggtgcaggtgatagtcccttaa

SEQ ID NO: 29991 - DNA, 3300 bp, Salmonella enterica subsp. enterica serovar Infantis
ttgagtcagtccgaatacacatccattctaaagtgtaccccatggctagctaaattcctcacccgcagaggattgaagcaaccagaccatcgtccgttatatgaataccacgcaacgagtgaagaatatgatgaattgaaacggctgctgcgatctataggggtacccgatggttataaaagtgataaagggtacgcagcctgtttcacattgttctgctcagagtggtatcgaagagattatgaaagggagtatggatgggcatgggagccaatttacaagacgataggtatctcagcatcttcctcggaaatggggaaaattatccctaaaggcctggatggttactgggggcgtccagtgcggttttatgatacagaaaggcggaatttcttaggttccttattcagtgaaggcggcctacctttcaggttgctaaaggaatctaatagccgttttcagtcgatgttttctctcattctaaatcaatacgatcaggctaaatcttctaacatttccacgttcgcgttagtccatgcagcggtagaaaaatcatccctgccagtcgttttcaaagaggatacttcagttgagcttattagtcggatggctgaacagttagtatctcttgttcaaatttatgatttgagtaatcataccgagcccgtaaaagaacttgaacgtgttcatcctaagtggcgtgacagtttccctgttcctctcgatgatgatacgggtaccagtttccttaatggacttttacgaacagcttctactgaatcaaaaccccgccttcaaaagaataaaaccactctctgtcagtttttatggtcagaaaatcatcctgaagccgtccaggctctcatttctctgcctgaagagctgagtttttcaattgatattgagccttcaacaacgcgcttcgagcttgctatctatgaagatggtaacgaaatcgcaagtctgggacctgcctatgcaacgctaggtaactcccaggcaaaaataaaagttcgtaagcgcgagattaaattttaccgaagaaatcccacggtcagtttgtttattgtggcgagagctgggggtatgtttgtcggctccaatcttttagaaggcagtgaagttgcggttggcgatgttccattggtttttgtttctgataaaaatgaatggctgttacaaggacaagcctcttgcagcgtacgtggcagccatgtacttattgtgctgccaaaggatggttgtctggcttcagaacatgaggattgtgactctggcttttcggctttgggatgccgtgctctgaccatcaaaggtcgccaggatatcattattgaaggcgacgaaacgtaccggataaagactggaagggatcagattatccatgctggattctctttccaggggaagcggttaaattggacaagttacccggatgaactcttcctcggtgttcctgggattactcaacattctgagaatctatcaacgcaccattacaagcgttttttcaacggaacatttatagataattgtgatgtacaagagaagatgggagcacagtttatttcggtgcgtaacgaaaataatgaaacgttactgcgtaagaaaattggcattctccccaatgattttagtttggaaataaaaaatggacaacaggcgaacgaaggatctgtcattattactactcagcacccttgtttgtatagtttgaaggaaaaaacacttgaagttggacggaagcggttgcccggtagtacagaaataatgatgaaggcggagggcattcctcctgcatcagtttcattacaaataacaccaaacctcactgcaaacccgattgttatttggttaccatttcctgcacgaggctgtcttgcgttcgataaagatgagaagcctctcccgaaaaatttaacgattaacgatcttctgggtgccagagcatatcttttcggaaaaaatggtgagcctacgcgataccagcttgaactacgtttacgttcgcgtagtggaatgcaggcctggtatgagtggcactacagtgcgggagaatgtccggtagagcttactttatatagcttaagggaacatattgataatttactctccctggaggaaggaattgatcaaacagttgatatgcgtataaaaggaggcggtagttcttttacctggcagatccgacgttataaatatagtctggactatgatcgtgacaggcagattcttctcgcaaactcaataagtaatcgtacaggccagatcccttcgcctgtcattatgttactcagcgaaccggagagaaaagttgtaccgctgatgtcaagaatgagcgaaggtgtaccagttggtgaatttgaactaagttcgataatacaaaataatggcccatggctggtgctgccgaaaccaggtgaagaggcctcatttcgaccttgctttattgcaggtgagccggtaattcaaagcgacgcgacagcaatacagtctttacaaaaagcaacgcagctttttaatcctcgttcagatgtcaatactattatgttagttctggaacaaatggcgagcgacccggcacactcgggctggcagttcttacgcaatttatacgatcagttcgggtatttacctttggctacctttgaagtatggcgggcacttgttcagcatccacaagcgttggcgatgtcgctgttcaaatttgaaatgtccattgattatctcagccgtattgaaagtgagtttcccgttttctgggagtttttacccattacagaagttaaacgttccgccacacgttttcgtgcttttttgactcataaaggtgcaccggaggaaatgcagataaagttgctgaacagaatgtatcagcagctgggcacaacattcccgacttatgccagtgaggtgcaattatggttgagtcaaggtaaattaccaccggtttttcctgagttgacgatgaaaggtattatccttgagtggtatcaggaacttctacgcgaacatggtgaatctcgctggccagaatttggtggcccgggccttttacgttggtatatgtcgcaacaaaatcctgttatcgatatttcccctgatgccagctaccgctattccgtcaccttgctccccgtatttgctgctgctgttgccagcggtaaaacaacatttgaaagtgtttttgagaataagcccggcgccgtatttttcttgagacaggttagagactttgactcgcgatggtttaacgccattttccagtactgtctattgcgtaatgttactgaaaaataa

SEQ ID NO: 29992 - DNA, 6321 bp, Salmonella enterica subsp. enterica serovar Paratyphi A
atgactacacgctatttttcttcgctgattgaacaatcactgtcgcgttctacggaggcgacgctgagtattatgggggtgaccaacccgaatcttcgcgagcatctcacgcaacaaatggcggccgattgcgggaaagaaggatcgtttcttgcctcccccgtatttgaacagacatttggctggaaagagtccaacagcacaatgaaagaccttgcaacaaaacaaacgttgctaagcaaggaggtggtggactcgctggatagtgaggaaaatggtcgttatcgttttggctctgactggaaacctttcacgcatcagttagccagctggcaatcattacttgagaaaaaacactcagtcgtggtgaccagcgggacaggctctggcaaaacggaatgctttatggtcccggtactggaagacctctatcgtgagcttcaggtcaagaacaaaaaaccgttgataggtgtgagagcactttttctttacccactgaatgccctgattaattcccagcgcgagcgtttagatgcgtggacccgtagttttggttccggaattcggtactgtctgtataacggtaacacagaagaattgcacgctttggtcaaaagtgagcaggcaaacaggcctaatgaggttttgtcacgagagaagatgcgtgaagaacccgcccccattttagtgaccaacggtaccatgctggaatacatgatggttcgtcaggttgatgcaccgattattcagaaatcaaaagctgaaaaatcattacgctggatagttctggatgaagcccatacctacgttggttctcaggccgctgagttggctctacagctccgtcgcgtcatgacggcatttggcgtcacgcctgatgatgttcgctttgtggcgacgtcggccaccattgccggaagtgatgctgaaaagcagctgaaaaaattcttgtctgagctgtcaggagtgccacaggaacgtattgatgttctgggcggaagccgcgttattcctgagctcgaaccctgcaaacaatattctctgtcactggatgagattgagcatatccctgattcggagagtgaagggatcagtccggagcgttatagtgcgttgacccactctccggaagcgcgctgtttacgcgaaatgctggttagccaaccccgaccaatgaaacttgatacgctgacccagcgtttgaacgagctgaccaaacatcagtacacgcagcaggatgttttacgctggatcgatctttgctctggcacactccctaatgcaaaggatcctgcatttctgaaagtcagagcacatattttccagcgaaacacccagggcatctgggcatgtgtggataagaactgtgcagctaaaaaaaataccgcgctggaaaaaaactggtcttttggcaatgtgtatgtaaatcagcggcaaaactgcgagtgcggcagtcccgtttttgaactggcattctgcaatgagtgtaatgaaccgcatcttcttgcacgggataaaaaaggcaaactcgtacagtgggataataaaggtggagatgaattctccctacaggatgaaatttctgacgattttgaaacatccggagaaaagattcagaaggattttgtattccagtcgccacaaattattgctgcggaatgtaatacggaagctggctatattatgcagcggctcgatcgtcagacccgcagtatcggcgtggtgaacccggacagtattccgctggcaattaatgatatcgaacaaatctgtagtgccagcaattgtggctataaaggcggaaagggtaaacagcccttccgaagggcgttactgggcgggcctttttatgtcaccaatattgtgcctacggtgctggagtattgtcaggacttcactagtgatgaaggtaaagatggtgtcggcccgctctctttgcctggtcgaggtcgtcgcctgattacctttaccgacagtcgtcaggggacggcgcgaatggcagtacgtatgcagcaggaagcagagcgcagccgattacgtggtagcgtagtagaaattcttggctggcaccaacgaaaacagccaacgagtgctccgaatgaccaggctgacgtgatgaaactggttgcaagggtgacacaataccgtgaagaagcccgggagtatcgcgagtggggaatgcccgaggaagcaaaactttctgaagctcaggccgaacgccttgaacaggcaatccagacggcgacggggggaaaggctgcaaccattttagtttgccgaacctggacggaaatggtcaatgatctgaaagagaaagccgatatacagggaccaattttacaatataaccattatctgaagcctgaaattttcaccgaaaatggcggccctttgaaactcgccgaaatgctgcttttccgtgagtttatgcgacgcccgaaacgaaccaacagcctggaaacccaggggctggttcaggttggctatcaggggctggagaaggctcacagtgttcctactcactggcaggctaaaggcttaacccttgatgactggcgcgattttctgaaggtggcgctggatttctatgtcagagaaagcaactacatccaactggatgacgatctaagaaactggatcggtagccgtttctcttccaaatttgtccgcaacccagattcgaaagagccagatgacaaccaggttaaacgctggccgcaaattcgccacggtaatgtgactcagcgcctggtcaagctgttgattttaggggccaaatttaacaccgtaaatacggtaactattgatattgttaacgcctggctgaaagaagcctggctccagctaacaggatctctggcggtattgaagcctgatggaaaccgtttttatttaccgaaagagcatctgacattctctctggtgcaaaaagcacgcatttgtccagtgaccaataaattactggcgacaaccttcaaaggtctgaccccctatttgcccatgcatatccagttcgagcgactgacgagtgcacagtacgacgcgtttttggctcaggaagtcacgctgccagcgatctgggaacacgatcgctctcaggatgattatgtcgacgggttaacaaaagtgcgtgactgggtaagccaggatccgcaagtgctaccattacgctcgcaaaacctctggacggacattaacgatcgcgtggtagaaggtggattttactaccgcaccgcagaacactcggcacagcaatcgtcggagcgcctgcaaagctacgaaagaatgtttaaaaacgggcagcttaacgtccttaactgctcaaccacgatggaaatgggtgtggatattggcggtatttctgcagtggtgatgaacaacgttcctccgcatccggccaactatttacagcgagccgggcgtgccgggcgtagtaaagagtcacgcgctatttcgtacaccttgtgcaaagggaacccgcacgatcagcaggtttttgctaatcccctctggccgtttgagacggtgatcccggctccaatggtggcaatgaactcagagcgtctggtgcagcgtcacgtcaattccctgttactgtcagaatacttatgccatgtggtcggtgaaaccgaaaaagagcgtaccagccttaatagccagtggttctttggcgaagagctcgaccagtcggtatgcaatcgttttaaagcctggctcgaacgtccgacgctgagcattgataacgcgctggagcgtctggttaaagggacggcattgcacggcgttacggcagaaaaactgcgggataaaacgcaggaggctattgccgtcttacagacacgctggctggggatcttccgcgatctcgtgaaacaggaaagtgaatcgcagcccaatacgccgtaccgcaggcgactggaactggagaaaaaacggcattgtggtgaatacctgttacgcgatctggcggcccgaactttcctacccggatatggcttcccaacggatgttgtcacttttgataacttcaccatggaagattatatccgcgagaaaacgcacaaaagcagtgataagaatgaccgggaggataacgtttcgcgttataaagggctgccttcgcgcaacctttccgttgcgatccgtgagtatgcgccgggcgcggagattatccttgatggtcgggtattccgctcggccggtgtttcgctgcactggcataaccttaacgccgatactaacgaagcccagcgtctggacagcgcctggcgttgccataaatgcggtactttaggctatgaggaaggtattggtggctcgggggatttattctgtaccaatagcgcgtgcggggagcggatcacgctggataaccgacgtcaggtattacagcccgccggttttgtcaccgatgcccatactcccgttacgaacaacattgaaacaatgaaattcatcccggtggtgcctgcctgggtgtttgtgaaagcagaacgcgtgccactgccaaacccgctgatgggttttatggcgtcaggcgcggatggtcatgttttccagcagagcatgggcgaaggtggacacggttatgcgctgtgcctgagctgcggccgggcggagtcaatgctcaatgccaccgatacgccgaaatcgatggaagcgcattatcctccgcgccccggtaaatctgatcgcgacagccagaatcagcggattatctgccctggctccacggcgctgaataagaatgtcacgctgggtgcgctggcgcgcaccgatgtgtttgaactcattttgcgccgtccgcaaaacggggagtatatccccgataattctgatgaaggccgtattgtggccatgacgctggcggttgcactacgtcgagcgctggccagcgtgctgggggtatcggcgacagaactgggctatgcggtgcgtccggtcagactggataatgagcaatcggtcctggcggtgcagctttacgacattatcagcggcggtgcggggtttgcttccagtgcgccattgcatattgaagcggtcctcaaagggatggtgaaacagctgggatgccgccactgtgataccgcctgtagcgaatgtctgctcgattcgcagacccgccacgatcacgatcagctggatcgtaaagccgcgcaggcctggctgggggaggatttcagtcactatatcggtttgccggaggcggaaaaattctccctggccgacgcgcagtattgcccaggcagcattgaggatgctatccgtcgtgccattaacgacggggcgcgcaaactcacgttgtggatgaatgggccgcttaacgagtgggatttgtatgcccgccagttccgaacggcgatccagaactatcggctgaaagatgaggttgaggttacgctggttgtgcccggtcatattgaagatccggagcttttacaggagattgcgcagtttgccgccattggtgtgcagctttgccagtctgagctgaatacggatacgccggttgtcgcacaggtagcattcaacgatcgcctgatgacgttgatttctcgcagcccagaggccaccatccccggcccgaactggcatctgaatagccagatggttattcgcagccatgcgtttgagccgataacgcttagtaaagcagagctattatccgatgccgcaggtagcagaggcctggtcaacgatattgagatccataagcagcttaatggcccggtttctcagtttggtcagcgtttctggggcgtgttaaccggggcgcaggaagatattcagacgctgctgaaggaaaaccaggtgacgcgcattcactatagcgatcgttatctgcaaaacccggtggcgctggcgttattaggcgggctgttaaaaccgctgaaatcgatcctggcgcaggatgcgcaagtgacgattgatacgctgtttaagagtaaagagcggccaggcaacaagccgttccatgactggatgagtgaagcggattttcaggattttgccgaccagtggtttgcggcatctatgggcagagccgtcgtggttaacaccgttggctcgccgcgtgatattccacaccatcgtaaactgatggtgaccttcagtaatggtcaggcgctgaagatccgttttgaccaagggatgggatactggcgcatcgtctttgcgcgagcgtatcgcgattttgattttaacgatgatgtggctttccagctcgggaatatggcaaaagcctgcgttgaaggtcaggtggtcaacagcgaggaaagttgggcaaccgatgtgctggtgcaggtgatagtcccttaa

SEQ ID NO: 29993 - DNA, 3300 bp, Salmonella enterica subsp. enterica serovar Paratyphi A
ttgagtcagtccgaatacacatccattctaaagtgtaccccatggctagctaaattcctcacccgcagaggattgaagcaaccagaccatcgtccgttatatgaataccacgcaacgagtgaagaatatgatgaattgaaacggctgctgcgagctataggggtacccgatggttataaaagtgataaagggtacgcagcctgtttcacattgttctgctcagagtggtatcgaagagattatgaaagagagtatggatgggcatgggagccaatttacaagacgataggtatctcagcatcttcctcggaaatggggaaaattatccctaaaggcctggatggttactgggggcgtccagtgcggttttatgacacagaaaggcggaatttcttaggctccttattcagtgaaggcggtctacctttcaggttgctaaaggaatctaatagccgttttcagtcgatgttttctctcattctaaatcaatacgatcaggctaaatcttctaacatttccacgttcgcgttagtccatgcagcggtagaaaaatcatccctgccagtcgttttcaaagaggatacttcagttgagcttattagtcggatggctgaacagttagtatctcttgttcaaatttataatttaagtaatcataccgaacccgtaaaagaacttgaacgtgttcatcctaagtggcgtgacagtttccctgtccctctcgatgatgatacgggtaccagtttccttaatggacttttacgaacagcttctactgaatcaaaaccccgccttcaaaagaataaaaccactctctgtcagtttttatggtcagaaaatcatcctgaagccctccaggctctcatttctctgcctgaagaactgagtttttcaattgatattgagccttcaacaacgcgcttcgagcttgctatctatgaagatggtaacgaaatcgcaagtctgggacctgcatatgcaacgctaagtaactcccaggcaaaaataaaagttcgtaagcgcgagattaaattttaccgaagaaatcccacggtcagtttgtttattgtggcgagagctgggggtatgtttttcggctccaatcttttagaaggcagtgaagttgcggttggcgatgttccattggtttttgtttctgataaaaatgaatggctgttacagggacaagcctcttgcagcgtacgtggcagccatgtacttattgtgctgccaaaggatggctgtctggcttcagaacatgaggattgtgactctggcttttcggctttgggatgccatgctctgaccatcaaaggtcgccaggatatcatcattaaaggcgatgaaacgtaccggataaagataggaagagatcagattatccatactggattctctttccaggggaagcgattaaattggacaagttatccggatgaactcttcctcggtgttcctggaattactcaacattctgagaatctatcaacgcgccattacaagcgttttttcaacggaacatttatagaaaattgtgatgtacaagaaaaaatgggagcacagtttatttcggtgcgtaacgaaaatgatgaaacgttactgcgtaagaaaattggcattctccccaatgattttagtctggaaataaaaaatggacaacaggcgaacgaaggttctgtcattattactactcagcacccttgtttgtatagcttgaaggaaaaaacacttgaagttggacggaagcggttgcccggtagtacagaaataatgatgaaggcggagggcattcctcctgcatcaatttcattacaaataacgccaaacctcactgcaaacccgattgttatttggttaccatttcctgcacgaggctgtcttgcgttcgataaagatgagaaacctctcccgaaaaatttaacgattaacgatcttctgggtgccagagcatatcttttcggaaaaaatggtgagcctacgcgataccagcttgaactacgtttacgttcgcgtagtggaatgcaggcctggtatgagtggcactacagtgcgggagaatgtccggtagagcttactttatatagcttaagggaacatattgataatttactctccctggaggaaggaattgatcaaacagttgatatgcgcataaaaggaggtggtagttcttttacctggcagatccgacgttataaatatagtctggactatgatcgtggcaggcagattcttctcgcaaactcaataagtaatcgtacaggccagatcccttcgcccgtcattatgttactcagcgaaccggagagaaaagttgtactgctgacgtcaagaatgagcgaaggtgtaccagttggtgaatttgaactaagttcgataatacaaaagaatggcccatggctggtgctgccgaaaccaggtgaagaagcctcatttcgaccttgctttattgcaggtgagccggtaattcaaagcgacgcgacagcaatacagtctttacaaaaagcaacgcagctttttaatcctcgttcagatgtcaacaccattatgttagttctggaacaaatggcgagcgacccggcacactcgggctggcagttcttacgcaatttatacgatcagttcgggtatttacctttggctacctttgaagtatggcgggcacttgttcagcatccacaagcgttggcgatgtcgctgttcaaatttgaaatgtccattgattatctcagccgtattgaaagtgagtttcccgttttctgggagtttttatccattacaaaagttaaacgttccgccacacgttttcgtgcttttttgactcataaaggtgcaccggaggaaatgcagataaggctgctggacagaatgtatcaacagctgggcacaacattcccgacttatgccagtgaggtgcaattatggttgagtcaagggaaattaccaccggtttttcctgagttgacgatgaaaggtattatccttgagtggtatcaggaacttctacgcgaacatggtgaatctcgctggccagaatttggtggcccaggccttttacgttggtatatgtcgcaacaaaatcctgttatcgatatttcccctgatgccagctaccgctattccgtcaccttgctccccgtatttgctgctgctgttgccagcggtaaaacaacatttgaaagtgtttttgagaataagcccggcgccgtatttttcttgagacaggttagagattttgactcacgatggtttaacgccattttccaatactgtctattgcgtaatgttactgaaaaataa

SEQ ID NO: 29994 - DNA, 6321 bp, Salmonella enterica subsp. enterica serovar Paratyphi A; identical to SEQ ID NO: 29992

SEQ ID NO: 29995 - DNA, 3300 bp, Salmonella enterica subsp. enterica serovar Paratyphi A; identical to SEQ ID NO: 29993

SEQ ID NO: 29996 - DNA, 6321 bp, Salmonella enterica subsp. enterica serovar Paratyphi A; identical to SEQ ID NO: 29992

SEQ ID NO: 29997 - DNA, 3300 bp, Salmonella enterica subsp. enterica serovar Paratyphi A; identical to SEQ ID NO: 29993

SEQ ID NO: 29998 - DNA, 6321 bp, Salmonella enterica subsp. enterica serovar Paratyphi A; identical to SEQ ID NO: 29992

SEQ ID NO: 29999 - DNA, 3300 bp, Salmonella enterica subsp. enterica serovar Paratyphi A; identical to SEQ ID NO: 29993

SEQ ID NO: 30000 - DNA, 6321 bp, Salmonella enterica subsp. enterica serovar Paratyphi A; identical to SEQ ID NO: 29992

SEQ ID NO: 30001 - DNA, 3300 bp, Salmonella enterica subsp. enterica serovar Paratyphi A; identical to SEQ ID NO: 29993

SEQ ID NO: 30002 - DNA, 6321 bp, Salmonella enterica subsp. enterica serovar Paratyphi A; identical to SEQ ID NO: 29992

SEQ ID NO: 30003 - DNA, 3300 bp, Salmonella enterica subsp. enterica serovar Paratyphi A; identical to SEQ ID NO: 29993

SEQ ID NO: 30004 - DNA, 6321 bp, Salmonella enterica subsp. enterica serovar Paratyphi A; identical to SEQ ID NO: 29992

SEQ ID NO: 30005 - DNA, 3300 bp, Salmonella enterica subsp. enterica serovar Paratyphi A; identical to SEQ ID NO: 29993

SEQ ID NO: 30006 - DNA, 6321 bp, Salmonella enterica subsp. enterica serovar Paratyphi A; identical to SEQ ID NO: 29992

SEQ ID NO: 30007 - DNA, 3300 bp, Salmonella enterica subsp. enterica serovar Paratyphi A; identical to SEQ ID NO: 29993

SEQ ID NO: 30008 - DNA, 6321 bp, Salmonella enterica subsp. enterica serovar Paratyphi A; identical to SEQ ID NO: 29992

SEQ ID NO: 30009 - DNA, 3300 bp, Salmonella enterica subsp. enterica serovar Paratyphi A; identical to SEQ ID NO: 29993

SEQ ID NO: 30010 - DNA, 6321 bp, Salmonella enterica subsp. enterica serovar Paratyphi A; identical to SEQ ID NO: 29992

SEQ ID NO: 30011 - DNA, 3300 bp, Salmonella enterica subsp. enterica serovar Paratyphi A; identical to SEQ ID NO: 29993

SEQ ID NO: 30012 - DNA, 6321 bp, Salmonella enterica subsp. enterica serovar Paratyphi A; identical to SEQ ID NO: 29992

SEQ ID NO: 30013 - DNA, 3300 bp, Salmonella enterica subsp. enterica serovar Paratyphi A; identical to SEQ ID NO: 29993

SEQ ID NO: 30014 - DNA, 6321 bp, Salmonella enterica subsp. enterica serovar Paratyphi A; identical to SEQ ID NO: 29992

SEQ ID NO: 30015 - DNA, 3300 bp, Salmonella enterica subsp. enterica serovar Paratyphi A; identical to SEQ ID NO: 29993

SEQ ID NO: 30016 - DNA, 6321 bp, Salmonella enterica subsp. enterica serovar Paratyphi A; identical to SEQ ID NO: 29992

SEQ ID NO: 30017 - DNA, 3300 bp, Salmonella enterica subsp. enterica serovar Paratyphi A; identical to SEQ ID NO: 29993

SEQ ID NO: 30018 - DNA, 6321 bp, Salmonella enterica subsp. enterica serovar Paratyphi A; identical to SEQ ID NO: 29992

SEQ ID NO: 30019 - DNA, 3300 bp, Salmonella enterica subsp. enterica serovar Paratyphi A; identical to SEQ ID NO: 29993

SEQ ID NO: 30020 - DNA, 6321 bp, Salmonella enterica subsp. enterica serovar Paratyphi A; identical to SEQ ID NO: 29992

SEQ ID NO: 30021 - DNA, 3300 bp, Salmonella enterica subsp. enterica serovar Paratyphi A; identical to SEQ ID NO: 29993

SEQ ID NO: 30022 - DNA, 6321 bp, Salmonella enterica subsp. enterica serovar Paratyphi A; identical to SEQ ID NO: 29992

SEQ ID NO: 30023 - DNA, 3300 bp, Salmonella enterica subsp. enterica serovar Paratyphi A; identical to SEQ ID NO: 29993

SEQ ID NO: 30024 - DNA, 6321 bp, Salmonella enterica subsp. enterica serovar Paratyphi A; identical to SEQ ID NO: 29992

SEQ ID NO: 30025 - DNA, 3300 bp, Salmonella enterica subsp. enterica serovar Paratyphi A; identical to SEQ ID NO: 29993

SEQ ID NO: 30026 - DNA, 6321 bp, Salmonella enterica subsp. enterica serovar Paratyphi A; identical to SEQ ID NO: 29992

SEQ ID NO: 30027 - DNA, 3300 bp, Salmonella enterica subsp. enterica serovar Paratyphi A; identical to SEQ ID NO: 29993

SEQ ID NO: 30028 - DNA, 6321 bp, Salmonella enterica subsp. enterica serovar Paratyphi A; identical to SEQ ID NO: 29992

SEQ ID NO: 30029 - DNA, 3300 bp, Salmonella enterica subsp. enterica serovar Paratyphi A; identical to SEQ ID NO: 29993

SEQ ID NO: 30030 - DNA, 6321 bp, Salmonella enterica subsp. enterica serovar Paratyphi A; identical to SEQ ID NO: 29992

SEQ ID NO: 30031 - DNA, 3300 bp, Salmonella enterica subsp. enterica serovar Paratyphi A; identical to SEQ ID NO: 29993

SEQ ID NO: 30032 - DNA, 6321 bp, Salmonella enterica subsp. enterica serovar Paratyphi A; identical to SEQ ID NO: 29992

SEQ ID NO: 30033 - DNA, 3300 bp, Salmonella enterica subsp. enterica serovar Paratyphi A; identical to SEQ ID NO: 29993

SEQ ID NO: 30034 - DNA, 6321 bp, Salmonella enterica subsp. enterica serovar Paratyphi A; identical to SEQ ID NO: 29992

SEQ ID NO: 30035 - DNA, 3300 bp, Salmonella enterica subsp. enterica serovar Paratyphi A; identical to SEQ ID NO: 29993

SEQ ID NO: 30036 - DNA, 6321 bp, Salmonella enterica subsp. enterica serovar Paratyphi A; identical to SEQ ID NO: 29992

SEQ ID NO: 30037 - DNA, 3300 bp, Salmonella enterica subsp. enterica serovar Paratyphi A; identical to SEQ ID NO: 29993

SEQ ID NO: 30038 - DNA, 6321 bp, Salmonella enterica subsp. enterica serovar Paratyphi A; identical to SEQ ID NO: 29992

SEQ ID NO: 30039 - DNA, 3300 bp, Salmonella enterica subsp. enterica serovar Paratyphi A; identical to SEQ ID NO: 29993

SEQ ID NO: 30040 - DNA, 6321 bp, Salmonella enterica subsp. enterica serovar Paratyphi A; identical to SEQ ID NO: 29992

SEQ ID NO: 30041 - DNA, 3300 bp, Salmonella enterica subsp. enterica serovar Paratyphi A; identical to SEQ ID NO: 29993

SEQ ID NO: 30042 - DNA, 6321 bp, Salmonella enterica subsp. enterica serovar Paratyphi A; identical to SEQ ID NO: 29992

SEQ ID NO: 30043 - DNA, 3300 bp, Salmonella enterica subsp. enterica serovar Paratyphi A; identical to SEQ ID NO: 29993

SEQ ID NO: 30044 - DNA, 6321 bp, Salmonella enterica subsp. enterica serovar Paratyphi A; identical to SEQ ID NO: 29992

SEQ ID NO: 30045 - DNA, 3300 bp, Salmonella enterica subsp. enterica serovar Paratyphi A; identical to SEQ ID NO: 29993

SEQ ID NO: 30046 - DNA, 6321 bp, Salmonella enterica subsp. enterica serovar Paratyphi A; identical to SEQ ID NO: 29992

SEQ ID NO: 30047 - DNA, 3300 bp, Salmonella enterica subsp. enterica serovar Paratyphi A; identical to SEQ ID NO: 29993

SEQ ID NO: 30048 - DNA, 6321 bp, Salmonella enterica subsp. enterica serovar Paratyphi A; identical to SEQ ID NO: 29992

SEQ ID NO: 30049 - DNA, 3300 bp, Salmonella enterica subsp. enterica serovar Paratyphi A; identical to SEQ ID NO: 29993

SEQ ID NO: 30050 - DNA, 6321 bp, Salmonella enterica subsp. enterica serovar Paratyphi A; identical to SEQ ID NO: 29992

SEQ ID NO: 30051 - DNA, 3300 bp, Salmonella enterica subsp. enterica serovar Paratyphi A; identical to SEQ ID NO: 29993

SEQ ID NO: 30052 - DNA, 6321 bp, Salmonella enterica subsp. enterica serovar Paratyphi A; identical to SEQ ID NO: 29992

SEQ ID NO: 30053 - DNA, 3300 bp, Salmonella enterica subsp. enterica serovar Paratyphi A; identical to SEQ ID NO: 29993

SEQ ID NO: 30054 - DNA, 6321 bp, Salmonella enterica subsp. enterica serovar Paratyphi A; identical to SEQ ID NO: 29992

SEQ ID NO: 30055 - DNA, 3300 bp, Salmonella enterica subsp. enterica serovar Paratyphi A; identical to SEQ ID NO: 29993

SEQ ID NO: 30056 - DNA, 6321 bp, Salmonella enterica subsp. enterica serovar Paratyphi A; identical to SEQ ID NO: 29992

SEQ ID NO: 30057 - DNA, 3300 bp, Salmonella enterica subsp. enterica serovar Paratyphi A; identical to SEQ ID NO: 29993

SEQ ID NO: 30058 - DNA, 6321 bp, Salmonella enterica subsp. enterica serovar Paratyphi A; identical to SEQ ID NO: 29992

SEQ ID NO: 30059 - DNA, 3300 bp, Salmonella enterica subsp. enterica serovar Paratyphi A; identical to SEQ ID NO: 29993

SEQ ID NO: 30060 - DNA, 6321 bp, Salmonella enterica subsp. enterica serovar Paratyphi A; identical to SEQ ID NO: 29992

SEQ ID NO: 30061 - DNA, 3300 bp, Salmonella enterica subsp. enterica serovar Paratyphi A; identical to SEQ ID NO: 29993

SEQ ID NO: 30062 - DNA, 6321 bp, Salmonella enterica subsp. enterica serovar Paratyphi A; identical to SEQ ID NO: 29992

SEQ ID NO: 30063 - DNA, 3300 bp, Salmonella enterica subsp. enterica serovar Paratyphi A; identical to SEQ ID NO: 29993

SEQ ID NO: 30064 - DNA, 6321 bp, Salmonella enterica subsp. enterica serovar Paratyphi A; identical to SEQ ID NO: 29992

SEQ ID NO: 30065 - DNA, 3300 bp, Salmonella enterica subsp. enterica serovar Paratyphi A; identical to SEQ ID NO: 29993

SEQ ID NO: 30066 - DNA, 6321 bp, Salmonella enterica subsp. enterica serovar Paratyphi A; identical to SEQ ID NO: 29992

SEQ ID NO: 30067 - DNA, 3300 bp, Salmonella enterica subsp. enterica serovar Paratyphi A; identical to SEQ ID NO: 29993

SEQ ID NO: 30068 - DNA, 6321 bp, Salmonella enterica subsp. enterica serovar Paratyphi A; identical to SEQ ID NO: 29992

SEQ ID NO: 30069 - DNA, 3300 bp, Salmonella enterica subsp. enterica serovar Paratyphi A; identical to SEQ ID NO: 29993

SEQ ID NO: 30070 - DNA, 6321 bp, Salmonella enterica subsp. enterica serovar Paratyphi A; identical to SEQ ID NO: 29992

SEQ ID NO: 30071 - DNA, 3300 bp, Salmonella enterica subsp. enterica serovar Paratyphi A; identical to SEQ ID NO: 29993

SEQ ID NO: 30072 - DNA, 6321 bp, Salmonella enterica subsp. enterica serovar Paratyphi A; identical to SEQ ID NO: 29992

SEQ ID NO: 30073 - DNA, 3300 bp, Salmonella enterica subsp. enterica serovar Paratyphi A; identical to SEQ ID NO: 29993

SEQ ID NO: 30074 - DNA, 6321 bp, Salmonella enterica subsp. enterica serovar Paratyphi A; identical to SEQ ID NO: 29992

SEQ ID NO: 30075 - DNA, 3300 bp, Salmonella enterica subsp. enterica serovar Paratyphi A; identical to SEQ ID NO: 29993

SEQ ID NO: 30076 - DNA, 6321 bp, Salmonella enterica subsp. enterica serovar Paratyphi A; identical to SEQ ID NO: 29992

SEQ ID NO: 30077 - DNA, 3300 bp, Salmonella enterica subsp. enterica serovar Paratyphi A; identical to SEQ ID NO: 29993

SEQ ID NO: 30078 - DNA, 6321 bp, Salmonella enterica subsp. enterica serovar Paratyphi A; identical to SEQ ID NO: 29992

SEQ ID NO: 30079 - DNA, 3300 bp, Salmonella enterica subsp. enterica serovar Paratyphi A; identical to SEQ ID NO: 29993

SEQ ID NO: 30080 - DNA, 6321 bp, Salmonella enterica subsp. enterica serovar Paratyphi A; identical to SEQ ID NO: 29992

SEQ ID NO: 30081 - DNA, 3300 bp, Salmonella enterica subsp. enterica serovar Paratyphi A; identical to SEQ ID NO: 29993

SEQ ID NO: 30082 - DNA, 6321 bp, Salmonella enterica subsp. enterica serovar Paratyphi A; identical to SEQ ID NO: 29992

SEQ ID NO: 30083 - DNA, 3300 bp, Salmonella enterica subsp. enterica serovar Paratyphi A; identical to SEQ ID NO: 29993

SEQ ID NO: 30084 - DNA, 6321 bp, Salmonella enterica subsp. enterica serovar Paratyphi A; identical to SEQ ID NO: 29992

SEQ ID NO: 30085 - DNA, 3300 bp, Salmonella enterica subsp. enterica serovar Paratyphi A; identical to SEQ ID NO: 29993

SEQ ID NO: 30086 - DNA, 6321 bp, Salmonella enterica subsp. enterica serovar Paratyphi A; identical to SEQ ID NO: 29992

SEQ ID NO: 30087 - DNA, 3300 bp, Salmonella enterica subsp. enterica serovar Paratyphi A; identical to SEQ ID NO: 29993

SEQ ID NO: 30088 - DNA, 6321 bp, Salmonella enterica subsp. enterica serovar Paratyphi A; identical to SEQ ID NO: 29992

SEQ ID NO: 30089 - DNA, 3300 bp, Salmonella enterica subsp. enterica serovar Paratyphi A; identical to SEQ ID NO: 29993

SEQ ID NO: 30090 - DNA, 6321 bp, Salmonella enterica subsp. enterica serovar Paratyphi A; identical to SEQ ID NO: 29992

SEQ ID NO: 30091 - DNA, 3300 bp, Salmonella enterica subsp. enterica serovar Paratyphi A; identical to SEQ ID NO: 29993

SEQ ID NO: 30092 - DNA, 6321 bp, Salmonella enterica subsp. enterica serovar Paratyphi A; identical to SEQ ID NO: 29992

SEQ ID NO: 30093 - DNA, 3300 bp, Salmonella enterica subsp. enterica serovar Paratyphi A; identical to SEQ ID NO: 29993

SEQ ID NO: 30094 - DNA, 6321 bp, Salmonella enterica subsp. enterica serovar Paratyphi A; identical to SEQ ID NO: 29992

SEQ ID NO: 30095 - DNA, 3300 bp, Salmonella enterica subsp. enterica serovar Paratyphi A; identical to SEQ ID NO: 29993

SEQ ID NO: 30096 - DNA, 6321 bp, Salmonella enterica subsp. enterica serovar Paratyphi A; identical to SEQ ID NO: 29992

SEQ ID NO: 30097 - DNA, 3300 bp, Salmonella enterica subsp. enterica serovar Paratyphi A; identical to SEQ ID NO: 29993

SEQ ID NO: 30098 - DNA, 6321 bp, Salmonella enterica subsp. enterica serovar Paratyphi A; identical to SEQ ID NO: 29992

SEQ ID NO: 30099 - DNA, 3300 bp, Salmonella enterica subsp. enterica serovar Paratyphi A; identical to SEQ ID NO: 29993

SEQ ID NO: 30100 - DNA, 6321 bp, Salmonella enterica subsp. enterica serovar Paratyphi A; identical to SEQ ID NO: 29992

SEQ ID NO: 30101 - DNA, 3300 bp, Salmonella enterica subsp. enterica serovar Paratyphi A; identical to SEQ ID NO: 29993

SEQ ID NO: 30102 - DNA, 6321 bp, Salmonella enterica subsp. enterica serovar Paratyphi A; identical to SEQ ID NO: 29992

SEQ ID NO: 30103 - DNA, 3300 bp, Salmonella enterica subsp. enterica serovar Paratyphi A; identical to SEQ ID NO: 29993

SEQ ID NO: 30104 - DNA, 6321 bp, Salmonella enterica subsp. enterica serovar Paratyphi A; identical to SEQ ID NO: 29992

SEQ ID NO: 30105 - DNA, 3300 bp, Salmonella enterica subsp. enterica serovar Paratyphi A; identical to SEQ ID NO: 29993

SEQ ID NO: 30106 - DNA, 6321 bp, Salmonella enterica subsp. enterica serovar Paratyphi A; identical to SEQ ID NO: 29992

SEQ ID NO: 30107 - DNA, 3300 bp, Salmonella enterica subsp. enterica serovar Paratyphi A; identical to SEQ ID NO: 29993

SEQ ID NO: 30108 - DNA, 6321 bp, Salmonella enterica subsp. enterica serovar Paratyphi A; identical to SEQ ID NO: 29992

SEQ ID NO: 30109 - DNA, 3300 bp, Salmonella enterica subsp. enterica serovar Paratyphi A; identical to SEQ ID NO: 29993

SEQ ID NO: 30110 - DNA, 6321 bp, Salmonella enterica subsp. enterica serovar Paratyphi A; identical to SEQ ID NO: 29992

SEQ ID NO: 30111 - DNA, 3300 bp, Salmonella enterica subsp. enterica serovar Paratyphi A; identical to SEQ ID NO: 29993

SEQ ID NO: 30112 - DNA, 6321 bp, Salmonella enterica subsp. enterica serovar Paratyphi A; identical to SEQ ID NO: 29992

SEQ ID NO: 30113 - DNA, 3300 bp, Salmonella enterica subsp. enterica serovar Paratyphi A; identical to SEQ ID NO: 29993

SEQ ID NO: 30114 - DNA, 6321 bp, Salmonella enterica subsp. enterica serovar Paratyphi A; identical to SEQ ID NO: 29992

SEQ ID NO: 30115 - DNA, 3300 bp, Salmonella enterica subsp. enterica serovar Paratyphi A; identical to SEQ ID NO: 29993

SEQ ID NO: 30116 - DNA, 6321 bp, Salmonella enterica subsp. enterica serovar Paratyphi A; identical to SEQ ID NO: 29992

SEQ ID NO: 30117 - DNA, 3300 bp, Salmonella enterica subsp. enterica serovar Paratyphi A; identical to SEQ ID NO: 29993

SEQ ID NO: 30118 - DNA, 6321 bp, Salmonella enterica subsp. enterica serovar Paratyphi A; identical to SEQ ID NO: 29992

SEQ ID NO: 30119 - DNA, 3300 bp, Salmonella enterica subsp. enterica serovar Paratyphi A; identical to SEQ ID NO: 29993

SEQ ID NO: 30120 - DNA, 6321 bp, Salmonella enterica subsp. enterica serovar Paratyphi A; identical to SEQ ID NO: 29992

SEQ ID NO: 30121 - DNA, 3300 bp, Salmonella enterica subsp. enterica serovar Paratyphi A; identical to SEQ ID NO: 29993

SEQ ID NO: 30122 - DNA, 6321 bp, Salmonella enterica subsp. enterica serovar Paratyphi A; identical to SEQ ID NO: 29992

SEQ ID NO: 30123 - DNA, 3300 bp, Salmonella enterica subsp. enterica serovar Paratyphi A; identical to SEQ ID NO: 29993

SEQ ID NO: 30124 - DNA, 6321 bp, Salmonella enterica subsp. enterica serovar Paratyphi A; identical to SEQ ID NO: 29992

SEQ ID NO: 30125 - DNA, 3300 bp, Salmonella enterica subsp. enterica serovar Paratyphi A; identical to SEQ ID NO: 29993

SEQ ID NO: 30126 - DNA, 6321 bp, Salmonella enterica subsp. enterica serovar Paratyphi A; identical to SEQ ID NO: 29992

SEQ ID NO: 30127 - DNA, 3300 bp, Salmonella enterica subsp. enterica serovar Paratyphi A; identical to SEQ ID NO: 29993

SEQ ID NO: 30128 - DNA, 6321 bp, Salmonella enterica subsp. enterica serovar Paratyphi A; identical to SEQ ID NO: 29992

SEQ ID NO: 30129 - DNA, 3300 bp, Salmonella enterica subsp. enterica serovar Paratyphi A; identical to SEQ ID NO: 29993

SEQ ID NO: 30130 - DNA, 6321 bp, Salmonella enterica subsp. enterica serovar Paratyphi A; identical to SEQ ID NO: 29992

SEQ ID NO: 30131 - DNA, 3300 bp, Salmonella enterica subsp. enterica serovar Paratyphi A; identical to SEQ ID NO: 29993

SEQ ID NO: 30132 - DNA, 6321 bp, Salmonella enterica subsp. enterica serovar Paratyphi A; identical to SEQ ID NO: 29992

SEQ ID NO: 30133 - DNA, 3300 bp, Salmonella enterica subsp. enterica serovar Paratyphi A; identical to SEQ ID NO: 29993

SEQ ID NO: 30134 - DNA, 6321 bp, Salmonella enterica subsp. enterica serovar Paratyphi A; identical to SEQ ID NO: 29992

SEQ ID NO: 30135 - DNA, 3300 bp, Salmonella enterica subsp. enterica serovar Paratyphi A; identical to SEQ ID NO: 29993

SEQ ID NO: 30136 - DNA, 6321 bp, Salmonella enterica subsp. enterica serovar Paratyphi A; identical to SEQ ID NO: 29992

SEQ ID NO: 30137 - DNA, 3300 bp, Salmonella enterica subsp. enterica serovar Paratyphi A; identical to SEQ ID NO: 29993

SEQ ID NO: 30138 - DNA, 6321 bp, Salmonella enterica subsp. enterica serovar Paratyphi A; identical to SEQ ID NO: 29992

SEQ ID NO: 30139 - DNA, 3300 bp, Salmonella enterica subsp. enterica serovar Paratyphi A; identical to SEQ ID NO: 29993

SEQ ID NO: 30140 - DNA, 6321 bp, Salmonella enterica subsp. enterica serovar Paratyphi A; identical to SEQ ID NO: 29992

SEQ ID NO: 30141 - DNA, 3300 bp, Salmonella enterica subsp. enterica serovar Paratyphi A; identical to SEQ ID NO: 29993

SEQ ID NO: 30142 - DNA, 6321 bp, Salmonella enterica subsp. enterica serovar Paratyphi A; identical to SEQ ID NO: 29992

SEQ ID NO: 30143 - DNA, 3300 bp, Salmonella enterica subsp. enterica serovar Paratyphi A; identical to SEQ ID NO: 29993

SEQ ID NO: 30144 - DNA, 6321 bp, Salmonella enterica subsp. enterica serovar Paratyphi A; identical to SEQ ID NO: 29992

SEQ ID NO: 30145 - DNA, 3300 bp, Salmonella enterica subsp. enterica serovar Paratyphi A; identical to SEQ ID NO: 29993

SEQ ID NO: 30146 - DNA, 6321 bp, Salmonella enterica subsp. enterica serovar Paratyphi A; identical to SEQ ID NO: 29992

SEQ ID NO: 30147 - DNA, 3300 bp, Salmonella enterica subsp. enterica serovar Paratyphi A; identical to SEQ ID NO: 29993

SEQ ID NO: 30148 - DNA, 6321 bp, Salmonella enterica subsp. enterica serovar Paratyphi A; identical to SEQ ID NO: 29992

SEQ ID NO: 30149 - DNA, 3300 bp, Salmonella enterica subsp. enterica serovar Paratyphi A; identical to SEQ ID NO: 29993

SEQ ID NO: 30150 - DNA, 6321 bp, Salmonella enterica subsp. enterica serovar Paratyphi A; identical to SEQ ID NO: 29992

SEQ ID NO: 30151 - DNA, 3300 bp, Salmonella enterica subsp. enterica serovar Paratyphi A; identical to SEQ ID NO: 29993

SEQ ID NO: 30152 - DNA, 6321 bp, Salmonella enterica subsp. enterica serovar Paratyphi A; identical to SEQ ID NO: 29992

SEQ ID NO: 30153 - DNA, 3300 bp, Salmonella enterica subsp. enterica serovar Paratyphi A; identical to SEQ ID NO: 29993

SEQ ID NO: 30154 - DNA, 6321 bp, Salmonella enterica subsp. enterica serovar Paratyphi A; identical to SEQ ID NO: 29992

SEQ ID NO: 30155 - DNA, 3300 bp, Salmonella enterica subsp. enterica serovar Paratyphi A; identical to SEQ ID NO: 29993

SEQ ID NO: 30156 - DNA, 6321 bp, Salmonella enterica subsp. enterica serovar Paratyphi A; identical to SEQ ID NO: 29992

SEQ ID NO: 30157 - DNA, 3300 bp, Salmonella enterica subsp. enterica serovar Paratyphi A; identical to SEQ ID NO: 29993

SEQ ID NO: 30158 - DNA, 6321 bp, Salmonella enterica subsp. enterica serovar Paratyphi A; identical to SEQ ID NO: 29992

SEQ ID NO: 30159 - DNA, 3300 bp, Salmonella enterica subsp. enterica serovar Paratyphi A; identical to SEQ ID NO: 29993

SEQ ID NO: 30160 - DNA, 6321 bp, Salmonella enterica subsp. enterica serovar Paratyphi A; identical to SEQ ID NO: 29992

SEQ ID NO: 30161 - DNA, 3300 bp, Salmonella enterica subsp. enterica serovar Paratyphi A; identical to SEQ ID NO: 29993

SEQ ID NO: 30162 - DNA, 6321 bp, Salmonella enterica subsp. enterica serovar Paratyphi A; identical to SEQ ID NO: 29992

SEQ ID NO: 30163 - DNA, 3300 bp, Salmonella enterica subsp. enterica serovar Paratyphi A; identical to SEQ ID NO: 29993

SEQ ID NO: 30164 - DNA, 6321 bp, Salmonella enterica subsp. enterica serovar Paratyphi A; identical to SEQ ID NO: 29992

SEQ ID NO: 30165 - DNA, 3300 bp, Salmonella enterica subsp. enterica serovar Paratyphi A; identical to SEQ ID NO: 29993

SEQ ID NO: 30166 - DNA, 6321 bp, Salmonella enterica subsp. enterica serovar Paratyphi A; identical to SEQ ID NO: 29992

SEQ ID NO: 30167 - DNA, 3300 bp, Salmonella enterica subsp. enterica serovar Paratyphi A; identical to SEQ ID NO: 29993

SEQ ID NO: 30168 - DNA, 6321 bp, Salmonella enterica subsp. enterica serovar Paratyphi A; identical to SEQ ID NO: 29992

SEQ ID NO: 30169 - DNA, 3300 bp, Salmonella enterica subsp. enterica serovar Paratyphi A; identical to SEQ ID NO: 29993

SEQ ID NO: 30170 - DNA, 6321 bp, Salmonella enterica subsp. enterica serovar Paratyphi A; identical to SEQ ID NO: 29992

SEQ ID NO: 30171 - DNA, 3300 bp, Salmonella enterica subsp. enterica serovar Paratyphi A; identical to SEQ ID NO: 29993

SEQ ID NO: 30172 - DNA, 6321 bp, Salmonella enterica subsp. enterica serovar Paratyphi A; identical to SEQ ID NO: 29992

SEQ ID NO: 30173 - DNA, 3300 bp, Salmonella enterica subsp. enterica serovar Paratyphi A; identical to SEQ ID NO: 29993

SEQ ID NO: 30174 - DNA, 6321 bp, Salmonella enterica subsp. enterica serovar Paratyphi A; identical to SEQ ID NO: 29992

SEQ ID NO: 30175 - DNA, 3300 bp, Salmonella enterica subsp. enterica serovar Paratyphi A; identical to SEQ ID NO: 29993

SEQ ID NO: 30176 - DNA, 6321 bp, Salmonella enterica subsp. enterica serovar Paratyphi A; identical to SEQ ID NO: 29992

SEQ ID NO: 30177 - DNA, 3300 bp, Salmonella enterica subsp. enterica serovar Paratyphi A; identical to SEQ ID NO: 29993

SEQ ID NO: 30178 - DNA, 6321 bp, Salmonella enterica subsp. enterica serovar Paratyphi A; identical to SEQ ID NO: 29992

SEQ ID NO: 30179 - DNA, 3300 bp, Salmonella enterica subsp. enterica serovar Paratyphi A; identical to SEQ ID NO: 29993

SEQ ID NO: 30180 - DNA, 6321 bp, Salmonella enterica subsp. enterica serovar Paratyphi A; identical to SEQ ID NO: 29992

SEQ ID NO: 30181 - DNA, 3300 bp, Salmonella enterica subsp. enterica serovar Paratyphi A; identical to SEQ ID NO: 29993

SEQ ID NO: 30182 - DNA, 6321 bp, Salmonella enterica subsp. enterica serovar Paratyphi A; identical to SEQ ID NO: 29992

SEQ ID NO: 30183 - DNA, 3300 bp, Salmonella enterica subsp. enterica serovar Paratyphi A; identical to SEQ ID NO: 29993

SEQ ID NO: 30184 - DNA, 6321 bp, Salmonella enterica subsp. enterica serovar Paratyphi A; identical to SEQ ID NO: 29992

SEQ ID NO: 30185 - DNA, 3300 bp, Salmonella enterica subsp. enterica serovar Paratyphi A; identical to SEQ ID NO: 29993

SEQ ID NO: 30186 - DNA, 6321 bp, Salmonella enterica subsp. enterica serovar Paratyphi A; identical to SEQ ID NO: 29992

SEQ ID NO: 30187 - DNA, 3300 bp, Salmonella enterica subsp. enterica serovar Paratyphi A; identical to SEQ ID NO: 29993

SEQ ID NO: 30188 - DNA, 6321 bp, Salmonella enterica subsp. enterica serovar Paratyphi A; identical to SEQ ID NO: 29992

SEQ ID NO: 30189 - DNA, 3300 bp, Salmonella enterica subsp. enterica serovar Paratyphi A; identical to SEQ ID NO: 29993

SEQ ID NO: 30190 - DNA, 6321 bp, Salmonella enterica subsp. enterica serovar Paratyphi A; identical to SEQ ID NO: 29992

SEQ ID NO: 30191 - DNA, 3300 bp, Salmonella enterica subsp. enterica serovar Paratyphi A; identical to SEQ ID NO: 29993

SEQ ID NO: 30192 - DNA, 6321 bp, Salmonella enterica subsp. enterica serovar Paratyphi A; identical to SEQ ID NO: 29992

SEQ ID NO: 30193 - DNA, 3300 bp, Salmonella enterica subsp. enterica serovar Paratyphi A; identical to SEQ ID NO: 29993

SEQ ID NO: 30194 - DNA, 6321 bp, Salmonella enterica subsp. enterica serovar Paratyphi A; identical to SEQ ID NO: 29992

SEQ ID NO: 30195 - DNA, 3300 bp, Salmonella enterica subsp. enterica serovar Paratyphi A; identical to SEQ ID NO: 29993

SEQ ID NO: 30196 - DNA, 6321 bp, Salmonella enterica subsp. enterica serovar Paratyphi A
atgactacacgctatttttcttcgctgattgaacaatcactgtcgcgttctacggaggcgacgctgagtattatgggggtgaccaacccgaatcttcgcgagcatctcacgcaacaaatggcggccgattgcgggaaagaaggatcgtttcttgcctcccccgtatttgaacagacatttggctggaaagagtccaacagcacaatgaaagaccttgcaacaaaacaaacgttgctaagcaaggaggtggtggactcgctggatagtgaggaaaatggtcgttatcgttttggctctgactggaaacctttcacgcatcagttagccagctggcaatcattacttgagaaaaaacactcagtcgtggtgaccagcgggacaggctctggcaaaacggaatgctttatggtcccggtactggaagacctctatcgtgagcttcaggtcaagaacaaaaaaccgttgataggtgtgagagcactttttctttacccactgaatgccctgattaattcccagcgcgagcgtttagatgcgtggacccgtagttttggttccggaattcggtactgtctgtataacggtaacacagaagaattgcacgctttggtcaaaagtgagcaggcaaacaggcctaatgaggttttgtcacgagagaagatgcgtgaagaacccgcccccattttagtgaccaacggtaccatgctggaatacatgatggttcgtcaggttgatgcaccgattattcagaaatcaaaagctgaaaaatcattacgctggatagttctggatgaagcccatacctacgttggttctcaggccgctgagttggctctacagctccgtcgcgtcatgacggcatttggcgtcacgcctgatgatgttcgctttgtggcgacgtcggccaccattgccggaagtgatgctgaaaagcagctgaaaaaattcttgtctgagctgtcaggagtgccacaggaacgtattgatgttctgggcggaagccgcgttattcctgagctcgaaccctgcaaacaatattctctgtcactggatgagattgagcatatccctgattcggagagtgaagggatcagtccggagcgttatagtgcgttgacccactctccggaagcgcgctgtttacgcgaaatgctggttagccaaccccgaccaatgaaacttgatacgctgacccagcgtttgaacgagctgaccaaacatcagtacacgcagcaggatgttttacgctggatcgatctttgctctggcacactccctaatgcaaaggatcctgcatttctgaaagtcagagcacatattttccagcgaaacacccagggcatctgggcatgtgtggataagaactgtgcagctaaaaaaaataccgcgctggaaaaaaactggtcttttggcaatgtgtatgtaaatcagcggcaaaactgcgagtgcggcagtcccgtttttgaactggcattctgcaatgagtgtaatgaaccgcatcttcttgcacgggataaaaaaggcaaactcgtacagtgggataataaaggtggagatgaattctccctacaggatgaaatttctgacgattttgaaacatccggagaaaagattcagaaggattttgtattccagtcgccacaaattattgctgcggaatgtaatacggaagctggctatattatgcagcggctcgatcgtcagacccgcagtatcggcgtggtgaacccggacagtattccgctggcaattaatgatatcgaacaaatctgtagtgccagcaattgtggctataaaggcggaaagggtaaacagcccttccgaagggcgttactgggcgggcctttttatgtcaccaatattgtgcctacggtgctggagtattgtcaggacttcactagtgatgaaggtaaagatggtgtcggcccgctctctttgcctggtcgaggtcgtcgcctgattacctttaccgacagtcgtcaggggacggcgcgaatggcagtacgtatgcagcaggaagcagagcgcagccgattacgtggtagcgtagtagaaattcttggctggcaccaacgaaaacagccaacgagtgctccgaatgaccaggctgacgtgatgaaactggttgcaagggtgacacaataccgtgaagaagcccgggagtatcgcgagtggggaatgcccgaggaagcaaaactttctgaagctcaggccgaacgccttgaacaggcaatccagacggcgacggggggaaaggctgcaaccattttagtttgccgaacctggacggaaatggtcaatgatctgaaagagaaagccgatatacagggaccaattttacaatataaccattatctgaagcctgaaattttcaccgaaaatggcggccctttgaaactcgccgaaatgctgcttttccgtgagtttatgcgacgcccgaaacgaaccaacagcctggaaacccaggggctggttcaggttggctatcaggggctggagaaggctcacagtgttcctactcactggcaggctaaaggcttaacccttgatgactggcgcgattttctgaaggtggcgctggatttctatgtcagagaaagcaactacatccaactggatgacgatctaagaaactggatcggtagccgtttctcttccaaatttgtccgcaacccagattcgaaagagccagatgacaaccaggttaaacgctggccgcaaattcgccacggtaatgtgactcagcgcctggtcaagctgttgattttaggggccaaatttaacaccgtaaatacggtaactattgatattgttaacgcctggctgaaagaagcctggctccagctaacaggatctctggcggtattgaagcctgatggaaaccgtttttatttaccgaaagagcatctgacattctctctggtgcaaaaagcacgcatttgtccagtgaccaataaattactggcgacaaccttcaaaggtctgaccccctatttgcccatgcatatccagttcgagcgactgacgagtgcacagtacgacgcgtttttggctcaggaagtcacgctgccagcgatctgggaacacgatcgctctcaggatgattatgtcgacgggttaacaaaagtgcgtgactgggtaagccaggatccgcaagtgctaccattacgctcgcaaaacctctggacggacattaacgatcgcgtggtagaaggtggattttactaccgcaccgcagaacactcggcacagcaatcgtcggagcgcctgcaaagctacgaaagaatgtttaaaaacgggcagcttaacgtccttaactgctcaaccacgatggaaatgggtgtggatattggcggtatttctgcagtggtgatgaacaacgttcctccgcatccggccaactatttacagcgagccgggcgtgccgggcgtagtaaagagtcacgcgctatttcgtacaccttgtgcaaagggaacccgcacgatcagcaggtttttgctaatcccctctggccgtttgagacggtgatcccggctccaatggtggcaatgaactcagagcgtctggtgcagcgtcacgtcaattccctgttactgtcagaatacttatgccatgtggtcggtgaaaccgaaaaagagcgtaccagccttaatagccagtggttctttggcgaagagctcgaccagtcggtatgcaatcgttttaaagcctggctcgaacgtccgacgctgagcattgataacgcgctggagcgtctggttaaagggacggcattgcacggcgttacggcagaaaaactgcgggataaaacgcaggaggctattgccgtcttacagacacgctggctggggatcttccgcgatctcgtgaaacaggaaagtgaatcgcagcccaatacgccgtaccgcaggcgactggaactggagaaaaaacggcattgtggtgaatacctgttacgcgatctggcggcccgaactttcctacccggatatggcttctcaacggatgttgtcacttttgataacttcaccatggaagattatatccgcgagaaaacgcacaaaagcagtgataagaatgaccgggaggataacgtttcgcgttataaagggctgccttcgcgcaacctttccgttgcgatccgtgagtatgcgccgggcgcggagattatccttgatggtcgggtattccgctcggccggtgtttcgctgcactggcataaccttaacgccgatactaacgaagcccagcgtctggacagcgcctggcgttgccataaatgcggtactttaggctatgaggaaggtattggtggctcgggggatttattctgtaccaatagcgcgtgcggggagcggatcacgctggataaccgacgtcaggtattacagcccgccggttttgtcaccgatgcccatactcccgttacgaacaacattgaaacaatgaaattcatcccggtggtgcctgcctgggtgtttgtgaaagcagaacgcgtgccactgccaaacccgctgatgggttttatggcgtcaggcgcggatggtcatgttttccagcagagcatgggcgaaggtggacacggttatgcgctgtgcctgagctgcggccgggcggagtcaatgctcaatgccaccgatacgccgaaatcgatggaagcgcattatcctccgcgccccggtaaatctgatcgcgacagccagaatcagcggattatctgccctggctccacggcgctgaataagaatgtcacgctgggtgcgctggcgcgcaccgatgtgtttgaactcattttgcgccgtccgcaaaacggggagtatatccccgataattctgatgaaggccgtattgtggccatgacgctggcggttgcactacgtcgagcgctggccagcgtgctgggggtatcggcgacagaactgggctatgcggtgcgtccggtcagactggataatgagcaatcggtcctggcggtgcagctttacgacattatcagcggcggtgcggggtttgcttccagtgcgccattgcatattgaagcggtcctcaaagggatggtgaaacagctgggatgccgccactgtgataccgcctgtagcgaatgtctgctcgattcgcagacccgccacgatcacgatcagctggatcgtaaagccgcgcaggcctggctgggggaggatttcagtcactatatcggtttgccggaggcggaaaaattctccctggccgacgcgcagtattgcccaggcagcattgaggatgctatccgtcgtgccattaacgacggggcgcgcaaactcacgttgtggatgaatgggccgcttaacgagtgggatttgtatgcccgccagttccgaacggcgatccagaactatcggctgaaagatgaggttgaggttacgctggttgtgcccggtcatattgaagatccggagcttttacaggagattgcgcagtttgccgccattggtgtgcagctttgccagtctgagctgaatacggatacgccggttgtcgcacaggtagcattcaacgatcgcctgatgacgttgatttctcgcagcccagaggccaccatccccggcccgaactggcatctgaatagccagatggttattcgcagccatgcgtttgagccgataacgcttagtaaagcagagctattatccgatgccgcaggtagcagaggcctggtcaacgatattgagatccataagcagcttaatggcccggtttctcagtttggtcagcgtttctggggcgtgttaaccggggcgcaggaagatattcagacgctgctgaaggaaaaccaggtgacgcgcattcactatagcgatcgttatctgcaaaacccggtggcgctggcgttattaggcgggctgttaaaaccgctgaaatcgatcctggcgcaggatgcgcaagtgacgattgatacgctgtttaagagtaaagagcggccaggcaacaagccgttccatgactggatgagtgaagcggattttcaggattttgccgaccagtggtttgcggcatctatgggcagagccgtcgtggttaacaccgttggctcgccgcgtgatattccacaccatcgtaaactgatggtgaccttcagtaatggtcaggcgctgaagatccgttttgaccaagggatgggatactggcgcatcgtctttgcgcgagcgtatcgcgattttgattttaacgatgatgtggctttccagctcgggaatatggcaaaagcctgcgttgaaggtcaggtggtcaacagcgaggaaagttgggcaaccgatgtgctggtgcaggtgatagtcccttaa

SEQ ID NO: 30197 - DNA, 3300 bp, Salmonella enterica subsp. enterica serovar Paratyphi A; identical to SEQ ID NO: 29993

SEQ ID NO: 30198 - DNA, 6321 bp, Salmonella enterica subsp. enterica serovar Paratyphi A; identical to SEQ ID NO: 29992

SEQ ID NO: 30199 - DNA, 3300 bp, Salmonella enterica subsp. enterica serovar Paratyphi A; identical to SEQ ID NO: 29993

SEQ ID NO: 30200 - DNA, 6321 bp, Salmonella enterica subsp. enterica serovar Paratyphi A; identical to SEQ ID NO: 29992

SEQ ID NO: 30201 - DNA, 3300 bp, Salmonella enterica subsp. enterica serovar Paratyphi A; identical to SEQ ID NO: 29993

SEQ ID NO: 30202 - DNA, 6321 bp, Salmonella enterica subsp. enterica serovar Paratyphi A; identical to SEQ ID NO: 29992

SEQ ID NO: 30203 - DNA, 3300 bp, Salmonella enterica subsp. enterica serovar Paratyphi A; identical to SEQ ID NO: 29993

SEQ ID NO: 30204 - DNA, 6321 bp, Salmonella enterica subsp. enterica serovar Paratyphi A; identical to SEQ ID NO: 29992

SEQ ID NO: 30205 - DNA, 3300 bp, Salmonella enterica subsp. enterica serovar Paratyphi A; identical to SEQ ID NO: 29993

SEQ ID NO: 30206 - DNA, 6321 bp, Salmonella enterica subsp. enterica serovar Paratyphi A; identical to SEQ ID NO: 29992

SEQ ID NO: 30207 - DNA, 3300 bp, Salmonella enterica subsp. enterica serovar Paratyphi A; identical to SEQ ID NO: 29993

SEQ ID NO: 30208 - DNA, 6321 bp, Salmonella enterica subsp. enterica serovar Paratyphi A
atgactacacgctatttttcttcgctgattgaacaatcactgtcgcgttctacggaggcgacgctgagtattatgggggtgaccaacccgaatcttcgcgagcatctcacgcaacaaatggcggccgattgcgggaaagaaggatcgtttcttgcctcccccgtatttgaacagacatttggctggaaagagtccaacagcacaatgaaagaccttgcaacaaaacaaacgttgctaagcaaggaggtggtggactcgctggatagtgaggaaaatggtcgttatcgttttggctctgactggaaacctttcacgcatcagttagccagctggcaatcattacttgagaaaaaacactcagtcgtggtgaccagcgggacaggctctggcaaaacggaatgctttatggtcccggtactggaagacctctatcgtgagcttcaggtcaagaacaaaaaaccgttgataggtgtgagagcactttttctttacccactgaatgccctgattaattcccagcgcgagcgtttagatgcgtggacccgtagttttggttccggaattcggtactgtctgtataacggtaacacagaagaattgcacgctttggtcaaaagtgagcaggcaaacaggcctaatgaggttttgtcacgagagaagatgcgtgaagaacccgcccccattttagtgaccaacggtaccatgctggaatacatgatggttcgtcaggttgatgcaccgattattcagaaatcaaaagctgaaaaatcattacgctggatagttctggatgaagcccatacctacgttggttctcaggccgctgagttggctctacagctccgtcgcgtcatgacggcatttggcgtcacgcctgatgatgttcgctttgtggcgacgtcggccaccattgccggaagtgatgctgaaaagcagctgaaaaaattcttgtctgagctgtcaggagtgccacaggaacgtattgatgttctgggcggaagccgcgttattcctgagctcgaaccctgcaaacaatattctctgtcactggatgagattgagcatatccctgattcggagagtgaagggatcagtccggagcgttatagtgcgttgacccactctccggaagcgcgctgtttacgcgaaatgctggttagccaaccccgaccaatgaaacttgatacgctgacccagcgtttgaacgagctgaccaaacatcagtacacgcagcaggatgttttacgctggatcgatctttgctctggcacactccctaatgcaaaggatcctgcatttctgaaagtcagagcacatattttccagcgaaacacccagggcatctgggcatgtgtggataagaactgtgcagctaaaaaaaataccgcgctggaaaaaaactggtcttttggcaatgtgtatgtaaatcagcggcaaaactgcgagtgcggcagtcccgtttttgaactggcattctgcaatgagtgtaatgaaccgcatcttcttgcacgggataaaaaaggcaaactcgtacagtgggataataaaggtggagatgaattctccctacaggatgaaatttctgacgattttgaaacatccggagaaaagattcagaaggattttgtattccagccgccacaaattattgctgcggaatgtaatacggaagctggctatattatgcagcggctcgatcgtcagacccgcagtatcggcgtggtgaacccggacagtattccgctggcaattaatgatatcgaacaaatctgtagtgccagcaattgtggctataaaggcggaaagggtaaacagcccttccgaagggcgttactgggcgggcctttttatgtcaccaatattgtgcctacggtgctggagtattgtcaggacttcactagtgatgaaggtaaagatggtgtcggcccgctctctttgcctggtcgaggtcgtcgcctgattacctttaccgacagtcgtcaggggacggcgcgaatggcagtacgtatgcagcaggaagcagagcgcagccgattacgtggtagcgtagtagaaattcttggctggcaccaacgaaaacagccaacgagtgctccgaatgaccaggctgacgtgatgaaactggttgcaagggtgacacaataccgtgaagaagcccgggagtatcgcgagtggggaatgcccgaggaagcaaaactttctgaagctcaggccgaacgccttgaacaggcaatccagacggcgacggggggaaaggctgcaaccattttagtttgccgaacctggacggaaatggtcaatgatctgaaagagaaagccgatatacagggaccaattttacaatataaccattatctgaagcctgaaattttcaccgaaaatggcggccctttgaaactcgccgaaatgctgcttttccgtgagtttatgcgacgcccgaaacgaaccaacagcctggaaacccaggggctggttcaggttggctatcaggggctggagaaggctcacagtgttcctactcactggcaggctaaaggcttaacccttgatgactggcgcgattttctgaaggtggcgctggatttctatgtcagagaaagcaactacatccaactggatgacgatctaagaaactggatcggtagccgtttctcttccaaatttgtccgcaacccagattcgaaagagccagatgacaaccaggttaaacgctggccgcaaattcgccacggtaatgtgactcagcgcctggtcaagctgttgattttaggggccaaatttaacaccgtaaatacggtaactattgatattgttaacgcctggctgaaagaagcctggctccagctaacaggatctctggcggtattgaagcctgatggaaaccgtttttatttaccgaaagagcatctgacattctctctggtgcaaaaagcacgcatttgtccagtgaccaataaattactggcgacaaccttcaaaggtctgaccccctatttgcccatgcatatccagttcgagcgactgacgagtgcacagtacgacgcgtttttggctcaggaagtcacgctgccagcgatctgggaacacgatcgctctcaggatgattatgtcgacgggttaacaaaagtgcgtgactgggtaagccaggatccgcaagtgctaccattacgctcgcaaaacctctggacggacattaacgatcgcgtggtagaaggtggattttactaccgcaccgcagaacactcggcacagcaatcgtcggagcgcctgcaaagctacgaaagaatgtttaaaaacgggcagcttaacgtccttaactgctcaaccacgatggaaatgggtgtggatattggcggtatttctgcagtggtgatgaacaacgttcctccgcatccggccaactatttacagcgagccgggcgtgccgggcgtagtaaagagtcacgcgctatttcgtacaccttgtgcaaagggaacccgcacgatcagcaggtttttgctaatcccctctggccgtttgagacggtgatcccggctccaatggtggcaatgaactcagagcgtctggtgcagcgtcacgtcaattccctgttactgtcagaatacttatgccatgtggtcggtgaaaccgaaaaagagcgtaccagccttaatagccagtggttctttggcgaagagctcgaccagtcggtatgcaatcgttttaaagcctggctcgaacgtccgacgctgagcattgataacgcgctggagcgtctggttaaagggacggcattgcacggcgttacggcagaaaaactgcgggataaaacgcaggaggctattgccgtcttacagacacgctggctggggatcttccgcgatctcgtgaaacaggaaagtgaatcgcagcccaatacgccgtaccgcaggcgactggaactggagaaaaaacggcattgtggtgaatacctgttacgcgatctggcggcccgaactttcctacccggatatggcttcccaacggatgttgtcacttttgataacttcaccatggaagattatatccgcgagaaaacgcacaaaagcagtgataagaatgaccgggaggataacgtttcgcgttataaagggctgccttcgcgcaacctttccgttgcgatccgtgagtatgcgccgggcgcggagattatccttgatggtcgggtattccgctcggccggtgtttcgctgcactggcataaccttaacgccgatactaacgaagcccagcgtctggacagcgcctggcgttgccataaatgcggtactttaggctatgaggaaggtattggtggctcgggggatttattctgtaccaatagcgcgtgcggggagcggatcacgctggataaccgacgtcaggtattacagcccgccggttttgtcaccgatgcccatactcccgttacgaacaacattgaaacaatgaaattcatcccggtggtgcctgcctgggtgtttgtgaaagcagaacgcgtgccactgccaaacccgctgatgggttttatggcgtcaggcgcggatggtcatgttttccagcagagcatgggcgaaggtggacacggttatgcgctgtgcctgagctgcggccgggcggagtcaatgctcaatgccaccgatacgccgaaatcgatggaagcgcattatcctccgcgccccggtaaatctgatcgcgacagccagaatcagcggattatctgccctggctccacggcgctgaataagaatgtcacgctgggtgcgctggcgcgcaccgatgtgtttgaactcattttgcgccgtccgcaaaacggggagtatatccccgataattctgatgaaggccgtattgtggccatgacgctggcggttgcactacgtcgagcgctggccagcgtgctgggggtatcggcgacagaactgggctatgcggtgcgtccggtcagactggataatgagcaatcggtcctggcggtgcagctttacgacattatcagcggcggtgcggggtttgcttccagtgcgccattgcatattgaagcggtcctcaaagggatggtgaaacagctgggatgccgccactgtgataccgcctgtagcgaatgtctgctcgattcgcagacccgccacgatcacgatcagctggatcgtaaagccgcgcaggcctggctgggggaggatttcagtcactatatcggtttgccggaggcggaaaaattctccctggccgacgcgcagtattgcccaggcagcattgaggatgctatccgtcgtgccattaacgacggggcgcgcaaactcacgttgtggatgaatgggccgcttaacgagtgggatttgtatgcccgccagttccgaacggcgatccagaactatcggctgaaagatgaggttgaggttacgctggttgtgcccggtcatattgaagatccggagcttttacaggagattgcgcagtttgccgccattggtgtgcagctttgccagtctgagctgaatacggatacgccggttgtcgcacaggtagcattcaacgatcgcctgatgacgttgatttctcgcagcccagaggccaccatccccggcccgaactggcatctgaatagccagatggttattcgcagccatgcgtttgagccgataacgcttagtaaagcagagctattatccgatgccgcaggtagcagaggcctggtcaacgatattgagatccataagcagcttaatggcccggtttctcagtttggtcagcgtttctggggcgtgttaaccggggcgcaggaagatattcagacgctgctgaaggaaaaccaggtgacgcgcattcactatagcgatcgttatctgcaaaacccggtggcgctggcgttattaggcgggctgttaaaaccgctgaaatcgatcctggcgcaggatgcgcaagtgacgattgatacgctgtttaagagtaaagagcggccaggcaacaagccgttccatgactggatgagtgaagcggattttcaggattttgccgaccagtggtttgcggcatctatgggcagagccgtcgtggttaacaccgttggctcgccgcgtgatattccacaccatcgtaaactgatggtgaccttcagtaatggtcaggcgctgaagatccgttttgaccaagggatgggatactggcgcatcgtctttgcgcgagcgtatcgcgattttgattttaacgatgatgtggctttccagctcgggaatatggcaaaagcctgcgttgaaggtcaggtggtcaacagcgaggaaagttgggcaaccgatgtgctggtgcaggtgatagtcccttaa

SEQ ID NO: 30209 - DNA, 3300 bp, Salmonella enterica subsp. enterica serovar Paratyphi A; identical to SEQ ID NO: 29993

SEQ ID NO: 30210 - DNA, 6321 bp, Salmonella enterica subsp. enterica serovar Paratyphi A; identical to SEQ ID NO: 29992

SEQ ID NO: 30211 - DNA, 3300 bp, Salmonella enterica subsp. enterica serovar Paratyphi A; identical to SEQ ID NO: 29993

SEQ ID NO: 30212 - DNA, 6321 bp, Salmonella enterica subsp. enterica serovar Paratyphi A; identical to SEQ ID NO: 29992

SEQ ID NO: 30213 - DNA, 3300 bp, Salmonella enterica subsp. enterica serovar Paratyphi A; identical to SEQ ID NO: 29993

SEQ ID NO: 30214 - DNA, 6321 bp, Salmonella enterica subsp. enterica serovar Paratyphi A; identical to SEQ ID NO: 29992

SEQ ID NO: 30215 - DNA, 3300 bp, Salmonella enterica subsp. enterica serovar Paratyphi A; identical to SEQ ID NO: 29993

SEQ ID NO: 30216 - DNA, 6321 bp, Salmonella enterica subsp. enterica serovar Paratyphi A
atgactacacgctatttttcttcgctgattgaacaatcactgtcgcgttctacggaggcgacgctgagtattatgggggtgaccaacccgaatcttcgcgagcatctcacgcaacaaatggcggccgattgcgggaaagaaggatcgtttcttgcctcccccgtatttgaacagacatttggctggaaagagtccaacagcacaatgaaagaccttgcaacaaaacaaacgttgctaagcaaggaggtggtggactcgctggatagtgaggaaaatggtcgttatcgttttggctctgactggaaacctttcacgcatcagttagccagctggcaatcattacttgagaaaaaacactcagtcgtggtgaccagcgggacaggctctggcaaaacggaatgctttatggtcccggtactggaagacctctatcgtgagcttcaggtcaagaacaaaaaaccgttgataggtgtgagagcactttttctttacccactgaatgccctgattaattcccagcgcgagcgtttagatgcgtggacccgtagttttggttccggaattcggtactgtctgtataacggtaacacagaagaattgcacgctttggtcaaaagtgagcaggcaaacaggcctaatgaggttttgtcacgagagaagatgcgtgaagaacccgcccccattttagtgaccaacggtaccatgctggaatacatgatggttcgtcaggttgatgcaccgattattcagaaatcaaaagctgaaaaatcattacgctggatagttctggatgaagcccatacctacgttggttctcaggccgctgagttggctctacagctccgtcgcgtcatgacggcatttggcgtcacgcctgatgatgttcgctttgtggcgacgtcggccaccattgccggaagtgatgctgaaaagcagctgaaaaaattcttgtctgagctgtcaggagtgccacaggaacgtattgatgttctgggcggaagccgcgttattcctgagctcgaaccctgcaaacaatattctctgtcactggatgagattgagcatatccctgattcggagagtgaagggatcagtccggagcgttatagtgcgttgacccactctccggaagcgcgctgtttacgcgaaatgctggttagccaaccccgaccaatgaaacttgatacgctgacccagcgtttgaacgagctgaccaaacatcagtacacgcagcaggatgttttacgctggatcgatctttgctctggcacactccctaatgcaaaggatcctgcatttctgaaagtcagagcacatattttccagcgaaacacccagggcatctgggcatgtgtggataagaactgtgcagctaaaaaaaataccgcgctggaaaaaaactggtcttttggcaatgtgtatgtaaatcagcggcaaaactgcgagtgcggcagtcccgtttttgaactggcattctgcaatgagtgtaatgaaccgcatcttcttgcacgggataaaaaaggcaaactcgtacagtgggataataaaggtggagatgaattctccctacaggatgaaatttctgacgattttgaaacatccggagaaaagattcagaaggattttgtattccagtcgccacaaattattgctgcggaatgtaatacggaagctggctatattatgcagcggctcgatcgtcagacccgcagtatcggcgtggtgaacccggacagtattccgctggcaattaatgatatcgaacaaatctgtagtgccagcaattgtggctataaaggcggaaagggtaaacagcccttccgaagggcgttactgggcgggcctttttatgtcaccaatattgtgcctacggtgctggagtattgtcaggacttcactagtgatgaaggtaaagatggtgtcggcccgctctctttgcctggtcgaggtcgtcgcctgattacctttaccgacagtcgtcaggggacggcgcgaatggcagtacgtatgcagcaggaagcagagcgcagccgattacgtggtagcgtagtagaaattcttggctggcaccaacgaaaacagccaacgagtgctccgaatgaccaggctgacgtgatgaaactggttgcaagggtgacacaataccgtgaagaagcccgggagtatcgcgagtggggaatgcccgaggaagcaaaactttctgaagctcaggccgaacgccttgaacaggcaatccagacggcgacggggggaaaggctgcaaccattttagtttgccgaacctggacggaaatggtcaatgatctgaaagagaaagccgatatacagggaccaattttacaatataaccattatctgaagcctgaaattttcaccgaaaatggcggccctttgaaactcgccgaaatgctgcttttccgtgagtttatgcgacgcccgaaacgaaccaacagcctggaaacccaggggctggttcaggttggctatcaggggctggagaaggctcacagtgttcctactcactggcaggctaaaggcttaacccttgatgactggcgcgattttctgaaggtggcgctggatttctatgtcagagaaagcaactacatccaactggatgacgatctaagaaactggatcggtagccgtttctcttccaaatttgtccgcaacccagattcgaaagagccagatgacaaccaggttaaacgctggccgcaaattcgccacggtaatgtgactcagcgcctggtcaagctgttgattttaggggccaaatttaacaccgtaaatacggtaactattgatattgttaacgcctggctgaaagaagcctggctccagctaacaggatctctggcggtattgaagcctgatggaaaccgtttttatttaccgaaagagcatctgacattctctctggtgcaaaaagcacgcatttgtccagtgaccaataaattactggcgacaaccttcaaaggtctgaccccctatttgcccatgcatatccagttcgagcgactgacgagtgcacagtacgacgcgtttttggctcaggaagtcacgctgccagcgatctgggaacacgatcgctctcaggatgattatgtcgacgggttaacaaaagtgcgtgactgggtaagccaggatccgcaagtgctaccattacgctcgcaaaacctctggacggacattaacgatcgcgtggtagaaggtggattttactaccgcaccgcagaacactcggcacagcaatcgtcggagcgcctgcaaagctacgaaagaatgtttaaaaacgggcagcttaacgtccttaactgctcaaccacgatggaaatgggtgtggatattggcggtatttctgcagtggtgatgaacaacgttcctccgcatccggccaactatttacagcgagccgggcgtgccgggcgtagtaaagagtcacgcgctatttcgtacaccttgtgcaaagggaacccgcacgatcagcaggtttttgctaatcccctctggccgtttgagacggtgatcccggctccaatggtggcaatgaactcagagcgtctggtgcagcgtcacgtcaattccctgttactgtcagaatacttatgccatgtggtcggtgaaaccgaaaaagagcgtaccagccttaatagccagtggttctttggcgaagagctcgaccagtcggtatgcaatcgttttaaagcctggctcgaacgtccgacgctgagcattgataacgcgctggagcgtctggttaaagggacggcattgcacggcgttacggcagaaaaactgcgggataaaacgcaggaggctattgccgtcttacagacacgctggctggggatcttccgcgatctcgtgaaacaggaaagtgaatcgcagcccaatacgccgtaccgcaggcgactggaactggagaaaaaacggcattgtggtgaatacctgttacgcgatctggcggcccgaactttcctacccggatatggcttcccaacggatgttgtcacttttgataacttcaccatggaagattatatccgcgagaaaacgcacaaaagcagtgataagaatgaccgggaggataacgtttcgcgttataaagggctgccttcgcgcaacctttccgttgcgatccgtgagtatgcgccgggcgcggagattatccttgatggtcgggtattccgctcggccggtgtttcgctgcactggcataaccttaacgccgatactaacgaagcccagcgtctggacagcgcctggcgttgccataaatgcggtactttaggctatgaggaaggtattggtggctcgggggatttattctgtaccaatagcgcgtgcggggagcggatcacgctggataaccgacgtcaggtattacagcccgccggttttgtcaccgatgcccatactcccgttacgaacaacattgaaacaatgaaattcatcccggtggtgcctgcctgggtgtttgtgaaagcagaacgcgtgccactgccaaacccgctgatgggttttatggcgtcaggcgcggatggtcatgttttccagcagagcatgggcgaaggtggacacggttatgcgctgtgcctgagctgcggccgggcggagtcaatgctcaatgccaccgatacgccgaaatcgatggaagcgcattatcctccgcgccccggtaaatctgatcgcgacagccagaatcagcggattatctgccctggctccacggcgctgaataagaatgtcacgctgggtgcgctggcgcgcaccgatgtgtttgaactcattttgcgccgtccgcaaaacggggagtatatccccgataattctgatgaaggccgtattgtggccatgacgctggcggttgcactacgtcgagcgctggccagcgtgctgggggtatcggcgacagaactgggctatgcggtgcgtccggtcagactggataatgagcaatcggtcctggcggtgcagctttacgacattatcagcggcggtgcggggtttgcttccagtgcgccattgcatattgaagcggtcctcaaagggatggtgaaacagctgggatgccgccactgtgataccgcctgtagcgaatgtctgctcgattcgcagacccgccacgatcacgatcagctggatcgtaaagccgcgcaggcctggctgggggaggatttcagtcactatatcggtttgccggaggcggaaaaattctccctggccgacgcgcagtattgcccaggcagcattgaggatgctatccgtcgtgccattaacgacggggcgcgcaaactcacgttgtggatgaatgggccgcttaacgagtgggatttgtatgcccgccagttccgaacggcgatccagaactatcggctgaaagatgaggttaaggttacgctggttgtgcccggtcatattgaagatccggagcttttacaggagattgcgcagtttgccgccattggtgtgcagctttgccagtctgagctgaatacggatacgccggttgtcgcacaggtagcattcaacgatcgcctgatgacgttgatttctcgcagcccagaggccaccatccccggcccgaactggcatctgaatagccagatggttattcgcagccatgcgtttgagccgataacgcttagtaaagcagagctattatccgatgccgcaggtagcagaggcctggtcaacgatattgagatccataagcagcttaatggcccggtttctcagtttggtcagcgtttctggggcgtgttaaccggggcgcaggaagatattcagacgctgctgaaggaaaaccaggtgacgcgcattcactatagcgatcgttatctgcaaaacccggtggcgctggcgttattaggcgggctgttaaaaccgctgaaatcgatcctggcgcaggatgcgcaagtgacgattgatacgctgtttaagagtaaagagcggccaggcaacaagccgttccatgactggatgagtgaagcggattttcaggattttgccgaccagtggtttgcggcatctatgggcagagccgtcgtggttaacaccgttggctcgccgcgtgatattccacaccatcgtaaactgatggtgaccttcagtaatggtcaggcgctgaagatccgttttgaccaagggatgggatactggcgcatcgtctttgcgcgagcgtatcgcgattttgattttaacgatgatgtggctttccagctcgggaatatggcaaaagcctgcgttgaaggtcaggtggtcaacagcgaggaaagttgggcaaccgatgtgctggtgcaggtgatagtcccttaa

SEQ ID NO: 30217 - DNA, 3300 bp, Salmonella enterica subsp. enterica serovar Paratyphi A; identical to SEQ ID NO: 29993

SEQ ID NO: 30218 - DNA, 6321 bp, Salmonella enterica subsp. enterica serovar Paratyphi A; identical to SEQ ID NO: 29992

SEQ ID NO: 30219 - DNA, 3300 bp, Salmonella enterica subsp. enterica serovar Paratyphi A; identical to SEQ ID NO: 29993

SEQ ID NO: 30220 - DNA, 6321 bp, Salmonella enterica subsp. enterica serovar Paratyphi A; identical to SEQ ID NO: 29992

SEQ ID NO: 30221 - DNA, 3300 bp, Salmonella enterica subsp. enterica serovar Paratyphi A; identical to SEQ ID NO: 29993

SEQ ID NO: 30222 - DNA, 6321 bp, Salmonella enterica subsp. enterica serovar Paratyphi A; identical to SEQ ID NO: 29992

SEQ ID NO: 30223 - DNA, 3300 bp, Salmonella enterica subsp. enterica serovar Paratyphi A; identical to SEQ ID NO: 29993

SEQ ID NO: 30224 - DNA, 6321 bp, Salmonella enterica subsp. enterica serovar Paratyphi A; identical to SEQ ID NO: 29992

SEQ ID NO: 30225 - DNA, 3300 bp, Salmonella enterica subsp. enterica serovar Paratyphi A; identical to SEQ ID NO: 29993

SEQ ID NO: 30226 - DNA, 6321 bp, Salmonella enterica subsp. enterica serovar Paratyphi A; identical to SEQ ID NO: 29992

SEQ ID NO: 30227 - DNA, 3300 bp, Salmonella enterica subsp. enterica serovar Paratyphi A; identical to SEQ ID NO: 29993

SEQ ID NO: 30228 - DNA, 6321 bp, Salmonella enterica subsp. enterica serovar Paratyphi A; identical to SEQ ID NO: 29992

SEQ ID NO: 30229 - DNA, 3300 bp, Salmonella enterica subsp. enterica serovar Paratyphi A; identical to SEQ ID NO: 29993

SEQ ID NO: 30230 - DNA, 6321 bp, Salmonella enterica subsp. enterica serovar Paratyphi A; identical to SEQ ID NO: 29992

SEQ ID NO: 30231 - DNA, 3300 bp, Salmonella enterica subsp. enterica serovar Paratyphi A; identical to SEQ ID NO: 29993

SEQ ID NO: 30232 - DNA, 6321 bp, Salmonella enterica subsp. enterica serovar Paratyphi A; identical to SEQ ID NO: 29992

SEQ ID NO: 30233 - DNA, 3300 bp, Salmonella enterica subsp. enterica serovar Paratyphi A; identical to SEQ ID NO: 29993

SEQ ID NO: 30234 - DNA, 6321 bp, Salmonella enterica subsp. enterica serovar Paratyphi A; identical to SEQ ID NO: 29992

SEQ ID NO: 30235 - DNA, 3300 bp, Salmonella enterica subsp. enterica serovar Paratyphi A; identical to SEQ ID NO: 29993

SEQ ID NO: 30236 - DNA, 6321 bp, Salmonella enterica subsp. enterica serovar Paratyphi A; identical to SEQ ID NO: 29992

SEQ ID NO: 30237 - DNA, 3300 bp, Salmonella enterica subsp. enterica serovar Paratyphi A; identical to SEQ ID NO: 29993

SEQ ID NO: 30238 - DNA, 6321 bp, Salmonella enterica subsp. enterica serovar Paratyphi A; identical to SEQ ID NO: 29992

SEQ ID NO: 30239 - DNA, 3300 bp, Salmonella enterica subsp. enterica serovar Paratyphi A; identical to SEQ ID NO: 29993

SEQ ID NO: 30240 - DNA, 6321 bp, Salmonella enterica subsp. enterica serovar Paratyphi A; identical to SEQ ID NO: 29992

SEQ ID NO: 30241 - DNA, 3300 bp, Salmonella enterica subsp. enterica serovar Paratyphi A; identical to SEQ ID NO: 29993

SEQ ID NO: 30242 - DNA, 6321 bp, Salmonella enterica subsp. enterica serovar Paratyphi A; identical to SEQ ID NO: 29992

SEQ ID NO: 30243 - DNA, 3300 bp, Salmonella enterica subsp. enterica serovar Paratyphi A; identical to SEQ ID NO: 29993

SEQ ID NO: 30244 - DNA, 6321 bp, Salmonella enterica subsp. enterica serovar Paratyphi A; identical to SEQ ID NO: 29992

SEQ ID NO: 30245 - DNA, 3300 bp, Salmonella enterica subsp. enterica serovar Paratyphi A; identical to SEQ ID NO: 29993

SEQ ID NO: 30246 - DNA, 6321 bp, Salmonella enterica subsp. enterica serovar Paratyphi A; identical to SEQ ID NO: 29992

SEQ ID NO: 30247 - DNA, 3300 bp, Salmonella enterica subsp. enterica serovar Paratyphi A; identical to SEQ ID NO: 29993

SEQ ID NO: 30248 - DNA, 6321 bp, Salmonella enterica subsp. enterica serovar Paratyphi A; identical to SEQ ID NO: 29992

SEQ ID NO: 30249 - DNA, 3300 bp, Salmonella enterica subsp. enterica serovar Paratyphi A; identical to SEQ ID NO: 29993

SEQ ID NO: 30250 - DNA, 6321 bp, Salmonella enterica subsp. enterica serovar Paratyphi A; identical to SEQ ID NO: 29992

SEQ ID NO: 30251 - DNA, 3300 bp, Salmonella enterica subsp. enterica serovar Paratyphi A; identical to SEQ ID NO: 29993

SEQ ID NO: 30252 - DNA, 6321 bp, Salmonella enterica; identical to SEQ ID NO: 29992
  subsp. enterica serovar Paratyphi A str. AKU_12601

SEQ ID NO: 30253 - DNA, 3300 bp, Salmonella enterica; identical to SEQ ID NO: 29993
  subsp. enterica serovar Paratyphi A str. AKU_12601

SEQ ID NO: 30254 - DNA, 6321 bp, Salmonella enterica; identical to SEQ ID NO: 29992
  subsp. enterica serovar Paratyphi A str. ATCC 11511

SEQ ID NO: 30255 - DNA, 3300 bp, Salmonella enterica; identical to SEQ ID NO: 29993
  subsp. enterica serovar Paratyphi A str. ATCC 11511

SEQ ID NO: 30256 - DNA, 6321 bp, Salmonella enterica; identical to SEQ ID NO: 29992
  subsp. enterica serovar Paratyphi A str. ATCC 9150

SEQ ID NO: 30257 - DNA, 3300 bp, Salmonella enterica; identical to SEQ ID NO: 29993
  subsp. enterica serovar Paratyphi A str. ATCC 9150

SEQ ID NO: 30258 - DNA, 6321 bp, Salmonella enterica
  subsp. enterica serovar Paratyphi A str. GXS2268
atgactacacgctatttttcttcgctgattgaacaatcactgtcgcgttctacggaggcgacgctgagtattatgggggtgaccaacccgaatcttcgcgagcatctcacgcaacaaatggcggccgattgcgggaaagaaggatcgtttcttgcctcccccgtatttgaacagacatttggctggaaagagtccaacagcacaatgaaagaccttgcaacaaaacaaacgttgctaagcaaggaggtggtggactcgctggatagtgaggaaaatggtcgttatcgttttggctctgactggaaacctttcacgcatcagttagccagctggcaatcattacttgagaaaaaacactcagtcgtggtgaccagcgggacaggctctggcaaaacggaatgctttatggtcccggtactggaagacctctatcgtgagcttcaggtcaagaacaaaaaaccgttgataggtgtgagagcactttttctttacccactgaatgccctgattaattcccagcgcgagcgtttagatgcgtggacccgtagttttggttccggaattcggtactgtctgtataacggtaacacagaagaattgcacgctttggtcaaaagtgagcaggcaaacaggcctaatgaggttttgtcacgagagaagatgcgtgaagaacccgcccccattttagtgaccaacggtaccatgctggaatacatgatggttcgtcaggttgatgcaccgattattcagaaatcaaaagctgaaaaatcattacgctggatagttctggatgaagcccatacctacgttggttctcaggccgctgagttggctctacagctccgtcgcgtcatgacggcatttggcgtcacgcctgatgatgttcgctttgtggcgacgtcggccaccattgccggaagtgatgctgaaaagcagctgaaaaaattcttgtctgagctgtcaggagtgccacaggaacgtattgatgttctgggcggaagccgcgttattcctgagctcgaaccctgcaaacaatattctctgtcactggatgagattgagcatatccctgattcggagagtgaagggatcagtccggagcgttatagtgcgttgacccactctccggaagcgcgctgtttacgcgaaatgctggttagccaaccccgaccaatgaaacttgatacgctgacccagcgtttgaacgagctgaccaaacatcagtacacgcagcaggatgttttacgctggatcgatctttgctctggcacactccctaatgcaaaggatcctgcatttctgaaagtcagagcacatattttccagcgaaacacccagggcatctgggcatgtgtggataagaactgtgcagctaaaaaaaataccgcgctggaaaaaaactggtcttttggcaatgtgtatgtaaatcagcggcaaaacggcgagtgcggcagtcccgtttttgaactggcattcttcaatgagtgtaatgaaccgcatcttcttgcacgggataaaaaaggcaaactcgtacagtgggataataaaggtggagatgaattctccctacaggatgaaatttctgacgattttgaaacatccggagaaaagattcagaaggattttgtattccagtcgccacaaattattgctgcggaatgtaatacggaagctggctatattatgcagcggctcgatcgtcagacccgcagtatcggcgtggtgaacccggacagtattccgctggcaattaatgatatcgaacaaatctgtagtgccagcaattgtggctataaaggcggaaagggtaaacagcccttccgaagggcgttactgggcgggcctttttatgtcaccaatattgtgcctacggtgctggagtattgtcaggacttcactagtgatgaaggtaaagatggtgtcggcccgctctctttgcctggtcgaggtcgtcgcctgattacctttaccgacagtcgtcaggggacggcgcgaatggcagtacgtatgcagcaggaagcagagcgcagccgattacgtggtagcgtagtagaaattcttggctggcacaaacgaaaacagccaacgagtgctccgaatgaccaggctgacgtgatgaaactggttgcaagggtgacacaataccgtgaagaagcccgggagtatcgcgagtggggaatgcccgaggaagcaaaactttctgaagctcaggccgaacgccttgaacaggcaatccagacggcgacggggggaaaggctgcaaccattttagtttgccgaacctggacggaaatggtcaatgatctgaaagagaaagccgatatacagggaccaattttacaatataaccattatctgaagcctgaaattttcaccgaaaatggcggccctttgaaactcgccgaaatgctgcttttccgtgagtttatgcgacgcccgaaacgaaccaacagcctggaaacccaggggctggttcaggttggctatcaggggctggagaaggctcacagtgttcctactcactggcaggctaaaggcttaacccttgatgactggcgcgattttctgaaggtggcgctggatttctatgtcagagaaagcaactacatccaactggatgacgatctaagaaactggatcggtagccgtttctcttccaaatttgtccgcaacccagattcgaaagagccagatgacaaccaggttaaacgctggccgcaaattcgccacggtaatgtgactcagcgcctggtcaagctgttgattttaggggccaaatttaacaccgtaaatacggtaactattgatattgttaacgcctggctgaaagaagcctggctccagctaacaggatctctggcggtattgaagcctgatggaaaccgtttttatttaccgaaagagcatctgacattctctctggtgcaaaaagcacgcatttgtccagtgaccaataaattactggcgacaaccttcaaaggtctgaccccctatttgcccatgcatatccagttcgagcgactgacgagtgcacagtacgacgcgtttttggctcaggaagtcacgctgccagcgatctgggaacacgatcgctctcaggatgattatgtcgacgggttaacaaaagtgcgtgactgggtaagccaggatccgcaagtgctaccattacgctcgcaaaacctctggacggacattaacgatcgcgtggtagaaggtggattttactaccgcaccgcagaacactcggcacagcaatcgtcggagcgcctgcaaagctacgaaagaatgtttaaaaacgggcagcttaacgtccttaactgctcaaccacgatggaaatgggtgtggatattggcggtatttctgcagtggtgatgaacaacgttcctccgcatccggccaactatttacagcgagccgggcgtgccgggcgtagtaaagagtcacgcgctatttcgtacaccttgtgcaaagggaacccgcacgatcagcaggtttttgctaatcccctctggccgtttgagacggtgatcccggctccaatggtggcaatgaactcagagcgtctggtgcagcgtcacgtcaattccctgttactgtcagaatacttatgccatgtggtcggtgaaaccgaaaaagagcgtaccagccttaatagccagtggttctttggcgaagagctcgaccagtcggtatgcaatcgttttaaagcctggctcgaacgtccgacgctgagcattgataacgcgctggagcgtctggttaaagggacggcattgcacggcgttacggcagaaaaactgcgggataaaacgcaggaggctattgccgtcttacagacacgctggctggggatcttccgcgatctcgtgaaacaggaaagtgaatcgcagcccaatacgccgtaccgcaggcgactggaactggagaaaaaacggcattgtggtgaatacctgttacgcgatctggcggcccgaactttcctacccggatatggcttcccaacggatgttgtcacttttgataacttcaccatggaagattatatccgcgagaaaacgcacaaaagcagtgataagaatgaccgggaggataacgtttcgcgttataaagggctgccttcgcgcaacctttccgttgcgatccgtgagtatgcgccgggcgcggagattatccttgatggtcgggtattccgctcggccggtgtttcgctgcactggcataaccttaacgccgatactaacgaagcccagcgtctggacagcgcctggcgttgccataaatgcggtactttaggctatgaggaaggtattggtggctcgggggatttattctgtaccaatagcgcgtgcggggagcggatcacgctggataaccgacgtcaggtattacagcccgccggttttgtcaccgatgcccatactcccgttacgaacaacattgaaacaatgaaattcatcccggtggtgcctgcctgggtgtttgtgaaagcagaacgcgtgccactgccaaacccgctgatgggttttatggcgtcaggcgcggatggtcatgttttccagcagagcatgggcgaaggtggacacggttatgcgctgtgcctgagctgcggccgggcggagtcaatgctcaatgccaccgatacgccgaaatcgatggaagcgcattatcctccgcgccccggtaaatctgatcgcgacagccagaatcagcggattatctgccctggctccacggcgctgaataagaatgtcacgctgggtgcgctggcgcgcaccgatgtgtttgaactcattttgcgccgtccgcaaaacggggagtatatccccgataattctgatgaaggccgtattgtggccatgacgctggcggttgcactacgtcgagcgctggccagcgtgctgggggtatcggcgacagaactgggctatgcggtgcgtccggtcagactggataatgagcaatcggtcctggcggtgcagctttacgacattatcagcggcggtgcggggtttgcttccagtgcgccattgcatattgaagcggtcctcaaagggatggtgaaacagctgggatgccgccactgtgataccgcctgtagcgaatgtctgctcgattcgcagacccgccacgatcacgatcagctggatcgtaaagccgcgcaggcctggctgggggaggatttcagtcactatatcggtttgccggaggcggaaaaattctccctggccgacgcgcagtattgcccaggcagcattgaggatgctatccgtcgtgccattaacgacggggcgcgcaaactcacgttgtggatgaatgggccgcttaacgagtgggatttgtatgcccgccagttccgaacggcgatccagaactatcggctgaaagatgaggttgaggttacgctggttgtgcccggtcatattgaagatccggagcttttacaggagattgcgcagtttgccgccattggtgtgcagctttgccagtctgagctgaatacggatacgccggttgtcgcacaggtagcattcaacgatcgcctgatgacgttgatttctcgcagcccagaggccaccatccccggcccgaactggcatctgaatagccagatggttattcgcagccatgcgtttgagccgataacgcttagtaaagcagagctattatccgatgccgcaggtagcagaggcctggtcaacgatattgagatccataagcagcttaatggcccggtttctcagtttggtcagcgtttctggggcgtgttaaccggggcgcaggaagatattcagacgctgctgaaggaaaaccaggtgacgcgcattcactatagcgatcgttatctgcaaaacccggtggcgctggcgttattaggcgggctgttaaaaccgctgaaatcgatcctggcgcaggatgcgcaagtgacgattgatacgctgtttaagagtaaagagcggccaggcaacaagccgttccatgactggatgagtgaagcggattttcaggattttgccgaccagtggtttgcggcatctatgggcagagccgtcgtggttaacaccgttggctcgccgcgtgatattccacaccatcgtaaactgatggtgaccttcagtaatggtcaggcgctgaagatccgttttgaccaagggatgggatactggcgcatcgtctttgcgcgagcgtatcgcgattttgattttaacgatgatgtggctttccagctcgggaatatggcaaaagcctgcgttgaaggtcaggtggtcaacagcgaggaaagttgggcaaccgatgtgctggtgcaggtgatagtcccttaa

SEQ ID NO: 30259 - DNA, 3300 bp, Salmonella enterica
  subsp. enterica serovar Paratyphi A str. GXS2268
ttgagtcagtccgaatacacatccattctaaagtgtaccccatggctagctaaattcctcacccgcagaggattgaagcaaccagaccatcgtccgttatatgaataccacgcaacgagtgaagaatatgatgaattgaaacggctgctgcgagctataggggtacccgatggttataaaagtgataaagggtacgcagcctgtttcacattgttctgctcagagtggtatcgaagagattatgaaagagagtatggatgggcatgggagccaatttacaagacgataggtatctcagcatcttcctcggaaatggggaaaattatccctaaaggcctggatggttactgggggcgtccagtgcggttttatgacacagaaaggcggaatttcttaggctccttattcagtgaaggcggtctacctttcagtttgctaaaggaatctaatagccgttttcagtcgatgttttctctcattctaaatcaatacgatcaggctaaatcttctaacatttccacgttcgcgttagtccatgcagcggtagaaaaatcatccctgccagtcgttttcaaagaggatacttcagttgagcttattagtcggatggctgaacagttagtatctcttgttcaaatttataatttaagtaatcataccgaacccgtaaaagaacttgaacgtgttcatcctaagtggcgtgacagtttccctgtccctctcgatgatgatacgggtaccagtttccttaatggacttttacgaacagcttctactgaatcaaaaccccgccttcaaaagaataaaaccactctctgtcagtttttatggtcagaaaatcatcctgaagccctccaggctctcatttctctgcctgaagaactgagtttttcaattgatattgagccttcaacaacgcgcttcgagcttgctatctatgaagatggtaacgaaatcgcaagtctgggacctgcatatgcaacgctaagtaactcccaggcaaaaataaaagttcgtaagcgcgagattaaattttaccgaagaaatcccacggtcagtttgtttattgtggcgagagctgggggtatgtttttcggctccaatcttttagaaggcagtgaagttgcggttggcgatgttccattggtttttgtttctgataaaaatgaatggctgttacagggacaagcctcttgcagcgtacgtggcagccatgtacttattgtgctgccaaaggatggctgtctggcttcagaacatgaggattgtgactctggcttttcggctttgggatgccatgctctgaccatcaaaggtcgccaggatatcatcattaaaggcgatgaaacgtaccggataaagataggaagagatcagattatccatactggattctctttccaggggaagcgattaaattggacaagttatccggatgaactcttcctcggtgttcctggaattactcaacattctgagaatctatcaacgcgccattacaagcgttttttcaacggaacatttatagaaaattgtgatgtacaagaaaaaatgggagcacagtttatttcggtgcgtaacgaaaatgatgaaacgttactgcgtaagaaaattggcattctccccaatgattttagtctggaaataaaaaatggacaacaggcgaacgaaggttctgtcattattactactcagcacccttgtttgtatagcttgaaggaaaaaacacttgaagttggacggaagcggttgcccggtagtacagaaataatgatgaaggcggagggcattcctcctgcatcaatttcattacaaataacgccaaacctcactgcaaacccgattgttatttggttaccatttcctgcacgaggctgtcttgcgttcgataaagatgagaaacctctcccgaaaaatttaacgattaacgatcttctgggtgccagagcatatcttttcggaaaaaatggtgagcctacgcgataccagcttgaactacgtttacgttcgcgtagtggaatgcaggcctggtatgagtggcactacagtgcgggagaatgtccggtagagcttactttatatagcttaagggaacatattgataatttactctccctggaggaaggaattgatcaaacagttgatatgcgcataaaaggaggtggtagttcttttacctggcagatccgacgttataaatatagtctggactatgatcgtggcaggcagattcttctcgcaaactcaataagtaatcgtacaggccagatcccttcgcccgtcattatgttactcagcgaaccggagagaaaagttgtactgctgacgtcaagaatgagcgaaggtgtaccagttggtgaatttgaactaagttcgataatacaaaagaatggcccatggctggtgctgccgaaaccaggtgaagaagcctcatttcgaccttgctttattgcaggtgagccggtaattcaaagcgacgcgacagcaatacagtctttacaaaaagcaacgcagctttttaatcctcgttcagatgtcaacaccattatgttagttctggaacaaatggcgagcgacccggcacactcgggctggcagttcttacgcaatttatacgatcagttcgggtatttacctttggctacctttgaagtatggcgggcacttgttcagcatccacaagcgttggcgatgtcgctgttcaaatttgaaatgtccattgattatctcagccgtattgaaagtgagtttcccgttttctgggagtttttatccattacaaaagttaaacgttccgccacacgttttcgtgcttttttgactcataaaggtgcaccggaggaaatgcagataaggctgctggacagaatgtatcaacagctgggcacaacattcccgacttatgccagtgaggtgcaattatggttgagtcaagggaaattaccaccggtttttcctgagttgacgatgaaaggtattatccttgagtggtatcaggaacttctacgcgaacatggtgaatctcgctggccagaatttggtggcccaggccttttacgttggtatatgtcgcaacaaaatcctgttatcgatatttcccctgatgccagctaccgctattccgtcaccttgctccccgtatttgctgctgctgttgccagcggtaaaacaacatttgaaagtgtttttgagaataagcccggcgccgtatttttcttgagacaggttagagattttgactcacgatggtttaacgccattttccaatactgtctattgcgtaatgttactgaaaaataa

SEQ ID NO: 30260 - DNA, 6321 bp, Salmonella enterica; identical to SEQ ID NO: 29992
  subsp. enterica serovar Paratyphi A str. GZ9A00052

SEQ ID NO: 30261 - DNA, 3300 bp, Salmonella enterica
  subsp. enterica serovar Paratyphi A str. GZ9A00052
ttgagtcagtccgaatacacatccattctaaagtgtaccccatggctagctaaattcctcacccgcagaggattgaagcaaccagaccatcgtccgttatatgaataccacgcaacgagtgaagaatatgatgaattgaaacggctgctgcgagctataggggtacccgatggttataaaagtgataaagggtacgcagcctgtttcacattgttctgctcagagtggtatcgaagagattatgaaagagagtatggatgggcatgggagccaatttacaagacgataggtatctcagcatcttcctcggaaatggggaaaattatccctaaaggcctggatggttactgggggcgtccagtgcggttttatgacacagaaaggcggaatttcttaggctccttattcagtgaaggcggtctacctttcaggttgctaaaggaatctaatagccgttttcagtcgatgttttctctcattctaaatcaatacgatcaggctaaatcttctaacatttccacgttcgcgttagtccatgcagcggtagaaaaatcatccctgccagtcgttttcaaagaggatacttcagttgagcttattagtcggatggctgaacagttagtatctcttgttcaaatttataatttaagtaatcataccgaacccgtaaaagaacttgaacgtgttcatcctaagtggcgtgacagtttccctgtccctctcgatgatgatacgggtaccagtttccttaatggacttttacgaacagcttctactgaatcaaaaccccgccttcaaaagaataaaaccactctctgtcagtttttatggtcagaaaatcatcctgaagccctccaggctctcatttctctgcctgaagaactgagtttttcaattgatattgagccttcaacaacgcgcttcgagcttgctatctatgaagatggtaacgaaatcgcaagtctgggacctgcatatgcaacgctaagtaactcccaggcaaaaataaaagttcgtaagcgcgagattaaattttaccgaagaaatcccacggtcagtttgtttattgtggcgagagctgggggtatgtttttcggctccaatcttttagaaggcagtgaagttgcggttggcgatgttccattggtttttgtttctgataaaaatgaatggctgttacagggacaagcctcttgcagcgtacgtggcagccatgtacttattgtgctgccaaaggatggctgtctggcttcagaacatgaggattgtgactctggcttttcggctttgggatgccatgctctgaccatcaaaggtcgccaggatatcatcattaaaggcgatgaaacgtaccggataaagataggaagagatcagattatccatactggattctctttccaggggaagcgattaaattggacaagttatccggatgaactcttcctcggtgttcctggaattactcaacattctgagaatctatcaacgcgccattacaagcgttttttcaacggaacatttatagaaaattgtgatgtacaagaaaaaatgggagcacagtttatttcggtgcgtaacgaaaatgatgaaacgttactgcgtaagaaaattggcattctccccaatgattttagtctggaaataaaaaatggacaacaggcgaacgaaggttctgtcattattactactcagcacccttgtttgtatagcttgaaggaaaaaacacttgaagttggacggaagcggttgcccggtagtacagaaataatgatgaaggcggagggcattcctcctgcatcaatttcattacaaataacgccaaacctcactgcaaacccgattgttatttggttaccatttcctgcacgaggctgtcttgcgttcgataaagatgagaaacctctcccgaaaaatttaacgattaacgatcttctgggtgccagagcatatcttttcggaaaaaatggtgagcctacgcgataccagcttgaactacgtttacgttcgcgtagtggaatgcaggcctggtatgagtggcactacagtgcgggagaatgtccggtagagcttactttatatagcttaagggaacatattgataatttactctccctggaggaaggaattgatcaaacagttgatatgcgcataaaaggaggtggtagttcttttacctggcagatccgacgttataaatatagtctggactatgatcgtggcaggcagattcttctcgcaaactcaataagtaatcgtacaggccagatcccttcgcccgtcattatgttactcagcgaaccggagagaaaagttgtactgctgacgtcaagaatgagcgaaggtgtaccagttggtgaatttgaactaagttcgataatacaaaagaatggcccatggctggtgctgccgaaaccaggtgaagaagcctcatttcgaccttgctttattgcaggtgagccggtaattcaaagcgacgcgacagcaatacagtctttacaaaaagcaacgcagctttttaatcctcgttcagatgtcaacaccattatgttagttctggaacaaatggcgagcgacccggcacactcgggctggcagttcttacgcaatttatacgatcagttcgggtatttacctttggctacctttgaagtatggcggggacctgttcagcatccacaagcggtggcgatgtcgctgttcaaatttgaaatgtccattgattatctcagccgtattgaaagtgagtttcccgttttctgggagtttttatccattacaaaagttaaacgttccgccacacgttttcgtgcttttttgactcataaaggtgcaccggaggaaatgcagataaggctgctggacagaatgtatcaacagctgggcacaacattcccgacttatgccagtgaggtgcaattatggttgagtcaagggaaattaccaccggtttttcctgagttgacgatgaaaggtattatccttgagtggtatcaggaacttctacgcgaacatggtgaatctcgctggccagaatttggtggcccaggccttttacgttggtatatgtcgcaacaaaatcctgttatcgatatttcccctgatgccagctaccgctattccgtcaccttgctccccgtatttgctgctgctgttgccagcggtaaaacaacatttgaaagtgtttttgagaataagcccggcgccgtatttttcttgagacaggttagagattttgactcacgatggtttaacgccattttccaatactgtctattgcgtaatgttactgaaaaataa

SEQ ID NO: 30262 - DNA, 6321 bp, Salmonella enterica
  subsp. enterica serovar Paratyphi A str. JX05-19
atgactacacgctatttttcttcgctgattgaacaatcactgtcgcgttctacggaggcgacgctgagtattatgggggtgaccaacccgaatcttcgcgagcatctcacgcaacaaatggcggccgattgcgggaaagaaggatcgtttcttgcctcccccgtatttgaacagacatttggctggaaagagtccaacagcacaatgaaagaccttgcaacaaaacaaacgttgctaagcaaggaggtggtggactcgctggatagtgaggaaaatggtcgttatcgttttggctctgactggaaacctttcacgcatcagttagccagctggcaatcattacttgagaaaaaacactcagtcgtggtgaccagcgggacaggctctggcaaaacggaatgctttatggtcccggtactggaagacctctatcgtgagcttcaggtcaagaacaaaaaaccgttgataggtgtgagagcactttttctttacccactgaatgccctgattaattcccagcgcgagcgtttagatgcgtggacccgtagttttggttccggaattcggtactgtctgtataacggtaacacagaagaattgcacgctttggtcaaaagtgagcaggcaaacaggcctaatgaggttttgtcacgagagaagatgcgtgaagaacccgcccccattttagtgaccaacggtaccatgctggaatacatgatggttcgtcaggttgatgcaccgattattcagaaatcaaaagctgaaaaatcattacgctggatagttctggatgaagcccatacctacgttggttctcaggccgctgagttggctctacagctccgtcgcgtcatgacggcatttggcgtcacgcctgatgatgttcgctttgtggcgacgtcggccaccattgccggaagtgatgctgaaaagcagctgaaaaaattcttgtctgagctgtcaggagtgccacaggaacgtattgatgttctgggcggaagccgcgttattcctgagctcgaaccctgcaaacaatattctctgtcactggatgagattgagcatatccctgattcggagagtgaagggatcagtccggagcgttatagtgcgttgacccactctccggaagcgcgctgtttacgcgaaatgctggttagccaaccccgaccaatgaaacttgatacgctgacccagcgtttgaacgagctgaccaaacatcagtacacgcagcaggatgttttacgctggatcgatctttgctctggcacactccctaatgcaaaggatcctgcatttctgaaagtcagagcacatattttccagcgaaacacccagggcatctgggcatgtgtggataagaactgtgcagctaaaaaaaataccgcgctggaaaaaaactggtcttttggcaatgtgtatgtaaatcagcggcaaaactgcgagtgcggcagtcccgtttttgaactggcattctgcaatgagtgtaatgaaccgcatcttcttgcacgggataaaaaaggcaaactcgtacagtgggataataaaggtggagatgaattctccctacaggatgaaatttctgacgattttgaaacatccggagaaaagattcagaaggattttgtattccagtcgccacaaattattgctgcggaatgtaatacggaagctggctatattatgcagcggctcgatcgtcagacccgcagtatcggcgtggtgaacccggacagtattccgctggcaattaatgatatcgaacaaatctgtagtgccagcaattgtggctataaaggcggaaagggtaaacagcccttccgaagggcgttactgggcgggcctttttatgtcaccaatattgtgcctacggtgctggagtattgtcaggacttcactagtgatgaaggtaaagatggtgtcggcccgctctctttgcctggtcgaggtcgtcgcctgattacctttaccgacagtcgtcaggggacggcgcgaatggcagtacgtatgcagcaggaagcagagcgcagccgattacgtggtagcgtagtagaaattctttgctggccccaacgaaaacagccaacgagtgctccgaatgaccaggctgacgtgatgaaactggttgcaagggtgacacaataccgtgaagaagcccgggagtatcgcgagtggggaatgcccgaggaagcaaaactttctgaagctcaggccgaacgccttgaacaggcaatccagacggcgacggggggaaaggctgcaaccattttagtttgccgaacctggacggaaatggtcaatgatctgaaagagaaagccgatatacagggaccaattttacaatataaccattatctgaagcctgaaattttcaccgaaaatggcggccctttgaaactcgccgaaatgctgcttttccgtgagtttatgcgacgcccgaaacgaaccaacagcctggaaacccaggggctggttcaggttggctatcaggggctggagaaggctcacagtgttcctactcactggcaggctaaaggcttaacccttgatgactggcgcgattttctgaaggtggcgctggatttctatgtcagagaaagcaactacatccaactggatgacgatctaagaaactggatcggtagccgtttctcttccaaatttgtccgcaacccagattcgaaagagccagatgacaaccaggttaaacgctggccgcaaattcgccacggtaatgtgactcagcgcctggtcaagctgttgattttaggggccaaatttaacaccgtaaatacggtaactattgatattgttaacgcctggctgaaagaagcctggctccagctaacaggatctctggcggtattgaagcctgatggaaaccgtttttatttaccgaaagagcatctgacattctctctggtgcaaaaagcacgcatttgtccagtgaccaataaattactggcgacaaccttcaaaggtctgaccccctatttgcccatgcatatccagttcgagcgactgacgagtgcacagtacgacgcgtttttggctcaggaagtcacgctgccagcgatctgggaacacgatcgctctcaggatgattatgtcgacgggttaacaaaagtgcgtgactgggtaagccaggatccgcaagtgctaccattacgctcgcaaaacctctggacggacattaacgatcgcgtggtagaaggtggattttactaccgcaccgcagaacactcggcacagcaatcgtcggagcgcctgcaaagctacgaaagaatgtttaaaaacgggcagcttaacgtccttaactgctcaaccacgatggaaatgggtgtggatattggcggtatttctgcagtggtgatgaacaacgttcctccgcatccggccaactatttacagcgagccgggcgtgccgggcgtagtaaagagtcacgcgctatttcgtacaccttgtgcaaagggaacccgcacgatcagcaggtttttgctaatcccctctggccgtttgagacggtgatcccggctccaatggtggcaatgaactcagagcgtctggtgcagcgtcacgtcaattccctgttactgtcagaatacttatgccatgtggtcggtgaaaccgaaaaagagcgtaccagccttaatagccagtggttctttggcgaagagctcgaccagtcggtatgcaatcgttttaaagcctggctcgaacgtccgacgctgagcattgataacgcgctggagcgtctggttaaagggacggcattgcacggcgttacggcagaaaaactgcgggataaaacgcaggaggctattgccgtcttacagacacgctggctggggatcttccgcgatctcgtgaaacaggaaagtgaatcgcagcccaatacgccgtaccgcaggcgactggaactggagaaaaaacggcattgtggtgaatacctgttacgcgatctggcggcccgaactttcctacccggatatggcttcccaacggatgttgtcacttttgataacttcaccatggaagattatatccgcgagaaaacgcacaaaagcagtgataagaatgaccgggaggataacgtttcgcgttataaagggctgccttcgcgcaacctttccgttgcgatccgtgagtatgcgccgggcgcggagattatccttgatggtcgggtattccgctcggccggtgtttcgctgcactggcataaccttaacgccgatactaacgaagcccagcgtctggacagcgcctggcgttgccataaatgcggtactttaggctatgaggaaggtattggtggctcgggggatttattctgtaccaatagcgcgtgcggggagcggatcacgctggataaccgacgtcaggtattacagcccgccggttttgtcaccgatgcccatactcccgttacgaacaacattgaaacaatgaaattcatcccggtggtgcctgcctgggtgtttgtgaaagcagaacgcgtgccactgccaaacccgctgatgggttttatggcgtcaggcgcggatggtcatgttttccagcagagcatgggcgaaggtggacacggttatgcgctgtgcctgagctgcggccgggcggagtcaatgctcaatgccaccgatacgccgaaatcgatggaagcgcattatcctccgcgccccggtaaatctgatcgcgacagccagaatcagcggattatctgccctggctccacggcgctgaataagaatgtcacgctgggtgcgctggcgcgcaccgatgtgtttgaactcattttgcgccgtccgcaaaacggggagtatatccccgataattctgatgaaggccgtattgtggccatgacgctggcggttgcactacgtcgagcgctggccagcgtgctgggggtatcggcgacagaactgggctatgcggtgcgtccggtcagactggataatgagcaatcggtcctggcggtgcagctttacgacattatcagcggcggtgcggggtttgcttccagtgcgccattgcatattgaagcggtcctcaaagggatggtgaaacagctgggatgccgccactgtgataccgcctgtagcgaatgtctgctcgattcgcagacccgccacgatcacgatcagctggatcgtaaagccgcgcaggcctggctgggggaggatttcagtcactatatcggtttgccggaggcggaaaaattctccctggccgacgcgcagtattgcccaggcagcattgaggatgctatccgtcgtgccattaacgacggggcgcgcaaactcacgttgtggatgaatgggccgcttaacgagtgggatttgtatgcccgccagttccgaacggcgatccagaactatcggctgaaagatgaggttgaggttacgctggttgtgcccggtcatattgaagatccggagcttttacaggagattgcgcagtttgccgccattggtgtgcagctttgccagtctgagctgaatacggatacgccggttgtcgcacaggtagcattcaacgatcgcctgatgacgttgatttctcgcagcccagaggccaccatccccggcccgaactggcatctgaatagccagatggttattcgcagccatgcgtttgagccgataacgcttagtaaagcagagctattatccgatgccgcaggtagcagaggcctggtcaacgatattgagatccataagcagcttaatggcccggtttctcagtttggtcagcgtttctggggcgtgttaaccggggcgcaggaagatattcagacgctgctgaaggaaaaccaggtgacgcgcattcactatagcgatcgttatctgcaaaacccggtggcgctggcgttattaggcgggctgttaaaaccgctgaaatcgatcctggcgcaggatgcgcaagtgacgattgatacgctgtttaagagtaaagagcggccaggcaacaagccgttccatgactggatgagtgaagcggattttcaggattttgccgaccagtggtttgcggcatctatgggcagagccgtcgtggttaacaccgttggctcgccgcgtgatattccacaccatcgtaaactgatggtgaccttcagtaatggtcaggcgctgaagatccgttttgaccaagggatgggatactggcgcatcgtctttgcgcgagcgtatcgcgattttgattttaacgatgatgtggctttccagctcgggaatatggcaaaagcctgcgttgaaggtcaggtggtcaacagcgaggaaagttgggcaaccgatgtgctggtgcaggtgatagtcccttaa

SEQ ID NO: 30263 - DNA, 3300 bp, Salmonella enterica; identical to SEQ ID NO: 29993
  subsp. enterica serovar Paratyphi A str. JX05-19

SEQ ID NO: 30264 - DNA, 6321 bp, Salmonella enterica
  subsp. enterica serovar Paratyphi A str. SA19950809
atgactacacgctatttttcttcgctgattgaacaatcactgtcgcgttctacggaggcgacgctgagtattatgggggtgaccaacccgaatcttcgcgagcatctcacgcaacaaatggcggccgattgcgggaaagaaggatcgtttcttgcctcccccgtatttgaacagacatttggctggaaagagtccaacagcacaatgaaagaccttgcaacaaaacaaacgttgctaagcaaggaggtggtggactcgctggatagtgaggaaaatggtcgttatcgttttggctctgactggaaacctttcacgcatcagttagccagctggcaatcattacttgagaaaaaacactcagtcgtggtgaccagcgggacaggctctggcaaaacggaatgctttatggtcccggtactggaagacctctatcgtgagcttcaggtcaagaacaaaaaaccgttgataggtgtgagagcactttttctttacccactgaatgccctgattaattcccagcgcgagcgtttagatgcgtggacccgtagttttggttccggaattcggtactgtctgtataacggtaacacagaagaattgcacgctttggtcaaaagtgagcaggcaaacaggcctaatgaggttttgtcacgagagaagatgcgtgaagaacccgcccccattttagtgaccaacggtaccatgctggaatacatgatggttcgtcaggttgatgcaccgattattcagaaatcaaaagctgaaaaatcattacgctggatagttctggatgaagcccatacctacgttggttctcaggccgctgagttggctctacagctccgtcgcgtcatgacggcatttggcgtcacgcctgatgatgttcgctttgtggcgacgtcggccaccattgccggaagtgatgctgaaaagcagctgaaaaaattcttgtctgagctgtcaggagtgccacaggaacgtattgatgttctgggcggaagccgcgttattcctgagctcgaaccctgcaaacaatattctctgtcactggatgagattgagcatatccctgattcggagagtgaagggatcagtccggagcgttatagtgcgttgacccactctccggaagcgcgctgtttacgcgaaatgctggttagccaaccccgaccaatgaaacttgatacgccgacccagcgtttgaacgagctgaccaaacatcagtacacgcagcaggatgttttacgctggatcgatctttgctctggcacactccctaatgcaaaggatcctgcatttctgaaagtcagagcacatattttccagcgaaacacccagggcatctgggcatgtgtggataagaactgtgcagctaaaaaaaataccgcgctggaaaaaaactggtcttttggcaatgtgtatgtaaatcagcggcaaaactgcgagtgcggcagtcccgtttttgaactggcattctgcaatgagtgtaatgaaccgcatcttcttgcacgggataaaaaaggcaaactcgtacagtgggataataaaggtggagatgaattctccctacaggatgaaatttctgacgattttgaaacatccggagaaaagattcagaaggattttgtattccagtcgccacaaattattgctgcggaatgtaatacggaagctggctatattatgcagcggctcgatcgtcagacccgcagtatcggcgtggtgaacccggacagtattccgctggcaattaatgatatcgaacaaatctgtagtgccagcaattgtggctataaaggcggaaagggtaaacagcccttccgaagggcgttactgggcgggcctttttatgtcaccaatattgtgcctacggtgctggagtattgtcaggacttcactagtgatgaaggtaaagatggtgtcggcccgctctctttgcctggtcgaggtcgtcgcctgattacctttaccgacagtcgtcaggggacggcgcgaatggcagtacgtatgcagcaggaagcagagcgcagccgattacgtggtagcgtagtagaaattcttggctggcaccaacgaaaacagccaacgagtgctccgaatgaccaggctgacgtgatgaaactggttgcaagggtgacacaataccgtgaagaagcccgggagtatcgcgagtggggaatgcccgaggaagcaaaactttctgaagctcaggccgaacgccttgaacaggcaatccagacggcgacggggggaaaggctgcaaccattttagtttgccgaacctggacggaaatggtcaatgatctgaaagagaaagccgatatacagggaccaattttacaatataaccattatctgaagcctgaaattttcaccgaaaatggcggccctttgaaactcgccgaaatgctgcttttccgtgagtttatgcgacgcccgaaacgaaccaacagcctggaaacccaggggctggttcaggttggctatcaggggctggagaaggctcacagtgttcctactcactggcaggctaaaggcttaacccttgatgactggcgcgattttctgaaggtggcgctggatttctatgtcagagaaagcaactacatccaactggatgacgatctaagaaactggatcggtagccgtttctcttccaaatttgtccgcaacccagattcgaaagagccagatgacaaccaggttaaacgctggccgcaaattcgccacggtaatgtgactcagcgcctggtcaagctgttgattttaggggccaaatttaacaccgtaaatacggtaactattgatattgttaacgcctggctgaaagaagcctggctccagctaacaggatctctggcggtattgaagcctgatggaaaccgtttttatttaccgaaagagcatctgacattctctctggtgcaaaaagcacgcatttgtccagtgaccaataaattactggcgacaaccttcaaaggtctgaccccctatttgcccatgcatatccagttcgagcgactgacgagtgcacagtacgacgcgtttttggctcaggaagtcacgctgccagcgatctgggaacacgatcgctctcaggatgattatgtcgacgggttaacaaaagtgcgtgactgggtaagccaggatccgcaagtgctaccattacgctcgcaaaacctctggacggacattaacgatcgcgtggtagaaggtggattttactaccgcaccgcagaacactcggcacagcaatcgtcggagcgcctgcaaagctacgaaagaatgtttaaaaacgggcagcttaacgtccttaactgctcaaccacgatggaaatgggtgtggatattggcggtatttctgcagtggtgatgaacaacgttcctccgcatccggccaactatttacagcgagccgggcgtgccgggcgtagtaaagagtcacgcgctatttcgtacaccttgtgcaaagggaacccgcacgatcagcaggtttttgctaatcccctctggccgtttgagacggtgatcccggctccaatggtggcaatgaactcagagcgtctggtgcagcgtcacgtcaattccctgttactgtcagaatacttatgccatgtggtcggtgaaaccgaaaaagagcgtaccagccttaatagccagtggttctttggcgaagagctcgaccagtcggtatgcaatcgttttaaagcctggctcgaacgtccgacgctgagcattgataacgcgctggagcgtctggttaaagggacggcattgcacggcgttacggcagaaaaactgcgggataaaacgcaggaggctattgccgtcttacagacacgctggctggggatcttccgcgatctcgtgaaacaggaaagtgaatcgcagcccaatacgccgtaccgcaggcgactggaactggagaaaaaacggcattgtggtgaatacctgttacgcgatctggcggcccgaactttcctacccggatatggcttcccaacggatgttgtcacttttgataacttcaccatggaagattatatccgcgagaaaacgcacaaaagcagtgataagaatgaccgggaggataacgtttcgcgttataaagggctgccttcgcgcaacctttccgttgcgatccgtgagtatgcgccgggcgcggagattatccttgatggtcgggtattccgctcggccggtgtttcgctgcactggcataaccttaacgccgatactaacgaagcccagcgtctggacagcgcctggcgttgccataaatgcggtactttaggctatgaggaaggtattggtggctcgggggatttattctgtaccaatagcgcgtgcggggagcggatcacgctggataaccgacgtcaggtattacagcccgccggttttgtcaccgatgcccatactcccgttacgaacaacattgaaacaatgaaattcatcccggtggtgcctgcctgggtgtttgtgaaagcagaacgcgtgccactgccaaacccgctgatgggttttatggcgtcaggcgcggatggtcatgttttccagcagagcatgggcgaaggtggacacggttatgcgctgtgcctgagctgcggccgggcggagtcaatgctcaatgccaccgatacgccgaaatcgatggaagcgcattatcctccgcgccccggtaaatctgatcgcgacagccagaatcagcggattatctgccctggctccacggcgctgaataagaatgtcacgctgggtgcgctggcgcgcaccgatgtgtttgaactcattttgcgccgtccgcaaaacggggagtatatccccgataattctgatgaaggccgtattgtggccatgacgctggcggttgcactacgtcgagcgctggccagcgtgctgggggtatcggcgacagaactgggctatgcggtgcgtccggtcagactggataatgagcaatcggtcctggcggtgcagctttacgacattatcagcggcggtgcggggtttgcttccagtgcgccattgcatattgaagcggtcctcaaagggatggtgaaacagctgggatgccgccactgtgataccgcctgtagcgaatgtctgctcgattcgcagacccgccacgatcacgatcagctggatcgtaaagccgcgcaggcctggctgggggaggatttcagtcactatatcggtttgccggaggcggaaaaattctccctggccgacgcgcagtattgcccaggcagcattgaggatgctatccgtcgtgccattaacgacggggcgcgcaaactcacgttgtggatgaatgggccgcttaacgagtgggatttgtatgcccgccagttccgaacggcgatccagaactatcggctgaaagatgaggttgaggttacgctggttgtgcccggtcatattgaagatccggagcttttacaggagattgcgcagtttgccgccattggtgtgcagctttgccagtctgagctgaatacggatacgccggttgtcgcacaggtagcattcaacgatcgcctgatgacgttgatttctcgcagcccagaggccaccatccccggcccgaactggcatctgaatagccagatggttattcgcagccatgcgtttgagccgataacgcttagtaaagcagagctattatccgatgccgcaggtagcagaggcctggtcaacgatattgagatccataagcagcttaatggcccggtttctcagtttggtcagcgtttctggggcgtgttaaccggggcgcaggaagatattcagacgctgctgaaggaaaaccaggtgacgcgcattcactatagcgatcgttatctgcaaaacccggtggcgctggcgttattaggcgggctgttaaaaccgctgaaatcgatcctggcgcaggatgcgcaagtgacgattgatacgctgtttaagagtaaagagcggccaggcaacaagccgttccatgactggatgagtgaagcggattttcaggattttgccgaccagtggtttgcggcatctatgggcagagccgtcgtggttaacaccgttggctcgccgcgtgatattccacaccatcgtaaactgatggtgaccttcagtaatggtcaggcgctgaagatccgttttgaccaagggatgggatactggcgcatcgtctttgcgcgagcgtatcgcgattttgattttaacgatgatgtggctttccagctcgggaatatggcaaaagcctgcgttgaaggtcaggtggtcaacagcgaggaaagttgggcaaccgatgtgctggtgcaggtgatagtcccttaa

SEQ ID NO: 30265 - DNA, 3300 bp, Salmonella enterica; identical to SEQ ID NO: 29993
  subsp. enterica serovar Paratyphi A str. SA19950809

SEQ ID NO: 30266 - DNA, 6321 bp, Salmonella enterica subsp. enterica serovar Rissen str. 150; identical to SEQ ID NO: 29990

SEQ ID NO: 30267 - DNA, 3300 bp, Salmonella enterica subsp. enterica serovar Rissen str. 150; identical to SEQ ID NO: 29991

SEQ ID NO: 30268 - DNA, 6321 bp, Salmonella enterica
  subsp. enterica serovar Senftenberg str. A4-543
atgactacacgctatttttcttcgctgattgaacaatcactgtcgcgttctacggaggcgacgctgagtattatgggggtgaccaacccgaatcttcgcgagcatctcacgcaacaaatggcggccgattgcgggaaagaaggatcgtttcttgcctcacccgtatttgaacagacatttggctggaaagagtccaacagcacaatgaaagaccttgcaacaaaacaaacgttgctaagcaaggaggtggtggactcgctggatagtgaggaaaatggtcgttatcgttttggctctgactggaaacctttcacgcatcagttagccagctggcaatcattacttgagaaaaaacattcggtcgtggtgaccagcgggacaggctctggcaaaacggaatgctttatggttccggtgctggaagacctctatcgtgagcttcaggttaagaacaaaaaaccgttgataggtgtgagagcactttttctttacccactgaatgccctgattaattcccagcgcgagcgtttagatgcgtggacccggagttttggttccggaattcggtactgtctgtataacggtaacacggaagaattgcatgctttggtcaaaagtgagcaggcaaacaggcctaatgaggttttgtcacgagagaagatgcgtgaagagcccgctcccattttagtgaccaacggtaccatgctggaatacatgatggttcgtcaggttgatgcgccgattattcagaaatcaaaagcggaaaaatcattacgctggatagttctggatgaagcccatacctacgttggttctcaggccgctgagttggctctacagctccgtcgcgtcatgacggcatttggcgtcacgcctgatgatgttcgctttgtggcgacgtcggccaccatggccggaagtgatgctgaaaagcagctgaaaaaattcttgtctgagctgtcaggagtgccacaggaacgtattgatgttctggggggaagccgcgttattcctgagctcgaaccctgcaaacaatattctctgtcactggatgagattgagcatatccctgattcggagagtgaagggatcagcccggagcgttatagtgcgttgacccactctccggaagcgcgctgtttacgcgaaatgctggttagccaaccccgaccaatgaaacttgatacgctgacccagcgtttgaacgaactgaccaaacatcagtacacgcagcaggatgttttacgctggatcgatctttgctctggcacactccctaatgcaaaggatcctgcatttctgaaagtcagagcacatattttccagcgaaacacccagggcatctgggcctgtgtggataagaactgtgcagctaaaaaaaataccgcgctggaaaaaaactggtcttttggcaatgtgtatgtaaatcagcggcaaaactgcgagtgcggcagtcccgtttttgaactggcattctgcaatgagtgtaatgaaccgcatcttcttgcacgggataaaaaaggcaaactcgtacagtgggataataaaggtggagatgaattctccctgcaggatgaaatttctgacgattttgaaacatccggagaaaaggttcagaaggattttgtattccagtcgccacaaattattgctgcggaatgtaatacggaagctggctatattatgcagcggctcgatcgtcagacccgcagtatcggcgtggtgaacccggacagtattccgctggcaattaatgatatcgaacaaatctgtagtgccagcaattgtggctataaaggcggaaagggtaaacagcccttccgacgggcgttactgggcgggcctttttatgtcaccaatattgtgcctacggtgctggagtattgccaggacttcactagcgatgaaggtaaagatggcgtcggcccgctctctttgcctggtcgaggtcgtcgcctgattacctttaccgacagtcgtcaggggacggcgcgaatggcagtacgtatgcagcaggaagcagagcgcagccgattacgtggtagcgtagtagaaattcttggctggcaccaacgaaaacaaccaacgagtgctccgaacgaccaggctgacgtgatgaaactggttgcaagggtgacacaataccgtgaagaagcccgggagtatcgcgagtggggaatgcccgaggaagcaaaactttctgaagctcaggccgaacgccttgaacaggcaatccagacggcgacggggggaaaggctgcaaccattttagtttgccgaacctggacggaaatggtcaatgagctgaaagagaaagccgatatacagggaccaattttacaatataaccattatctaaagcctgaaattttcaccgaaaatggtggccctttgaaactcgccgaaatgctgcttttccgtgagtttatgcgacgcccgaaacgaaccaacagcctggaaacccaggggctggttcaggttggctatcaggggctggagaaggcgcacagtgttcctgctcactggcaggctaaaggcttaacccttgatgactggcgcgattttctgaaggtgacgctggatttctatgtcagagaaagtaactacatccaactggatgacgatctaagaaactggatcggtagccgtttctcttccaaatttgtccgcaacccggattcgaaagagccagatgacaaccaggttaaacgctggccgcaaattcgccacggtaatgtgactcagcgcctggtcaaactgttgattttaggagccaaatttaacaccgtaaatacggtaactattgatattgttaacgcctggctgaaagaagcctggctccagctaacaggatctctggcggtattgaagcctgatggaaaccgtttttatttaccgaaagagcatctaacattctctctggttcaaaaagcacgcatttgtccagtgaccaataaattactggcgacaaccttcaaaggtttgaccccctatttgcccatgcatatccagttcgagcgactgacgagtgcacagtacgacgcgtttttggctcaggaagtcacgctgccagcgatctgggaacacgatcgctctcaggatgattatgtcgacgggttaacaaaagtgcgtgactgggtaagcctggatccgcaagtgctatcattacgctcgcaaaacctctggacggacattaacgatcgcgtggtagaaggtggattttactaccgcaccgcagaacactcggcacagcaatcgtcggagcgcctgcaaagctacgaaagaatgtttaaaaacgggcagcttaacgtccttaactgctcaaccacaatggaaatgggtgtggatattggcggtatttctgcagtggtgatgaacaacgttcctccgcatccggccaactatttacagcgagccgggcgtgccgggcgtagtaaagagtcacgcgctatttcgtacaccttgtgcaaagggaacccgcacgatcagcaggtttttgctaatcccctctggccatttgagacggtgatcccggctccaatggtggcaatgaactcagagcgtctggtgcagcgtcacgtcaattccctgctgctgtcagaatatttatgccatgtggtcggggaaaccgaaaaagagcgtaccagccttaatagccagtggttctttggcgaagagctcgaccagtcggtatgcaatcgttttaaagcctggctcgaacgtccgacgctgagcattgataacgcgctggagcgtctggttaaagggactgcattgcacggcgttactgcagaaaaactgcgtgataaaacgcaggaggctattgccgtcttacagacacgctggctggggatcttccgcgatctcgtgaaacaggaaagtgaatcgcagcccaatacgccgtaccgcaggcgactggagctggagaaaaaacggcattgtggtgaatacctgttacgcgatctggcggcccgaactttcctgcccggatatggcttcccaacggatgttgtcacttttgataacttcaccatggaagattatatccgcgagaaaacgcacaaaggccgtgataagaacgaccgggaggataacgtttctcgttataaggggctgccttcgcgcaatctttccgttgcgatccgtgaatatgcgccgggtgcagagattatccttgatggtcgggtattccgctcggccggcgtttcgctgcactggcataaccttaacgccgatactaacgaagcccagcgtctggacagcgcctggcgttgccacaaatgcggtaccttaggttatgaggaaggtattggtggcccgggggatttattctgtaccaatagcgcgtgcggggagcggatcacgctggataaccgacgtcaggtattacagcccgccggttttgtcaccgatgcccatactcccgttacgaacaacattgaaacaatgaaattcatcccggtggtgcctgcctgggtatttgtgaaggcagaacgcgtgccactgccaaacccgctgatgggctttatggcttcaggcgcggatggccatgttttccagcagagcatgggcgaaggtgggcacggttatgcgctgtgcctgagctgcggccgggcggagtcaatgctcagtgctaccgatgcgccgaaatcgatggaagcgcattatcctccgcgccccggtaaatctgatcgcgacagccagaatcagcggattatctgccctggatccacagcactgaataagaatgtcacgctgggtgcgctggcccgcaccgatgtgtttgagctcattttgcgccgtccgcaaaacggggagtatatccccgataattctgatgaaggccgtattgtggctatgacgctggtggttgcgctacgtcgggcactggccagcgtgctgggggtatcggcggcagaattgggctatgcggtgcgtccggtcaggctagagaatgagcaatcggtcctggcggtgcaactttacgacattatcagcggcggtgcggggtttgcttccagtgcgccattgcatattgaagcagtcctcaaagggatggtgaaacagctgggatgccgccactgtgataccgcctgtagcgaatgtctgctcgattcgcagacccgccacgatcacgatcagctggatcgtaaagccgcgcaggcctggctgggggaggatttcagtcactatatcggtttgccggaggcggaaaaattctccctggccgacgcgcagtattgcccaggcagcattgaggatgctatccgtcgtgccattaacgacggggcgcgcaaactcacgttgtggatgaatgggccgcttaacgagtgggatttgtatgcccgccagttccgagcggcgatccagaactatcggctgaaagatgaggttgaggttacgctggttgtgcccggtcatattgaagatccggagcttttacaggagattgcgcagtttgccgccattggtgtgcagctttgccagtctgagctgaatacggatacgccggttgtcgcacaggtagcattcaacgatcgcctgatgacgttgatttctcgcagcccagaggccaccatccccggcccgaactggcatctgaatagccagatggttattcgtagccatgcgtttgagccgataacgcttagtaaagctgagctattatccgatgccgcaggtaacagaggcctggtcaacgatattgagatccataagcagcttaatggcccggtttctcagtttggtcagcgtttctggggcgtgttaaccggggcgcaggaagatattcagacgctgctgaaggaaaaccaggtgacgcgcattcactatagcgatcgttatctgcaaaacccggtggcgctggcattattaggcgggctgttaaaaccgctgaaatcgatcctggcgcaggatgcgcaagtgacgattgatacgctgtttaagagtaaagagcggccaggcaacaagccgttccatgactggatgagtgaaacggattttcaggattttgccgaccagtggtttgcggcatctatgggcagagccgtcgtggttaacacctttggctcgccgcgtgatattccacaccatcgtaaactgatggtgaccttcagtaatggtcaggcgctgaagatccgttttgaccaggggatgggatactggcgcatcgtctttgcgcgagcgtatcgcgattttgattttaacgatgatgtggctttccagctcgggaatatggcaaaagcctgcgttgaaggtcaggtggtcaacagcgaggaaagttgggcaaccgatgtgctggtgcaggtgatagtcccttaa

SEQ ID NO: 30269 - DNA, 234 bp, Salmonella enterica
  subsp. enterica serovar Senftenberg str. A4-543
atgtcacaacaaaatcctgttatcgatatttcccctgatgccagctaccgctattccgtcaccttgctccccgtatttgctgctgctgttgccagcggtaaaacaacatttgacagtgtttttgagaataagcccggcgccgtattttttttgagacaggttagagactttgactcgcgatggtttaacgccattttccagtactgtctattgcgtaatgttactgaaaaataa

SEQ ID NO: 30270 - DNA, 6321 bp, Salmonella enterica; identical to SEQ ID NO: 30268
  subsp. enterica serovar Senftenberg str. ATCC 43845

SEQ ID NO: 30271 - DNA, 3300 bp, Salmonella enterica
  subsp. enterica serovar Senftenberg str. ATCC 43845
ttgagtcagtccgaatacacatccattctaaagtgtaccccatggctagctaaattcctcacccgcagaggattgaagcaaccagaccatcgtccgttatatgaataccacgcaacgagtgaagaatatgatgaattgaaatggctgctgcgatctataggggtacccgatggttataaaagtgataaagggtacgcagcctgtttcacattgttctgctcagagtggtatcgaagagattatgaaagggagtatggatgggcatgggagccaatttacaagacgataggtatctcagcatcttcctcggaaatggggaaaattatccctaaaggcctggatggttactgggggcgtccagtgcggttttatgacacagaaaggcggaatttcttaggttccttattcagtgaaggcggcctacctttcaggttgctaaaggaatctaatagccgttttcagtcgatgttttctctcattctaaatcaatacgatcaggctaaatattctaacatttccacgttcgcgttagtccatgcagcggtagaaaaatcatccctgccagtcgttttcaaagaggatacttcagttgagcttattagtcggatggctgaacagttagtatctcttgttcaaatttatgatttgagtaatcataccgaacccgtaaaagaacttgaacgtgttcatcctaagtggcgtgacagtttccctgttcctctcgatgatgatacgggtaccagtttccttaatggacttttacgaacagcttctactgaatcaaaaccccgccttcaaaagaataaaaccactctctgtcagtttttatggtcagaaaatcatcctgaagccgtccaggccctcatttctctgcctgaagagctgagtttttcaattgatattgagccttcaacaacgcgcttcgagcttgctatctatgaagatggtaacgaaatcgcaagtctgggacctgcctatgcaacgctaagtaactcccaggcaaaaataaaagttcgtaagcgcgagattaaattttaccgaagaaatcctacggtcagtttgtttattgtggcgagagctgggggtatgtttgtcggctccaatcttttagaaggcagtgaagttgcggttggcgatgttccattggtttttgtttctgataaaaatgaatggctgttacagggacaagcctcttgcagcgtacgtggcagccatgtgcttattgtgctgccaaaggatggctgtctggcttcagaacatgaggattgtgactctggcttttcggctttgggatgccgtgctctgaccatcaaaggtcgccaggatatcattattgaaggcgacgaaacgtaccggataaagactggaagggatcagattatccatgctggattctctttccaggggaagcgattaaattggacaagttacccggatgaactcttcctcggtgttcctgggattactcaacattctgagaatctatcaacgcgccattacaagcgttttttcaacggaacatttatagaaaattgtgatgtacaagaaaaaatgggagcacagtttatttcggtgcgtaacgaaaataatgaaacgttactgcgtaagaaaattggcattctccccaatgattttagtttggaaataaaaaatggacaacaggcgaacgaaggctctgtcattattactactcagcacccttgtttgtatagtttaaaggaaaaaacacttgaagttggacggaagcggttgcccggtagcacagaaataatgatgaaggcggagggcattcctcctgcatcaatttcattacaaataacaccaaacctcactgcaaacccgattgttatttggttaccatttcctgcacgaggctgtcttgcgttcgataaagatgagaagcctctcccgaaaaatttaacgattaacgatcttctgggtgccagagcatatcttttcggaaaaaatggtgagcctacgcgataccagcttgaactacgtttacgttcgcgtagtggaatgcaggcctggtatgagtggcactacagtgcgggagaatgtccggtagagcttactttatatagcttaagggaacatattgataatttactctccctggaggaaggaattgatcaaacagttgatatgcgcataaaaggaggtggtagttcttttacctggcagatccgacgttataaatatagtctggactatgatcgtggcaggcagattcttctcgcaaactcaataagtaatcgtacaggccagatcccttcgcccgtcattatgttactcagcgaaccggagagaaaagttgtaccgctgacgtcaagaatgagcgaaggtgtaccagttggtgaatttgaactaagttcgataatacaaaagaatggcccatggctggtgctgccgaaactaggtgaagaagcctcatttcgaccttgctttattgcaggtgagccggtaattcaaagcgacgcgacatcaatacagtctttacaaaaagcaacgcagctttttaatcctcgttcagatgtcaataccattatgttagttctggaacaaatggcgagcgacccggcacactcgggctggcagttcttacgcaatttatacgatcagttcgggtatttacctttggctacctttgaagtatggcgggcacttgttcagcatccacaagcgttggcgatgtcgctgttcaaatttgaaatgtccattgattatctcagccgtattgaaagtgagtttcccgttttctgggagtttttacccattacagaagttaaacgttccgccacacgttttcgtgcttttttggctcataaaggtgcaccggaggaaatgcagataaggttgctggacagaatgtatcagcagctgggcacaacattcccgacttatgccagtgaggtgcaattatggttgagtcaagggaaattaccaccggtttttcctgagttgacgatgaaaggtattatccttgagtggtatcaggaacttctacgcgaacatggtgaatctcgctggccagaatttggtggcccgggccttttacgttggtatatgtcacaacaaaatcctgttatcgatatttcccctgatgccagctaccgctattccgtcaccttgctccccgtatttgctgctgctgttgccagcggtaaaacaacatttgacagtgtttttgagaataagcccggcgccgtattttttttgagacaggttagagactttgactcgcgatggtttaacgccattttccagtactgtctattgcgtaatgttactgaaaaataa

SEQ ID NO: 30272 - DNA, 6321 bp, Salmonella enterica subsp. enterica serovar Weltevreden
atgactacacgctatttttcttcgctgattgaacaatcactgtcgcgttctacggaggcgacgctgagtattatgggggtgaccaacccgaatcttcgcgagcatctcacgcaacaaatggcggccgattgcgggaaagaaggatcgtttcttgcctcacccgtatttgaacagacatttggctggaaagagttcaacagcacaatgaaagaccttgcaacaaaacaaacgttgctaagcaaggaggtggtggactcgctggatagtgaggaaaatggtcgttatcgttttggctctgactggaaacctttcacgcatcagttagccagctggcaatcattacttgagaaaaaacattcggtcgtggtgaccagcgggacaggctctggcaaaacggaatgctttatggttccggtgctggaagacctctatcgtgagcttcaggttaagaacaaaaaaccgttgataggtgtgagagcactttttctttacccactgaatgccctgattaattcccagcgcgagcgtttagatgcgtggacccggagttttggttccggaattcggtactgtctgtataacggtaacacggaagaattgcatgctttggtcaaaagtgagcaggcaaacaggcctaatgaggttttgtcacgagagaagatgcgtgaagagcccgctcccattttagtgaccaacggtaccatgctggaatacatgatggttcgtcaggttgatgcgccgattattcagaaatcaaaagcggaaaaatcattacgctggatagttctggatgaagcccatacctacgttggttctcaggccgctgagttggctctacagctccgtcgcgtcatgacggcatttggcgtcacgcctgatgatgttcgctttgtggcgacgtcggccaccatggccgggagtgatgctgaaaagcagctgaaaaaattcttgtctgagctgtcaggagtgccacaggaacgtattgatgttctggggggaagccgcgttattcctgagctcgaaccctgcaaacaatattctctgtcactggatgagattgagcatatccctgattcggagagtgaagggatcagcccggagcgttatagtgcgttgacccactctccggaagcgcgctgtttacgcgaaatgctggttagccaaccccgaccaatgaaacttgatacgctgacccagcgtttgaacgaactgaccaaacatcagtacacgcagcaggatgttttacgctggatcgatctttgctctggcacactccctaatgcaaaggatcctgcatttctgaaagtcagagcacatattttccagcgaaacacccagggcatctgggcatgtgtggataagaactgtgcagctaaaaaaaataccgcgctggaaaaaaactggtcttttggcaatgtgtatgtaaatcagcggcaaaactgcgagtgcggcagtcccgtttttgaactggcattctgtaatgagtgtaatgaaccgcatcttcttgcacgggataaaaaaggcaaactcgtacagtgggataataaaggtggagatgaattctccctgcaggatgaaatttctgacgattttgaaacatccggagaaaaggttcagaaggattttgtattccagtcgccacaaattattgctgcggaatgtaatacggaagctggctatattatgcagcggctcgatcgtcagacccgcagtatcggtgtggtgaacccggacagtattccgctggcaattaatgatatcgaacaaatctgtagtgccagcaattgtggctataaaggcggaaagggtaaacagcccttccgacgggcgttactgggcgggcctttttatgtcaccaatattgtgcctacggtgctggagtattgccaggatttcactagcgatgaaggtaaagatggcgtcggcccgctctctttgcctggtcgaggtcgtcgcctgattacctttaccgacagtcgtcaggggacggcgcgaatggcagtacgtatgcagcaggaagcagagcgcagccgattacgtggtagcgtagtagaaattcttggctggcaccaacgaaaacaaccaacgagtgctccgaacgaccaggctgacgtgatgaaactggttacaagggtgacacaataccgtgaagaagcccgggagtatcgcgagtggggaatgcccgaggaagcaaaactttctgaagctcaggccgaacgccttgaacaggcaatccagacggcgacggggggaaaggctgcaaccattttagtttgccgaacctggacggaaatggtcaatgagctgaaagagaaagccgatatacagggaccaattttacaatataaccattatctaaagcctgaaattttcaccgaaaatggtggccctttgaaactcgccgaaatgctgcttttccgtgagtttatgcgacgcccgaaacgaaccaacagcctggaaacccaggggctggttcaggttggctatcaggggctggagaaggcgcacagtgttcctgctcactggcaggctaaaggcttaacccttgatgactggcgcgattttctgaaggtgacgctggatttctatgtcagagaaagtaactacatccaactggatgacgatctaagaaactggatcggtagccgtttctcttccaaatttgtccgcaacccggattcgaaagagccagatgacaaccaggttaaacgctggccgcaaattcgccacggtaatgtgactcagcgcctggtcaaactgttgattttaggagccaaatttaacaccgtaaatacggtaactattgatattgttaacgcctggctgaaagaagcctggctccagctaacaggatctctggcggtattgaagcctgatggaaaccgtttttatttaccgaaagagcatctaacattctctctggttcaaaaagcacgcatttgtccagtgaccaataaattactggcgacaaccttcaaaggtttgaccccctatttgcccatgcatatccagttcgagcgactgacgagtgcacagtacgacgcgtttttggctcaggaagtcacgctgccagcgatctgggaacacgatcgctctcaggatgattatgtcgacgggttaacaaaagtgcgtgactgggtaagcctggatccgcaagtgctatcattacgctcgcaaaacctctggacggacattaacgatcgcgtggtagaaggtggattttactaccgcaccgcagaacactcggcacagcaatcgtcggagcgcctgcaaagctacgaaagaatgtttaaaaacgggcagcttaacgtccttaactgctcaaccacgatggaaatgggtgtggatattggcggtatttctgcagtggtgatgaacaacgttcctccgcatccggccaactatttacagcgagccgggcgtgccgggcgtagtaaagagtcacgcgctatttcgtacaccttgtgcaaagggaacccgcacgatcagcaggtttttgctaatcccctctggccatttgagacggtgatcccggctccaatggtggcaatgaactcagagcgtctggtgcagcgtcacgtcaattccctgctgctgtcagaatatttatgccatgtggtcggggaaaccgaaaaagagcgtaccagccttaatagccagtggttctttggcgaagagctcgaccagtcggtatgcaatcgttttaaagcctggctcgaacgtccgacgctgagcattgataacgcgctggagcgtctggttaaagggacggcattgcacggcgttactgcagaaaaactgcgtgataaaacgcaggaggctattgccgtcttacagacacgctggctggggatcttccgcgatctcgtgaaacaggaaagtgaatcgcagcccaatacgccgtaccgcaggcgactggagctggagaaaaaacggcattgtggtgaatacctgttacgcgatctggcggcccgaactttcctgcccggatatggcttcccaacggatgttgtcacttttgataacttcaccatggaagattatatccgcgagaaaacgcacaaaggccgtgataagaacgaccgggaggataacgtttctcgttataaggggctgccttcgcgcaatctttccgttgcgatccgtgagtatgcgccgggtgcagagattatccttgatggtcgggtattccgctcggccggtgtttcgctgcactggcataaccttaacgccgatactaacgaagcccagcgtctggacagcgcctggcgttgccacaaatgcggtaccttaggctatgaggaaggtattggtggcccgggggatttattctgtaccaatagcgcgtgcggggagcggatcacgctggataaccgacgtcaggtattacagcccgccggttttgtcaccgatgcccatactcccgttacgaacaacattgaaacaatgaaattcatcccggtggtgcctgcctgggtatttgtgaaggcagaacgcgtgccactgccaaacccgctgatgggctttatggcttcaggcgcggatggccatgttttccagcagagcatgggcgaaggtgggcacggttatgcgctgtgcctgagctgcggccgggcggagtcaatgctcagtgctaccgatgcgccgaaatcgatggaagcgcattatcctccgcgccccggtaaatctgatcgcgacagccagaatcagcggattatctgccctggatccacagcactgaataagaatgtcacgctgggtgcgctggcccgcaccgatgtgtttgagctcattttgcgccgtccgcaaaacggggagtatatccccgataattctgatgaaggccgtattgtggctatgacgctggtggttgcgctacgtcgggcgctggccagcgtgctgggggtatcggcggcagaattgggctatgcggtgcgtccggtcaggctagagaatgagcaatcggtcctggcggtgcaactttacgacattatcagcggcggtgcggggtttgcttccagtgcgccattgcatattgaagcagtcctcaaagggatggtgaaacagctgggatgccgccactgtgataccgcctgtagcgaatgtctgctcgattcgcagacccgccacgatcacgatcagctggatcgtaaagccgcgcaggcctggttgggggaggatttcagtcactatatcggtttgccggaggcggaaaaattctccctggccgacgcgcagtattgcccaggcagtattgaagatgctatccgtcgtgccattaacgacggggcgcgcaaactcacgttgtggatgaatgggccgcttaacgagtgggatttgtatgcccgccagttccgaacggcgatccagaactatcggctgaaagatgaggttgaggttacgctggttgtgcccggtcatattgaagatccggagcttttacaggaggttgcgcagtttgccgccattggtgtgcagctttgccagtctgagctgaatacggatacgccggttgtcgcacaggtagcattcaacgatcgcctgatgacgttgatttctcgcagcccagaggccaccatccccggcccgaactggcatctgaatagccagatggttattcgtagccatgcgtttgagccgataacgcttagtaaagctgagctattatccgatactgcaggtagcagaggcctggtcaacgatattgagatccataagcagcttaatggcccggtttctcagtttggtcagcgtttctggggcgtgttaaccggggcgcaggaagatattcagacgctgctgaaggaaaaccaggtgacgcgcattcactatagcgatcgttatctgcaaaacccggtggcgctggcgttattaggcgggctgttaaaaccgctgaaatcgatcctggcgcaggatgcgcaagtgacgattgatacgctgtttaagagtaaagagcggccaggcaacaagccgttccatgactggatgagtgaagcggattttcaggattttgccgaccagtggtttgcagcatctatgggcagagccgtcgtggttaacacctttggctcgccgcgtgatattccacaccatcgtaaactgatggtgaccttcagtaatggtcaggcgctgaagatccgttttgaccaagggatgggatactggcgcatcgtctttgcgcgagcgtatcgcgattttgattttaacgatgatgtggctttccagctcgggaatatggccaaagcctgcgttgaaggtcaggtggtcaacagcgaggaaagttgggcaaccgatgtgctggtgcaggtgatagtcccttaa

SEQ ID NO: 30273 - DNA, 3300 bp, Salmonella enterica subsp. enterica serovar Weltevreden
ttgagtcagtccgaatacacatccattctaaagtgtaccccatggctagctaaattcctcacccgcagaggattgaagcaaccagaccatcgtccgttatatgaataccacgcaacgagtgaagaatatgatgaattgaaatggctgctgcgatctataggggtacccgatggttataaaagtgataaagggtacgcagcctgtttcacattgttctgctcagagtggtatcgaagagattatgaaagggagtatggatgggcatgggagccaatttacaagacgataggtatctcagcatcttcctcggaaatggggaaaattatccctaaaggcctggatggttactgggggcgtccagtgcggttttatgacacagaaaggcggaatttcttaggttccttattcagtgaaggcggcctacctttcaggttgctaaaggaatctaatagccgttttcagtcgatgttttctctcattctaaatcaatacgatcaggctaaatattctaacatttccacgttcgcgttagtccatgcagcggtagaaaaatcatccctgccagtcgttttcaaagaggatacttcagttgagcttattagtcggatggctgaacagttagtatctcttgttcaaatttatgatttgagtaatcataccgaacccgtaaaagaacttgaacgtgttcatcctaagtggcgtgacagtttccctgttcctctcgatgatgatacgggtaccagtttccttaatggacttttacgaacagcttctactgaatcaaaaccccgccttcaaaagaataaaaccactctctgtcagtttttatggtcagaaaatcatcctgaagccgtccaggccctcatttctctgcctgaagagctgagtttttcaattgatattgagccttcaacaacgcgcttcgagcttgctatctatgaagatggtaacgaaatcgcaagtctgggacctgcctatgcaacgctaagtaactcccaggcaaaaataaaagttcgtaagcgcgagattaaattttaccgaagaaatcctacggtcagtttgtttattgtggcgagagctgggggtatgtttgtcggctccaatcttttagaaggcagtgaagttgcggttggcgatgttccattggtttttgtttctgataaaaatgaatggctgttacagggacaagcctcttgcagcgtacgtggcagccatgtacttattgtgctgccaaaggatggttgtctggcttcagaacatgaggattgtgactctggcttttcggctttgggatgccgtgctctgaccatcaaaggtcgccaggatatcattattgaaggcgacgaaacgtaccgcataaagactggaagggatcagattatccatgctggattctctttccaggggaagcggttaaattggacaagttacccggatgaactcttcctcggtgttcctgggattactcaacattctgagaatctatcaacgcaccattacaagcgttttttcaacggaacatttatagataattgtgatgtacaagaaaaaatgggagcacagtttatttcggtgcgtaacgaaaataatgaaacgttattgcgtaagaaaattggtattctccccaatgattttagtctggaaataaaaaatggacaacaggcgaacgaaggttctgtcattattactactcagcacccttgtttgtatagcttgaaggaaaaaacacttgaagttggaaggaagcggttgcccggtagtacagaaataatgatgaaggcggagggcattcctcctgcatcaatttcattacaaataacgccaaacctcactgcaaacccgattgttatttggttaccatttcctgcacgaggctgtcttgcgttcgataaagatgagaagcctctcccgaaaaatttaacgattaacgatcttctgggtgccagagcatatcttttcggaaaaaatggtgagcctacgcgataccagcttgaactacgtttacgttcgcgtagtggaatgcaggccttgtatgagtggcactacagtgcgggagaatgtccggtagagcttactttatatagcttaagggaacatattgataatttactctccctggaggaaggaattgatcaaacagttgatatgcgcataaaaggaggtggtagttcttttacctggcagatccgacgttataaatatagtctggactatgatcgtggcaggcagattcttctcgcaaactcaataagtaatcgtacaggccagatcccttcgcccgtcattatgttactcagcgaaccggagagaaaagttgtaccgctgacgtcaagaatgagcgaaggtgtaccagttggtgaatttgaactaagttcgataatacaaaagaatggcccatggctggtgctgccgaaaccaggtgaagaagcctcatttcgaccttgctttattgcaggtgagccggtaattcaaagcgacgcgacagcaatacagtctttacaaaaagcaacgcagctttttaatcctcgttcagatgtcaataccattatgttagttctggaacaaatggcgagcgacccggcacactcgggctggcagttcttacgcaatttatacgatcagttcgggtatttgcctttggctacctttgaagtatggcgggcacttgttcagcatccacaagcgttggcgatgtcgctgttcaaatttgaaatgtccattgattatctcagccgtattgaaagtgagtttcccgttttctgggagtttttacccattacagaagttaaacgttccgccacacgttttcgtgcttttttggctcataaaggtgcaccggaggaaatgcagataaggttgctggacagaatgtatcagcagctgggcacaacattcccgacttatgccagtgaggtgcaattatggttgagtcaagggaaattaccaccggtttttcctgagttgacgatgaaagatattatccttgagtggtatcaggaacttctacgcgaacatggtgaatctcgctggccagaatttggtggcccgggccttttacgttggtatatgtcacaacaaaatcctgttatcgatatttcccctgatgccagctaccgctattccgtcaccttgctccccgtatttgctgctgctgttgccagcggtaaaacaacatttgacagtgtttttgagaataagcccggcgccgtattttttttgagacaggttagagactttgactcgcgatggtttaacgccattttccagtactgtctattgcgtaatgttactgaaaaataa

SEQ ID NO: 30274 - DNA, 6321 bp, Salmonella enterica subsp. enterica serovar Weltevreden; identical to SEQ ID NO: 30272

SEQ ID NO: 30275 - DNA, 2835 bp, Salmonella enterica subsp. enterica serovar Weltevreden
atgttttctctcattctaaatcaatacgatcaggctaaatattctaacatttccacgttcgcgttagtccatgcagcggtagaaaaatcatccctgccagtcgttttcaaagaggatacttcagttgagcttattagtcggatggctgaacagttagtatctcttgttcaaatttatgatttgagtaatcataccgaacccgtaaaagaacttgaacgtgttcatcctaagtggcgtgacagtttccctgttcctctcgatgatgatacgggtaccagtttccttaatggacttttacgaacagcttctactgaatcaaaaccccgccttcaaaagaataaaaccactctctgtcagtttttatggtcagaaaatcatcctgaagccgtccaggccctcatttctctgcctgaagagctgagtttttcaattgatattgagccttcaacaacgcgcttcgagcttgctatctatgaagatggtaacgaaatcgcaagtctgggacctgcctatgcaacgctaagtaactcccaggcaaaaataaaagttcgtaagcgcgagattaaattttaccgaagaaatcctacggtcagtttgtttattgtggcgagagctgggggtatgtttgtcggctccaatcttttagaaggcagtgaagttgcggttggcgatgttccattggtttttgtttctgataaaaatgaatggctgttacagggacaagcctcttgcagcgtacgtggcagccatgtacttattgtgctgccaaaggatggttgtctggcttcagaacatgaggattgtgactctggcttttcggctttgggatgccgtgctctgaccatcaaaggtcgccaggatatcattattgaaggcgacgaaacgtaccgcataaagactggaagggatcagattatccatgctggattctctttccaggggaagcggttaaattggacaagttacccggatgaactcttcctcggtgttcctgggattactcaacattctgagaatctatcaacgcaccattacaagcgttttttcaacggaacatttatagataattgtgatgtacaagaaaaaatgggagcacagtttatttcggtgcgtaacgaaaataatgaaacgttattgcgtaagaaaattggtattctccccaatgattttagtctggaaataaaaaatggacaacaggcgaacgaaggttctgtcattattactactcagcacccttgtttgtatagcttgaaggaaaaaacacttgaagttggaaggaagcggttgcccggtagtacagaaataatgatgaaggcggagggcattcctcctgcatcaatttcattacaaataacgccaaacctcactgcaaacccgattgttatttggttaccatttcctgcacgaggctgtcttgcgttcgataaagatgagaagcctctcccgaaaaatttaacgattaacgatcttctgggtgccagagcatatcttttcggaaaaaatggtgagcctacgcgataccagcttgaactacgtttacgttcgcgtagtggaatgcaggccttgtatgagtggcactacagtgcgggagaatgtccggtagagcttactttatatagcttaagggaacatattgataatttactctccctggaggaaggaattgatcaaacagttgatatgcgcataaaaggaggtggtagttcttttacctggcagatccgacgttataaatatagtctggactatgatcgtggcaggcagattcttctcgcaaactcaataagtaatcgtacaggccagatcccttcgcccgtcattatgttactcagcgaaccggagagaaaagttgtaccgctgacgtcaagaatgagcgaaggtgtaccagttggtgaatttgaactaagttcgataatacaaaagaatggcccatggctggtgctgccgaaaccaggtgaagaagcctcatttcgaccttgctttattgcaggtgagccggtaattcaaagcgacgcgacagcaatacagtctttacaaaaagcaacgcagctttttaatcctcgttcagatgtcaataccattatgttagttctggaacaaatggcgagcgacccggcacactcgggctggcagttcttacgcaatttatacgatcagttcgggtatttgcctttggctacctttgaagtatggcgggcacttgttcagcatccacaagcgttggcgatgtcgctgttcaaatttgaaatgtccattgattatctcagccgtattgaaagtgagtttcccgttttctgggagtttttacccattacagaagttaaacgttccgccacacgttttcgtgcttttttggctcataaaggtgcaccggaggaaatgcagataaggttgctggacagaatgtatcagcagctgggcacaacattcccgacttatgccagtgaggtgcaattatggttgagtcaagggaaattaccaccggtttttcctgagttgacgatgaaagatattatccttgagtggtatcaggaacttctacgcgaacatggtgaatctcgctggccagaatttggtggcccgggccttttacgttggtatatgtcacaacaaaatcctgttatcgatatttcccctgatgccagctaccgctattccgtcaccttgctccccgtatttgctgctgctgttgccagcggtaaaacaacatttgacagtgtttttgagaataagcccggcgccgtattttttttgagacaggttagagactttgactcgcgatggtttaacgccattttccagtactgtctattgcgtaatgttactgaaaaataa

SEQ ID NO: 30276 - DNA, 6321 bp, Salmonella enterica subsp. enterica serovar Weltevreden; identical to SEQ ID NO: 30272

SEQ ID NO: 30277 - DNA, 2835 bp, Salmonella enterica subsp. enterica serovar Weltevreden; identical to SEQ ID NO: 30275

SEQ ID NO: 30278 - DNA, 6321 bp, Salmonella enterica subsp. enterica serovar Weltevreden; identical to SEQ ID NO: 30272

SEQ ID NO: 30279 - DNA, 3300 bp, Salmonella enterica subsp. enterica serovar Weltevreden; identical to SEQ ID NO: 30273

SEQ ID NO: 30280 - DNA, 6321 bp, Salmonella enterica; identical to SEQ ID NO: 30272
  subsp. enterica serovar Weltevreden str. 2007-60-3289-1

SEQ ID NO: 30281 - DNA, 2835 bp, Salmonella enterica; identical to SEQ ID NO: 30275
  subsp. enterica serovar Weltevreden str. 2007-60-3289-1

SEQ ID NO: 30282 - DNA, 6321 bp, Salmonella enterica; identical to SEQ ID NO: 30272
  subsp. enterica serovar Weltevreden str. HI_N05-537

SEQ ID NO: 30283 - DNA, 858 bp, Salmonella enterica
  subsp. enterica serovar Weltevreden str. HI_N05-537
atgtgtcattcctttttgattgtatattactggaatgacacagaatttctaacactcccaaaagcaacgcagctttttaatcctcgttcagatgtcaataccattatgttagttctggaacaaatggcgagcgacccggcacactcgggctggcagttcttacgcaatttatacgatcagttcgggtatttgcctttggctacctttgaagtatggcgggcacttgttcagcatccacaagcgttggcgatgtcgctgttcaaatttgaaatgtccattgattatctcagccgtattgaaagtgagtttcccgttttctgggagtttttacccattacagaagttaaacgttccgccacacgttttcgtgcttttttggctcataaaggtgcaccggaggaaatgcagataaggttgctggacagaatgtatcagcagctgggcacaacattcccgacttatgccagtgaggtgcaattatggttgagtcaagggaaattaccaccggtttttcctgagttgacgatgaaagatattatccttgagtggtatcaggaacttctacgcgaacatggtgaatctcgctggccagaatttggtggcccgggccttttacgttggtatatgtcacaacaaaatcctgttatcgatatttcccctgatgccagctaccgctattccgtcaccttgctccccgtatttgctgctgctgttgccagcggtaaaacaacatttgacagtgtttttgagaataagcccggcgccgtattttttttgagacaggttagagactttgactcgcgatggtttaacgccattttccagtactgtctattgcgtaatgttactgaaaaataa
